United States Patent Application Publication US 2015/0376612 A1 - sequence listing, part 29

SEQ ID NO: 70837 - DNA, 1091 bp, Homo sapiens
gattttggtcttcactcataatttgaagtagtaatcgattgccccagaagtgaagcaatgagtctctggtttatttgcccgctttccctttttcctttagcatctgttaatcattttggaaggatgatttgagtttttacagattgaatatatttggtggaataatacctcatgcactcatctcaatcttacaattctcttgtttttgcactttgtgtataagtttcgtaacagtttgctgtgaaaataaccagaaactccatttggaataaacattgaagaaatgtgcttacccacaggtagacatttcttcttggatagctgtaatgctagttaacagaactatgaagaaaaggagatcatcttcgaatgcatttgtaattgagaggattctgtaaagttaatattgcagacttgaaatgtgaaagcttgttttttcttgtcacaactgtgatcttctttgtgtaaacaagattagtaatcttagcgggatggatggctcattgtcaactcatttaagtggtttggcaaaactcatgcaactttacaaaactcactcttcataacctgtaaaatggtggtgataaagtttgtgcctcaactgcttaggtggaatgtggtaaagcaattgtgtaaggtaactgcagagtgtttctgccgcatctgccactgttgcctgtctacgccagtcttttctattaaaaggtcaaaaccttatgtgatttcttgattttctttaaaattctgctgacgggccgggggcggtggctcatgcctgtaatcccaccactttgagaggccgagataggtggatcaccaggtcaggagttcaagaccagcctggccgagatggtgaaaccctgtctctactaaaaatacaaaaattagccgggcgtggtggtgggcgcctgtaatcccagctactcgggagggtgaggcggagaatcacttgaacccgggaggcggaggttgcagtgaaccgagatcgcgtcagcctgggcacagagcgagactctgtctttaaataaataaataaataaataaataaataaataaaacaattctactgacaatgttattgtacctgctgc

SEQ ID NO: 70838 - DNA, 1014 bp, Homo sapiens
aagttcagccttattctgtgggaactgggtagctgttggaaattcttgaacagggaaatgatagcatgggaatggaagtttaaggagaaggtatatctgacatcagggtgaagcagcgattgaagatgggcaaaacacactggcttcttagaaggccactgtaaagacagaatagcctaattatccttcagaaggagactaagtaaataaatgatggtacatcatccaatagaatattaggtaactggaatagaaatgaggcagccctctatgaatagctttggaagcaaatctaacatacatggttcagtggaaaaaaagcaatgtgcaggataatatatatggcattccaccatttatgtaaaaacaatatatgttatgtgcttctacatgcacgacatatatctgggaggataaataagaaactagggaaacagacaagaaattgatgccaagagaggggaaccaggtagctagaaggcagagatggagagagatctaattttcactgtgtatacttttgaaacttgaatgtttatactgtgggcatatattaactattcagaaagtaaaattttttaaaaaatgttttttagagatagggtatctgttgcccaggctggggtgcagtggcacaatcatagctcactgcagcctcaaattcttggtctcaagggatcctcccacttcagtttcccaagtagctagaactacaggtgtgtgccaccatttctggctaattttaaaaatatatttttttgtagagaaagggttaaaactaacttaagaagaaattgaaagtcccatgtagtccttaagccattcaaaaaattaaatcaacacttttaaaaatacccatctaccactaccccaacacacaactatactagacccagagagtttttcaggtaagttctttgaaagaagagaaataccaaacgctggggtgtgtgtgtgtgtgtgtgtgtgtgtgtgtgtgtgttggagggagattttagctagggtggctagaga

SEQ ID NO: 70839 - DNA, 1024 bp, Homo sapiens
ctccagcagccgcggcgtgtccttgtcctccttcggggggctacagcggcatcctgtctgggtccaacggattgcttgcgggcaacgagaagctcaccatgcataacctcaacaactgcctggcctcctacctggacaaggtgcacgccctggaggcagccaacagcaagctggaggtgaagctccgtgactagtaccagaagcaggggcacaggccctcccacaactacagccactactacaggaccatcgaggacctgcgggacaagattcttggtgccaccattgagaacgccaggattgtcctgcagatcaacaatgctcaactggctgcagatgacttctgaaccaagtttggtttgagtgtttgggtgctggatgaggtgaccctggccaggactgatctggaggcacagatcaaaggcctgaaggaagagctggcctacctgaagaagaagcatgaggaggaaatcaatgccctgaggggccaagtgggagaccaggtccatgtgagggtggattcagctcggacctgccaagatcctgagtgacaggcaaagccaatatgagatcatggccaagcagaactggaaggatgctgaagcctggttcaccagctggactgaggaactgaaccaggaggtcactggccacatagagcagctccagataagcaggtctgaggtcactgacctgcagtgcaccctccagggtcttgagattgagctgcactcgcagctcagcgtgaaagctcccttagaaggcacactggcagaaacagaggcatgctttggagcccagctggtgcagatccaggcactgatcagcagtattgaagcccagctgggcgatgtgcgagctgatggtgagtggcagaatcaggagtaccagcggctcctggagcaggagatcgccacctatcgcagcctgcttgagggccaggaagatcattacaacaacctgtccacctccaaggtcctctgaggctgcaggctctggggcctctgctctcctcaaagcacgt

SEQ ID NO: 70840 - DNA, 1084 bp, Homo sapiens
tgccgtaagctcacataaagccccttgataagtgacagccttgactttaacagctaatccctcctctgagtggttagtggagcctggctcaccactatcgtctcataagggcttcagcgctcgtgtgctcatatgaatggttacagtttattggtccaggtcactttcactaatccccagcttcctttagaggatgtaagacagacactgacctagcttgtacagccttctgcattcttcattgtataagctgatcatgatacaattatctttagacataaacatagcaactgtaatcatattttatctctattcagactggtttttagtcagttacctagctatatctatcaattactgctagcaaatattcttaggtttacatagcaacaaaaattttttctcattagctttagttttagttattccactgaaacatcctcctcttgtccttttctctgcagctagataatcacttttccccccacccccgggctgcagttctgtggctgtcttctcattttcttttcccccaataaggtcatctctgtcttgtgagctccaggtcttagaggctgggacaaattctgtcttcccttctttcccatgtaaacccctcagcttagcttcctgcactctgtcccacaaactttgattcctcctttccctgtcattagcagcagcatcggtggtctcttccctttcaactccaggtatccagcttttaggtctgatttctggaacatatcctcttaaattgttaagcacttatgactgaaatatttgtgaattgggggtcgatttaacttttttctcaagacagggtctcactatgttgcccaggctggtcctgagcttctggcctcaagtgatcctcccacctcgtcctcccaaagtgctgggattatagacatgagccactgtgcctggccctgatttaattttttaatataacaagttgcatattctctagtgtttacactcacatgcttgaatttacaatgcatcaggctcttctcagcaggagcctcatgggttttaaactaaaccttcatgagccagagtaacctgagcatactgaaaa

SEQ ID NO: 70841 - DNA, 1078 bp, Homo sapiens
actgcagcctcgacctcctgggctcaagccatcctcctgcctcagcacccggagtagctggggctacaggcacgggccaccatgcccggctactgtttgtatgtatgtatgtatgtatgtatttagtagagacagtgttttgccatgttgcccaggctggtctcaaactcctgggctcaagctatccacctgccttggcctcccaaagtgttgacattacaggtgtgaactaccgtgcccagctcaagtactattctatactactttttctttctttttttttctcttgttcttgtctttattttgttcaatgccaattttattgccttcagttttattctgaagttatctaattgccaccgtctacacagtaacacacagaagtcttcattttcattgttatggtagttagcatttatatagaattagtgtagaaaagtagaaagtttgggctatttcatgcacggctgtataaaattattgttttcacttgtatcagaagaaataaagatgtgctttttgtggtttgaagtattggaaccttgaagtcctttgaaccaagttaaaaaaaaaaacaaagcaagacatggcttggttagatttttctctattgcacgtataccgttttcccacttggtggcactttctgttcatttcttagtaacatgtctttctctctcagcatagttacaccagtctctcctcgtacattgatttttcttattaaaattaatttactgaagtaatacataaatacatcatttaaaaaataatagtgtatggtaaagggtttctttttttttttaacagaaaataattttgtccctgaaaatttttctgtgcccagggaaaaattaataaatggttttgcccttgaaaggccaatttgtttaagatgcttaacatcgtggtggtcagctgtttttcatttggcgtgatgtgttctagaagcctttgtagagaaacagggtggcaggtgagggccattacatggaggcgatagagaagaatcaaggatgattcataggtttggggcctgagtggttggtaccataatgctgggaccattcactgagat

SEQ ID NO: 70842 - DNA, 1049 bp, Homo sapiens
aaatacaaaaattagccaggcgtagtggtgcatgcctataaccccagctactcaggaggctgaggcagaagaattgcttgaacccggggaggcggaggttgccgtgagccaagattgcatcactgccttccagcctaagtgacagagcgatactccatctttcaaaaaaaaagaaaaagatttttattaaacttcataatttttggtatgatttcatgtactttattttacttgattcttaaaatctccttagaagattttaagaatatggtagatcatattcccattttagaaattatatacatgcaacagaagtgaggtggttttggaaattgcatatacttatttctaaaattttattattttcacattagagtcagtctttctggtcgcccatgtttgcaactttagaggcagttactctccctaagcctcactcttctcattccataactgaattttaaccattccattgcttgaatttctcccttcctcttcatttccttcaccatattttaggccttttaaaattcctttcttgatttgttaccctaatatcttcgcttccagtctttcttttccatcttgtcctgtgtgctggtaccagcgttatatttgttaaaaatcaaattatgtcactctgcccagccttcagtagcttcccattgcccatatgttatgaaattaagtccggtctctataacttgaccttttagggccctccacattctgacccagctgctcatggtttctcacacatgccattagctttcttagcccttttctatagctcattcagtttttattttattcttccactgagacaatagcacttactggttcccagtgaactctaagtaaatagttactgaatgaatatgtaatctagggtcatactggtaattaggcgaagtgattaacaaaaagttggaagcagaatccagatctcctaactcaaatgatttttttctatttgtgtggagatgaggtttcactatgttgcccaggctggtctcaaactcctggccacaagcaatgatcttcccacc

SEQ ID NO: 70843 - DNA, 1017 bp, Homo sapiens
gaaatctagacttttgtttggcctacaaagccctctgagtcccagctgtcactcagatcccatattctactgtaatccctgtcttcccttctgtcttactcatcatatatctctattgctgtgccttgtgcctcacatgtgtcaaacacctccctcctgccctgggacctacttatatgctctgtttcctctacctggaatgttcttcccctaggtagtcctaagccttggtctgtttcttcactcaggcctttgcaaaaatgacacctccttagcgtgagcttccctcattgccctcattctgttactgtctcaccttgccttgtttttcttcatagcatttagtaccgcatgacaatattattatttgcttatttattatctgtctttccccactaaaataaaagcttcatgaaggcaaaagttttgttttattcactgctacatcccagtatgcagaacagctaatataaatcacccaatatatgtttgtctaaatggaacatgggagggaaggggaaggagggaatcaaaatagtgaggtcaaaatgttcttactattgtacctttgtttgcacatttgtttatttctgtaggatagaattttgtggcaatagaatcggtagtttaaaaggtacgtgtgtgttatattgaatatatatgtaatgtgcttttctaagaagataattgtgtcattaaagaaaaattattgagtttcattgattatttttcatgattttgttagattgttacagagcagcaaactgggcagaaaatccagattgtgacagcacttgatcataatacccaaggcaagcagttcattctgacaaatcacgacggctctactccaagcaaagtcattctggccaggcaagattccactccgggaaaagttttccttacaactccagatgcagcaggtgtcaaccagttattttttaccactcctgatctgtctgcacaacacctgcaggtaaataactatagaagtgtcttttcctcttacatatataa

SEQ ID NO: 70844 - DNA, 1030 bp, Homo sapiens
aggacccccatctcaaaaaaataaagtcagaggcagacttcagtgcaagtagcagtcacaaaagatactcactcagtttgagaaagtatattctggtgatgtgttatttttgtaagggccactttttgtctttgaagggatcttttgtgcatacaaaaatatttaaggattatgaaaaaactaagtcttttttcatcttctaccatccagagatggctatcacatatccttttagtttttttccatctacctgtgctatatgttgtataatttgtttttcagaaaaaagcctttcatttgtggaaggttattacattagtgttgaaacaagttaaatcagtaaggatcctgatagagaaaatataagatacaggaattttaaaattcctctgataagtcttttccacttatgtagttagaaaaaaatagtcctttgattaaatgtggatcaggtggtttctttgatcttgttcaaaatatttatgttatataaaaggctactttaacaacatattatattactttttctcgttgtctttgcctttaggatgatattaactgcctctaggttttagaaatctaggatttctcatgttggtagaaaatgagatatttaaaacatctgttatagtgttctgaagctataaatttgagctatgtacaggctaacaagcgcatataaaaaagatcacaattaaattaatagatgactttttttcttttgagatggagtctaactctgttgcccaggctggagtgcagtggcacgatcttggctcactacaacctccacctcctgggttcaagtgattcttctgcctcaaccgcccgagtagctgggactacaggcacgtgccaccatgcccagctaatttttgtatttttagtagagacggggtttcaccatattggccaggctggtctggaactcctgacctcgtgatccacttgcctcggcctccctaactgctgggattacaggcgtgagccaccacgcccagccgctaatagatgactcttttttaaaaac

SEQ ID NO: 70845 - DNA, 1052 bp, Homo sapiens
ctggttagtaaacagacttttgacaagcttgggtgtagcccatatggtcttattctttagaatatagatgtttcataaatccattgcttaccatttactttttttttttttgagacagagtcatgctgtgttgcccaggctggagtacagtggcaccatcactgctcactgtagccttgacctcctggggttaagtgatcctcccatctcagcctcccaggtagctggtaccacaggcatgtgccaccacacccatctaatttttgtattttttgtagagatggggtttcaccttgttgcccaggctagtctcgaactcctggtctcaagacatcctcctgccttagcctcccaaagtgctggaattataggcgtcagccaccatgcctagcctacatttacaaatttataacaacatgtttacaatttatcagaaagtagttgtaggcagtccccaattcctaaaaggattgtgttctaaaagttcatggtaatttggaactcagagtgtatttcccaaagaaacagctttgaaatggtggtgaagtcctcagtttagtccgcaggttatattaaccattactgccctgtcttcccctccactcctctccctaccccagcccaagggaggtgaattatctctgactgtgtatgtgtgtgtgtgtgtgcgcgtgcatgcacgtgtgtccctgtgatgcaagctggggctgaggcggtagccagggtggggttaagcacctgggatctcagaggagcaaatctacaaggcctggggccccagggtttgtgggaaggatgagatgactaaggaagaatgaggaaactgggggctgggtgagctgtgtggaagactgaaagtcgtcaggagtgataagggggaagggtagggtagtggctgggaattagtaggcagtgagtttctctacctccttttcttcttattccaatcccttctctctttccctccccgttctcctttgctaactgcatcattcggctaattgagtttctgatgcctggcagagtgagtagaagaaaccagaggaggagac

SEQ ID NO: 70846 - DNA, 1047 bp, Homo sapiens
cccaaaaccaaaagtcctgaagacctcacctgttcgagagattgggcagtcgccatcaaggaaaatcatgttgaacctggaagggcataaacaggaattagctgaaagcactgacaactttaattgtaaatatgaaggcaatcagagcaatgattatatttcaccaatgtgttcctgcagttctgagtgtatccataagctgggccatagagagaatttgtgtgtaaagcagcttgttttagagcccctggaaatgaatgaaaatttagaaaacagtaaaattgatgagactttgactataaaaactaggagtaaatgtgatttgtatggtgaaaaagccaagaaccagggtggggttgttttaaaggcaagcgttttagaagaggagctcaaagatgccttaatacaccaaatgccaccttttatttctgcacagaagcacaggcccacagacagcccagaaatgaatggtggctgtaattcaaatggacaattcagaattgaatttgcggatttgtcaccttccccatccagctttgaaaaagttcctgatcatcacagttgccacttacagcttcctagtgatgaatgtgaacattttgaaacttgccaggatgacagtgaaaaaagcaataattgctttcagtcatctgaactagaggctctggaaaatgggaaaaggagtactttaatatcttcagatggagttagtaagaaatcagaagtcaaagaccttggtcccttagaaattcatttagtaccatataccccaaaatttccaactcccaagcccagaaagacacgaactgctcgtctgttacgccaaaagtgtgtagatactcctagtgaaagcactgaagaaccggggaattcagacagtagctcttcctgtcttactgaaaatagtttgaaaatcaataaaatcagtgttctgcatcagaatgttttgtgtaagcaggaacaggtggataaaatgaagctaggaaataaaagtgaattgaatatggaatccaacagtgatgcacaggacttagtcaattcacagaa

SEQ ID NO: 70847 - DNA, 1050 bp, Homo sapiens
ctccgccatgccacccgcctcagcacgatgggaaatgaaggcgggagtacaggcggcacggagctccagctcctgcccgtcccgtgggtccagaaaactacaattcccaatatgcctcgccgctcacgcccccttttcgagcccgcttattggagaagagagtgagcgtgtaagcgagagaggcgggagcgagctgaagctcgagccctccgattggaggaggctagggcttttgtctgccttttacggccgcgactagcagggggcgcccggagcactgctgatttttggagcccgagaagggcacgcgccagcggagccgaagagagcactgctcgtgcccgcgcctggctgtcagcctgccgctctgcggggcggtgctagtgctcgcccgcccgaccccggcggctcgcgcccgggagcgccgcagggtcgctagagtcggccgcgtcctttgtgtggcgctcaggctgcgccgcggggcggcgggacggaatgtgggcgctgcgggggcttttctctcctacccgaactgtgggaacaatggactgaaaggggaagatggattgaggggccgagcggggaagcgagctgcaccggggaatcatgacttctgcagccggtaagtgacggcgctcgcgctgccgcgggaaagtttgtggcgagcgctgctaggcttgggctcgcgagcaactttcttcgccggggtgggcgagttgtgtgccccgtacctttgccgagcacctcggcaagcgcggagctaatgggattcgctgccggctttctcgtcttttcctgcccagaggggctgtttggaaacccgggatttctcgggatctcccttccaagggggactgtgctgggggctctgcaccaggtgaaatgcgatgtgtgaagggcgttcgctcatctctccagcagtgcgaggacttcgcctttgcatgtgaaaatagtgtagattcccaagttaatagatcagttattataggtaaaggcagtgttctcagcgtgttcaatttggccactaagtgagtcgctttcaaccttgta

SEQ ID NO: 70848 - DNA, 1087 bp, Homo sapiens
gggtaggagagaaaagcccccgcagcgcccacattccgtcccgccgccccgcggcgcagcctgagcgccacacaaaggacgcggccgactctagcgaccctgcggcgctcccgggcgcgagccgccggggtcgggcgggcgagcactagcaccgccccgcagagcggcaggctgacagccaggcgcgggcacgagcagtgctctcttcggctccgctggcgcgtgcccttctcgggctccaaaaatcagcagtgctccgggcgccccctgctagtcgcggccgtaaaaggcagacaaaagccctagcctcctccaatcggagggctcgagcttcagctcgctcccgcctctctcgcttacacgctcactctcttctccaataagcgggctcgaaaagggggcgtgagcggcgaggcatattgggaattgtagttttctggacccacgggacgggcaggagctggagctccgtgccgcctgtactcccgccttcatttcccatcgtgctgaggcgggtggcatggcggagaaggatgacaccggagtttgacgaagaggtggtttttgaggtaagaggaaaatggcggtgggtgtggattgcctttgtttgagaaggacgagacggaaatcgaggaagcaaggcgttcccggggcgagggatcgggtgacgcgctccagctggcctcgaccaccgaaccccagcgatttcagggcctagagtccgtcgtcgcctgacaggtgtagccagaggcgccctggccgtggccggcctctatctcgggcccgcccagaattcccagacggtgcccggttgccaggctctgggctggagcggtgtctcttccttcctgggaatggatgtgcggcgggggggactgcgcccggctggggcggggccgaatcgtgccttttagatagtcacaacttagcctcctccttttccatccgcgatttttttgggtcagtatccagagtgcttcaggtcactgttcaccgtcaaggcgtggccctcggaatgaaggcagcaggtgcccgttttctaacacggtttaaagtctatttgtgggacctactgtgggtagttagg

SEQ ID NO: 70849 - DNA, 1033 bp, Homo sapiens
gtgccattgcactccagcctgggtgacagagaaagaccctgtctcaaataaaagctaaccagcaatgatgtagtaatgacactggcacttgtacagaatacatcatgaatcatgtagaaaacaagcactgccataagtgaatggttggactttatacatctgggagatctgatatcttttcttttttttctttttctttttttttttgagacggagtctcgctctgttgcccaggctggagtgcagtggcgggatctcagctcactgcgacctccacctcctgggttcaagggattctcctgcttcagtctcccgagtagctgagattacagacatgtgccaccatgcctggctaatttctgtgtttttagtagagacggggtttcaccatgttggccaaactggtctcgaactcctgacctcaagtgatccacccgccttggcctcccaaagtgctgggattacaggcgtgagccaccgcacccacccagatctgatatctttatgtggggcctgcagggagcagggctggcaagaagtgtcagtagtgtaggacttggatgagacattttcttaaagagctttcttcagcaaaaatgtgggattttcctgtctatttttgtttatttttattgcaaaaatgtttcggccaccagaacaatcttagcacaaccaaaggttcttggctgtttttcatttagcaaaattctttctggtgttatgatatgtgttttctgtcagctaaaacttacaggaatagtgaaccacaaagatttcctgaggagctcccacatgctgtgtctgaggtttctcatatttcttttggcatcagtaacattctccaatacttcgaaattatagtttgaatccagtgttaatgatttctcttcaaaaaaacaacttaaataaaacatttgcggttttattttgcttgaaccaaggaaaagtcataatagagacaactacctactctgccttaccctctgcacaaaaacacccctttctaaagctaccatctaatactttatgaaaa

SEQ ID NO: 70850 - DNA, 1025 bp, Homo sapiens
tgctgagcatatggtagataatacgtatttgtgcttgaatgaattaaggaatatgatgagatgataaaaatattataattcatacaatataatcattgtttaattattcttggctttgagtaataacattgtcgtttgagttatctataacattggctattttgaagcaatctaagactataaaatttgggacagtgaaattgcttaacaatctatttatattcctaaattcattttttcttgctggtactcactcaaaaaaaaaatctgtgtgttttatttagagtttttccttttttgggttcctctgttgaattgtttgttgatttgtttgtgttaaatggcattgtattataacagataattcagttcttatagaagaagccttaaagaatttggacatactggtcacaatagtgaagtctggtattaagtttggcccccgaaacttttgaagtagtaatgatcttgaaatttgctttattttgtgtctttttcagaattctccactttaccaatacttacaggatctgggacacacagactttgaaatatgttcttctttgtcaccaaaaacagaaaaatgcacaacagagggacaacaaaagcctcctacaagagtcctaccaaaagtaagaacgcatgctcattctttctggccgaatcttttgcactttaccttactggctattcagatacttcttaagcacttccatatcctccctcacactggtaagactatttatttcatcaatagtacaaaactttctgttagataaacatgaatccttactgctttggaatactttgtaggtaatttatatccagtgaggaaataatttggtagagaattaaaatacattacttatttaaatattgatgctatccaaacagaatcgaaaaaaatatactaaaactttaatgagagcacaactaataggaatcctctactaactggatttttctctttaaatcttttttttaaaaaacagcatgaatgacaagaacgcaaattgatatttctt

SEQ ID NO: 70851 - DNA, 1049 bp, Homo sapiens
ccaaagactcgaaacagtcaacctgaaaggtctttgtgatttttgtgaggctttgtttttttctactctctgctgtaacagaactccaggggggaaatacttcaaccttctgacgtcctaacaatacaaaatccagggagtatagcctaaaaattcaagttatgtggttctcatggctcccagaaggagtaatgtagttacaagtaagcaggtttcaggatctctgctggcctgtaaccttaagaattatcattcctgtaaattaacatttgtaaggagattgtttacaaagtgctttcacattttgatttggtaatctaaacaacactataagatttagtctgcttcagtaacgagaaaaccaaggttcagacaatcagtttgttttaataacttactgagtgaattgtctaaaaatgttcagctagaaagtgatagagccagaatttgaacccaggtctcttggttccaaagccatgctctttctgctatagcatacgacctctctagctcaagtattattattttttggctgactaaaattacttttttagcaatccaaattgtcaagttctttgttcagggtttcatctttgttgaaggtgtattgagaaggtcaatgaagtgtcttatcgtctacatataatgccatttttatccaggtggagccatctcattcttcagtgatactaggactgtggtaaggtatatggatccatatacatttttctgtgatttagtcatagtctgcctaggcctggtcttttcattcttgattctgtgtcactggccacatgtttcatgtgatgtttcactatacagtgccagcttctgtatgcatcccttttgtgcctatattatggagaactataagaatacatacctaaggattagtttactagtaatggaacaagaaattgccaaggtggcttttggcgtgagattgcttgactttttccccttgattgtgacgtatttaaaatgttgttagctatacagatattgaagcaggccctcatttcttttgtaagaatattggcaattgctct

SEQ ID NO: 70852 - DNA, 1025 bp, Homo sapiens
ttttatctgtgccttctcataacctttcatttcatccatgcagaaaggaattcctaagtactttctcatgccacttccctatttagatcctggaaagatctttatcaatcaaatcaagtccaaatttgtcacgtcagcactaaagagtctgcataatttggccctaacctacctttccagctttgtccaccagtatttgtatcaatgaacccagtcttcattttcctttattccgtacttattctgtatgtctatgtttgtgctcttatactgtgatggaatactttctgttttttttttcttgatccattagaatcttttcaataagcactcctagctttttctcaaagctttcccgaaacttcagcctattgtgtctcttattttctgcatcaacctagtaataattactttgtgttctataagtttttgtattgtaatatatccaacgtgtgcttttctttattgtttcagttattgcatagatagtgacaacagtaatagctaacatacagtgcttactatgagccactcttcttggtattttatagatactgacttatttaatcctcataacaaccctgtgaagtagctactgttattatcccacttttgccaaagaggaaactggcacagagagcttattaacatgcttaagttgtggagcaaggatataaagctagacactaagtcctggcactcagacttgttgaaaatgtgccaaagtttacatagtacacatcccaggagcatagagcctccagccatgcaggtgatacctgctaatatttaaatcgatcagaattagcaccttttcagtttcttcatttgtttgagacctggatctgggcttcccagtccaaatagtactgtcatgacatgtttcttaatttgcaggtgtcagtttttctggtagtttgattgttaccttgtaacacagttaacatgttttctgcagttcttatttttataatcaaagagtaatatctaattttacattttatccttaagaaagaaacttaatt

SEQ ID NO: 70853 - DNA, 1109 bp, Homo sapiens
tggagagaaaaaaatatatatatatatgtatatatatccactagtcctactatcttcttttctcctatgtgaaaattttttttaaataatgagtgaagattcacttttactaaattatctcattccatcaacacttcccatctagggcagaactgtagtaaattatatattgatgttacctgctgtattggaatcagaggttcccacacacataatttgaaatcatattcttggctaatcttaaggtagtttaagttcggctatatttattatttaggataaagtgcaaaatttaaaccagaagttaagataaacaaatttatagtttgttttgaacactgaccaatatttttattgatctagttcttttttcttttttctttaaggttttgttccaactctgggtggcacagagttcagagttcttcagacggttagccctattactttctacagccaattcacctcctgggcccttacttactccagcacttctgcctcatcgtatcttatctgatgtgactcaaggtctacctcatgctcattctgcctgtttggaagagcttaagcgcagctatgagttctatcggtactttgaaactcagcaccagtcagtaccgcagtgtttatccaaaactcaacagaagtcaagagaactgaataatgttcacacagcagtgcgtagcttgcagctccatctgaaagcattactgaatgagtaagtttagaaattataccaagaaaggtctcggtaattagcaagcttcattcgtgtaccattgtggttgttggcttgtgtcctacctagaaaaaagaaacaaaactgaggcatgagcatgaagggtgatttatagctataaatatagcaaaaaaaaaaaataatttataagtactataacttgagggagttattatttatagtttttacttttccttagttcaacagaaaacttggaaaagtaggctaaaagcaggtgttgttcattctctttgagagctgaaatggagatggttataaagaatgagtttcttttaactgtcttaaggtagtgctcttaaactggaacctgcagtccaatagaaatatctaccagtactggaacagtata

SEQ ID NO: 70854 - DNA, 1044 bp, Homo sapiens
ctatcgcttatccactattgttaaccattactgtgaaaactttctccacctcattgggtaggtaattaagataagccattttctaattattttctgtatgtgtggcttttgcttatagataataatgatatggattaagacacaaatagttcacaaacttttttcactaaaaaattcacagtggccatgactacacaggtttaaatttaaaaaatgttcatttgaatattttaagaagcaggtactttagttagccatatctttttttaaaaaggtcttattttgaaatcatttcaaacttacagaaaagttgcaatagttgaaagtctccttcatcaatattccctagttgttgacattctgtcacaattgccttatctatgtatgtatctgtatgtgtgtgtaattcttttgatggtggtgttactctgagccatttgagagtaagttgtagacttgaagccccattacccctaaatatttctgtatgcatttttgtaaaacaggaacattctcctgtgtacccacagtataccatcaaaatcagaaaatgaacaccaaccatgatattgtcattttatccacagaacccattcaaatttccctgattgtcccaatattttttatatgtctagacctagattgtgcatggtgttcagttgtcatgctctttattctccttttccttaaagtctttcatgataaatattttgtaaagaaatactctgaggttttataaatatgctttcttcatcaaaattttaaccactatgaatgcatataccatatgacccagtagtatcattcctacgtatttaaccaagaaatataaaaacttagtgttcacacaaaagcctatacataaatattttgtttataaactaaaactagaagcagctaggctttgggaggtgactaagctgttacatccatccatacagtgaaatactactcggcaacaaaaaaagtgaactaccaatgcatacaacacgatgaatgaatctcaatacattatgccaagtgaaagacatcacattcaaacca

SEQ ID NO: 70855 - DNA, 2336 bp, Homo sapiens
tgttaaactttttttatccacaatgctttttagtatcaactgttaggttgtttttgaagatttcaatttatccataggtatatatttgcttttttcttttcctagctctgctttaatgacctgtgccaaatgcaagtcctttttttttaatctcagagataagtaagtgcaagtaaatgaatgcttactagagaattgtttgcttcaagtaaagtgctttttcttctattcattttcaggaattagaagcttatgtagatgatatagatattgatagtgatttcagaaaggatgatttttattacttgtctcaagaagacaaagagagacagaagcgtgagcatgaagaatccaagagggtgctccaagaattaaaatctgtgctgggatttaaagcttcagaggcagaaaggcagaagtggaagcaacttctatttagtgatcatggtaagcactgactttaaagtaacaggttatttcaatgtaggggattctttctttcttgaaccatgaatgttattttagctgaagaattcttggggttttataagggtccaccagtatgcatagtactttttcttctagatgctaaatcaatttgattaataaaagagtaggaatgtaaccacattggaaatatgaagtcatacttttttatgagttatttaattttttagtaaatttgttttagaatgggcagtgagttgaataatttgggatattttaaatgttattttcaaatttagtgaatttgagattctcaactctgttgtccatatgttaaaatatttaaaaatacctcagtgaagcacaaaattaataactgtgctcacattgaaaaaaatggcccaggcgcagcggcacatgcttgtaatatcagcacgttgggaagctgaggcgggtggatcatttgaggtcaggagttcaagaccagcctggccaacatggcgaaaccccatctctactaaaaatacaaaaattaacaaggcatggtggcgcgtgcctgtagtcccagctactcgagaggctgaggcaggagaatcacttgaacccgggaggcggaggtttcagtgagccaagatcacgccactgcactccagcctgggcaacagagggagactccatctcaaaaagaaaaaaagaaagaaaagaaaagaaaagaaaaaaaaggaattaaaacctagaccagtgagccacatcattagcattatttaagtggtttgagcactttagtagatgggaggggagcagggtgcctgtgggcgtactccccatactctgatttcagcagagtggggtagctggtaatacaaaagccttacattcctttctgtttctcacccttcttttcttaagtcaaacttcatgggagacagggaaggaatcaggggaagcttaatacttgacagtatcaacctagctaattcttagttgaattaatgcctatggatttctaagtaggtagagtgtggattctcttccattttacagtatctgtgtggaccctcgaaatcaactgccctgcttttccctcctcactagaagtacatagattacctatacttctggaaagttcctccagttctctttttttttttcccctcaggagccctatgttttctcctgtccagatctgcatttcttggttttatcattcctctttcttcccattggccccctttatagcccaggtcctcagtagattatccttgtacattaaaataccttcttagctgacttccattttcagtacttttttcttctaagctatcttgcaaactctttgcagatttttctccaacactgcattgatgatggctctctatcttaaaacctatagtggtttctccctttcttattgtgttgaatctaaactctttttcctgttttcaagtctcttcatcataagaattcatctatccaattatattttctactgtttttactatagatatcttcttatgtttatcgaattaaactacagttcacaaatgtgttatttttattcatgaaaaaaattcatgctggccaagcacagtggctcacgcctctaattccaacactttgggaggccaaggcaggtggatcacttgaggtcaggagttcaagaccagcctggccaacatggcgaaaccccctctctactaaaaatacaaaaattagccaggtgtgatggcgcacacctataatcccagctgctctggaggctgaggcaggagaatcgcttgaacctgggaggtggaggttgcagtgagccgacatcgcaccactgcactccagcctgggtgacagagtgagactctctctcaaaaaataataataataataataataat

SEQ ID NO: 70856 - DNA, 1050 bp, Homo sapiens
tctgatgtattatcagtgaaaaccatgctgcttattccctaatacaatggttctcaaactttagtgtgtatcagaatcaagatgagggcttgtaaaatatagctggtccctactcccagagtttccatttcaggaggtctgggatcaggcccaagaatttgcatttttaacaaattcctaggtgataactgataatgttggttcagggaacacactttcagaaccactgctttaatattttaaataagataatatgtgaggtgtcataaaaaccttcatcaaatccctatctcatttcatttcttaggcattttctctcttataaagtttcctggatttataaattttcattgattttactagaaagttttatttagcttttatttatttattgttctttttaagaaaaaaactgagagtttgaattaaaagtttaaatcattgctaggtccttagttattttttttcttttttctttttttttatttgaagccgtgttgaaatccttgtctcctgtagacccagtggaacccataagtaattcagaaccatcaatgaattcagatatgggaaaagtcagtaaaaatgatactgaagaggaaagtaataaatccgccacaacagacaatgaaataagtaggactgagtatttatgtgaaaactctctagaaggtaaaaataaagataattcttcaaatgaagtcttcccccaaggagcagaagaaagaatgtgttaccaatgtgagagtgaagatgaaccacaagcagatggaagtggtctgaccactgcccctccaactcccagggactcattacagccctccattaagcagaggctggcacggctacagctgtcaccagattttaccttcactgctggccttgctgcagaagtggctgctagatctctctcctttaccaccatgcaggaacagacttttggtggtgaggaggaagaacaaataatagaagaaaataaaaatgagatagaagaaaagtaagaaccaagattcatatgaagtgatattagattgttccttttacaaaagt

SEQ ID NO: 70857 - DNA, 1053 bp, Homo sapiens
tttacagatcatttcactctggtgactaactcttcacttcctatcagtaatgtaaaatatgaaaaagttcaactgatttggtttaatcatagtatattgttcctatacccaaaacaaacaaagaaacagactaaatactataagagtgtattatagctcagctaaatcattgtttgaactaaagtagatattatgctaagaatgacaaccagacaaggcataaaggttggtttatttttccaattctacttacaagaaaatagttatgcagttcacaattagaaaataaagctacaaatattttagaagagaaaatatagaaaaaaaatgcagtaaccatttatctgtcatcatagacaggtgattaatttgcctaagttaacttctcagctaactaaaacaaatccattttaataatttaataactaaatgcactacttctctactttgtctagagtatatagaatataatttaactttttctgtcatctttaggaatatcagtttctatcatggggtgataaacagaaactcatcctcaggggctactgagatatatgtcaggtacccctttacaacatgacctcacactggtgtgcttttttcagttatgtctgtttttcacagtttctctatcttcccttataatcagctgtcacttttgccgccgtcttgtgtgcctgcctcctgcaataggtccctaatttgctgcttctaatctgctgtggactgagaaaccagattgccaagcttgctagaattgtgtctaaaataagagtaagtagactgaaagagagctaaggggcttttctgtcagtaaagtgcatggactttgtgatacctgcttgactgcttagcattgttttgtttgcctcttagttctttactaaaaacttgctaaaacaaatacttggttgaatatgtgattgccatatatttgaagttctaattcagtttttatataatgatgtttctaggacttccattaatgaattcaactataagagaaatttgactatcatttttgaataaataattgtgtatatttcagaa

SEQ ID NO: 70858 - DNA, 2962 bp, Homo sapiens
agtcatgacaatagaaatgtgtacaagtgaacacatttcttagcccgtttccccactgcctgtgtgatttataaaaacgcaaatataaaatatttccgttccagcagagacgccgcttgctacggcgggttgcccgtctccacaggtatctccggctgactctagagctcaacttcccctttaaacttcaccctgcgcttgccgatttgcttcgggaatgcccgaggcaccggacgaagcagtcgggtctggccccagtcgactccagccaggcggggctccaagccgagactcctgcacgcccggcccgaagctagcccgacaccctcagctgagtcctccgccgtcccagcattccctgcgtccctaccatcgagagcagcttccggcgtggctggtgtaggcgggtggagaaggatcggggccctcgccgctctgtctcattccctcgcgctctctcgggcaacatggcgggtgtggaggaggtagcggcctccgggagccacctgaatggcgacctggatccagacgacagggaagaaggagctgcctctacggctgaggaagcagccaagaaaaaaagacgaaagaagaagaagagcaaagggccttctgcaggtaaagagagttttatgttttcccagtcccctccgggaacggctgaactgtttggctcaggcccgttgagggggccgggaccggggccccagagccccgactagactgattcttgggcctgacagggtggcaaagccgggctatagattcctagtctgagaagaggcgtcatctcctcctgtgggactagagggctggtgggggagaaaagagtgcctgaggttggcgtgtggtacctctggggtcgctgggcccgagcccctgtattaccagaactcagctcccacgcacatcgtggcacggtcttgagattgtgcgcagagcacagccctaccatctttcgcgcgatttggccgccgcctcaaaaatccgattctgatccgtattgccgcgtctttgctggtttgctggagcaagctaggacttattttctttgggggtgggcaaatgtaatggagagcacacctcctcccactatcccgtttcacgttggggttgttgcagcctgcacttttggggtgtgtgtacatgtgtgtttgcccgcgcgctcatgtcattaattgcagaatttgtggtggtgataacgaattttcacctgcctaatcccatagcatcgccaagctttagggcctttagacctgaattatgataccaattgcaggcagtgcagataggatattctgtggctcagaatggaacttctgaggtcttaacctctaaatccactggtaaggcaaggagaactgctgagagtttacagttggatattatgaactaggaacttacatattttgagaagtctgtgtttttgctgcacaagctccttcaccttaataaaaattatttttacttgtttctaattaaaatcgccagagaaacagaaaatggagaagtcagaagcgattaagatggaattgagagaggtcgaagagagctaatcttcatctttctgaaattttgattagataggaatggaaggagagttgtagcgttgctggaactcttccagagcaaaatttgttactctggtggctgttcctggatttcgagtgaaattcaaacactgctgtttgtcttgtaaggtgttaagctgactgatcctaatgtatttttaacagttgtatttcttaatatgaattctctccagtagccagaatgtcacttcatttcgtgctacctgatactattaatgcatgtaacatattgctcttataggtaggttataatcacttccagagcaggggcctggtcttgtgcttagatatttgagcgttttagttttttagtaatggactgtctttgcctatttattttgactttacccagcccatcgtgatatccttattcatgaaaccaggctgccccggggtgttgcacatgaatctttttcctaaggccttcagcatttattacctatctggtgtttaagtatttgttaagtctaattgctgaccactattacaagttaaactacttgaggatagagaccagttcacgctgtttatcttttagctgctagtgtgtgtaatggatattttgttgagtaaattaatgaatggacaatactgtgtaggtatggaagatttttctgtcattaaacgaattctgttatgttcacaataatgtttctgtttttgtttcctgaggaaaggatttgtaagttttccaagatcattagagcatattctagtgggaaagtgtctgtattagatttgatttctgctattttattttgatcagcaggggaacaggaacctgataaagaatcaggagcctcagtggatgaagtagcaagacagttggaaagatcagcattggaagataaagaaagagatgaagatgatgaaggtaaatggttaatttgatctttgtggttagaaaagctagaaaatgtagccgggtgtggtggcacacacctgtaatcccagcactttgggaggtcgaggcgggtggattacataaggtcagtagttcgagaccagcctggccaacatgttgaaaccccatctcttctaaaaagacaaaaaaaaatttagccgggtgtggtagcacacacctgtaatcccaacaacttgggaagctgaggcaggagaattgcttgagcccgagagatggaggttgcagtgagctgagattgcaccactgcactccagcctggccagcagagtaagactgtctcaaaaaaaagaaagaaagaaagaaagaaagaaaagctagaaaatgtgatattccttaatcaaaatttatttactcgtatagtgttttctctgacatttcacttgttacctcaattaatgtcacagattaaaaaggaaaaggtatttattagcaagtcttgaaaaag

SEQ ID NO: 70859 - DNA, 1054 bp, Homo sapiens
ctctgcttatgaggtttaaatgaacatgtacttgaaatgtcttttcttagatggagatggcgatggagatggagcaactggaaagaagaagaaaaagaagaagaagaagagaggacgttagtgtcttaagttaatgttaattgatatattagaagtgtttattctgtcgggtgtggtggctcacacctgtgatcccagctactccggaggctgaggcaggagaattgctggaacccaagagacggagattgcagtaagctgagattgtgccactgcactgcagcctgggcaacagagtgagactctgtctcaaaaaaaaaaaaaaaaaaaaaaagaagtggttattcactgacaggtttgaagagtaggtttgaagttgcttaaggtcctgatatatgttagggaaataaacttaggcttaatagaagcagaatttagtgaaactaataattatttattagtttaataactttggtttaacaatcctttattttctttagctgttagctaagggatgtcgatatgaattggttgcattttactgcaagttagggatgagtttctaaaaattttatgatttaaaacttgcataatttaaagaataattctgtcaagaatggccgaagtggtgccatggtggtggtagggtaagcgttgtttgtaatttaccttccagcttttaaattatgagattcttgatgagtatttaatgaggaatcccgttatttaagatgtgtgcatatggtgagactttattattaataataacttttatattgtacgatcagatttgtataaaatatcctgcttgttttgagtttctgtaagtgccacaaccaaacatcatcaggtgcccgaaaatatattaaggaggctgaagggagatttcgtagtgttgaggaagaaaggttgggttgagaatcacaacatgtaagttttaatcttggatgccatttgggctgttgtagaccactgaatgtctggttatgccttcctttaaaatttttcaggctaaaattttatgaatcagaattttgggggcttggtagtgatt

SEQ ID NO: 70860 - DNA, 1063 bp, Homo sapiens
tagtacatatgatgtgatcacatttatttttaaatataatctcttaatttttttttttttttgcttgttccctcttcttttccttccttccagacccatgttaaccacctagcaggtagccttccatattttttctatgctcatatatgtatacatctgtctgtttatgtaagggaatgtttgatcattgtttgttttacaaaaatggaatcataggcacactttcctccaccttttctcattcagtgctaactcttggaagttcctccaagtcaattagaatagttctattattatcttgaatggcttcataatattccgtggtgtgagtgtaccacactttattccaccattctttagctgatggccatttgctttgtctgcaataatttttgccactataaaccattctgcaataaacctccttaggtaaataggtagctggatatgtaggtatttttctctctttctcatgtactggtagttatattctgaaatacgtttttaggagtgagattgattaaccaaagaatatattaataatttccagttcttatactattagtgatttcgagcatcttttgatcgtaggctttatgatatcttttgctcttcccagaagttttaaatttttaaatgcattatgtgtccatgtttaatacttctgagttccggccaggcatggtggctcatgcctgtaatcctagcactttgggaggctgaggcaggtggattacctaaggtcaggagttcaagaccagcctggccaacatggtaaaaccccgtctctactaaaaataaaaaaataaaaaaaattagccgggtgcagtggtgcgtgcctgtaatcccagctactcggggggctgaggcaggagaatcgcttgaacacaggagatggaggttgcagtgagctgagattgcaccactgcactacaccctgggtgacagagcgagactttgtctcaccaaaaaaaaaaaaaaaaaaaaaaaaaaaatacttctgagttcccagtagtctctcagattttcttgaacacgtattttgtgtgttattacatcttta

SEQ ID NO: 70861 - DNA, 2008 bp, Homo sapiens
tttccaagtcagtttcttgggttagtagttactctgttggcaaaattaaatgcaaattgttgttgtgctcctttgaagtgtctaaagtatatatgacctcaagtggaaggatgactttttcctacttactctgattctaggactcttcagacttttctgattgttttattatctttttgtgttgtcagggtattagttcctctgactatgaatgaaatctcacatgagggtttttttccctcccttagagtcttaaaaagtttttaatttcatttgagttggttgcaagtgtttggctttttgtatttcagaaactttattgacataaactgaatatgtactgtatttttatttgaactgtcttgttacttagtatagttgtcagcttttatgcttgttctgctgttttatcactaatagtattctatgcccactctaaaggcgaacagctgcttggagaactacaagtgaagaaaagaaagcattagatcaggcaagtgaagagatttggaatgattttcgagaagctgcagaagcacatcgacaagttagaaaatacgtaatgagctggatcaagcctgggatgacaatgatagaaatctggtaaaaggaatacttcttcgtaagaacatgataaaaaatgttttattaagtactaactctccaattataatgtttggctttcattaccactttgctaaatctttaagtaaaggttgtagaaatgccttctagattattttagtgtcactatgagaaaaccatgaagaggagtacacattggcacctcagccacccttttgtgtgcacatgtagtcattactgattgttattttctatctggaaatctgttattttgctatctaacaagtcatactaagaaataagaaagtattggagcaattgcccaaatacagaacatgatgataatacagtaacaaaaccaattcaagtaattattctctagtttttccttttgataaatggttagtataacatgtaattctctgattcctacaatttaaaaaatatacaacatgaacaaataagatcagcatttaaattggtctaagttagactcttattttctagtaaatttagttaaaagtggattgtgtttctctgactttctagcagaatcaaattccttgtcttctaaagatatgctattttcatagcatcagagaactgttatttatttatattcagaaagtgctcagatcattcccagaaggtatttaaggtttttagtaaactttctggacttgatgaactatatggtattaatatataaaagtaagaatgtaaaagtaaacaagttccctttgcttttttgttttagtgaaaagttggaagactgttcacgcaagttaataaaagagaatggattaaatgcaggcctggcatttcctactggatgttctctcaataattgtgctgcccattatactcccaatgccggtgacacaacagtattacagtatgatgacatctgtaaaatagactttggaacacatataagtggtaaattcttgcagaaaattcctaccccagcctcctcctgaaaaactagtttttgtctctgttaaatggagtgataaatactgaactcccaaattttgttcttgcttcctcatttcattaggaaaggtgtgttgaggcagatttttaaaaaaattttagtgcacttataggagagagaggcagttgtgacatttacttgaaagcatactactaagtagaataaaatgaaaactgttgggtagttgaggtttattaccctttgtatcaaggcatgaaagacattatcctacctttctttaggtcattgtttcatatctcttttattcaaataataacatttatttaaaatacttaagtttatcagccttaatatacatgtttgcttttctgaattctctccaaaacctggttaggtaagcaccttgttatcttacttacaagtgagaaagcaagcttagaataaatacttgcctaaggtttcact

SEQ ID NO: 70862 - DNA, 1180 bp, Homo sapiens
gctcaccatttaaatcctctgaaagtcacttcagccacaggggtgtgtaagcgctgaggtgtgcaactatgaggggagatgcaacaacagtggccacttctgtatctgcgcctatgtgaccagaagcagcaaccagggatcaaagcacagatccctgatgtttaggacatagactgttctgcccactcccatacccccaagctgtgtgcgtgttgctccaggaacacgagccaaccatgagtttatggaacggtatgtagcagtgctgctactgtgctgagagctaaaatggatggaaataaccacacttgaccatcccattattcccctggaagttgcaaggcttcagtagactccagagttcccaagtacttacattagacagattttgtcagtgcacttgttgtctatttagggaggcagattcctggtgcttaatacttcactatcctcccataatcctctgcaaagtattttaaacaggaagttacaatgtacaaagcagtttttctgattgtcccttgtttttaaatgttacaaaattaagttgctatgaaaattttgcactttgaataataaagcatatgttactctttttttagtgtgctggaattgatgttcgtctgtgtgatgttggtgaggccatccaagaagttatggagtcctatgaagttgaaatagatgggaagacatatcaaggtatgttcttttaaaatatatcttattttgaaattgattttacaaactattgtcgagtgttttctttgggtcagctgcttcatgtttctatcttggtaattcaaggaaagaagacgggaaatgacctgcttagagcatggtaggagtagtgttgtaactaactggaaactattgccaagccactctgttagctgataagaaaacacctgaggaaatatcctagggcagccaaaatgtgcagccagttttctgtgactagtcaaatcaaggctgagagaagccaggtctcttgccattgatgacttctcattgtgattttttttgttgttgttttttgttttgtttgttttttaaagacagggtctcgttccgtcatccaggctggagcgcagtggtgcaaccagagctcactgtagtttcaacctcccaggcttaggcttaagcgatcctcccaccttagccctcccgggtagttgggact

SEQ ID NO: 70863 - DNA, 1021 bp, Homo sapiens
atctgcctgccttggtgtctcaaagtgctgggattaacaggcctgagctaccgagcctggcctacaattaccatctcttgaagtctctacctgattaagcagcaacatgaaatagcccctggcggtccttatctagccttgccctgctttatctccttagcactttttggtctttctgcttccccctatgaattatgttcacagctctacccctagagcctactataaagagactggcacctgagaatgctcaataaatattcattaaatgttgaataaacaaccctttcacagccccaatttccacaactgatttagtgctgactatacacaatttgcaaattcaaatggcccaattcctggcagggtgaatatggatgataagcagctaattctggtcagtataaccatatatttaactaccatgaccttctgcttggaagaaaaaaatgtcttccatggaagtaaaatgttagtgacacacatacctccattcttgttgcctcccctcctttcacaatcggcactgtttttccagcatgtattctatattgcccaattgaatgtccatttagattacggattggtttcactgttataaaaaatagggaaataaaagtcattcaggatctcaagaagcaaaaacagatctcttacattttggtacagagttcaagcatttattcaaaaaccaggtatggctttactaaataaccttacattaaggtagtttaatataaactggaatctagtggaatataaaaagtagttgcagtgttattaatactagaagtaggccaggtgcagtggctcatgcctgtaatcccagcactctgggaggccgaggcaagcggatcacctgaggtcaggagttcgagaccagcctgaccaacatggcgaaaccctgtctctactacaaatacaaaaattcgctgggtgtggtggtgggggcctgtaattccagctactcaggaggctgaggcaggagaatcacttgaacccgggaagcggaggttgccgt

SEQ ID NO: 70864 - DNA, 2338 bp, Homo sapiens
aaagtgctaaggagataaagcagggcaaggctagataaggaccgccaggggctatttcatgttgctgcttaatcaggtagagacttcaagagatggtaattgtaggccaggctcggtagctcaggcctgttaatcccagcactttgagacaccaaggcaggcagatcacctgagtgaggtcaggagtttgagaccatcctggccaacatggtggaaccttgtatctactaaaaatacaaaaattagccaggcatggtggcacgtgcctgtagtcccacctactcgggaggctgaggcaggagaatcgcttgaacctggaaagtggaggttgcagtgagccaagatctcaccactgcactccagcctggcagcagagagagactctgtctcaaaaagagagagagagaaagagagatggtaattgtgattcgttctgaatttttcttctttctctccccttgacccttatttatttttcaggaaggagaagtatatgcaattgaaacctttggtagtacaggaaaaggtgttgttcatgatgatatggaatgttcacattacatgaaaaattttgatgttggacatgtgccaataaggtgagagacgagacgattgattttatgtggctaattagcatctcttctgagttaacagcatttctaaaaaatgtggcatacatacaaaatagtatattcatgaatgtagagttctgtagcccaacaataagaaaaaaaaatagcctgttaaacattttaactgagataaaaattacacacacacacacacacacacacacacacacacacacacacaagtgctctcttcaagtccggtttctgataatcataaatgtcagagattattttgctagcattcctaggtttttgctttaatatttttccattggtaaacttccatttacagcgtctttcaatttacattgaaattttttaacatttgaagatgattgaaatctgcatttacatcttttatatgcaggtctttgagcttgctgcacacaaaaggaaattcacatcataataccctgtagtaggtctctagtggggaatataacacacacacacgcacacgcgcgcgcacgtagacacgtaaacatgataagatggcctccagctggtgtcctattcagctgccatctataattaggtatgggctattatacattctggcttttgattgttgaaagagcaacaataaaagtttttggacttcaactactaggacacagctaaggtctgggcttttcttaatgagggaaatcagttcgtaactcttttgccaacagttaattttggattttctcctcttaggcttccaagaacaaaacacttgttaaatgtcatcaatgaaaactttggaacccttgccttctgccgcagatggctggatcgcttgggagaaagtaaatacttgatggctctgaagaatctgtgtgacttgggcattgtagatccatatccaccattatgtgacattaaaggatcatatacagcgcaatttgaacataccatcctgttgcgtccaacatgtaaagaagttgtcagcagaggagatgactattaaacttagtccaaagccacctcaacacctttattttctgagctttgttggaaaacatgataccagaattaatttgccacatgttgtctgttttaacagtggacccatgtaatacttttatccatgtttaaaaaagaaggaatttggacaaaggcaaaccgtctaatgtaattaaccaacgaaaaagctttccggacttttaaatgctaactgtttttccccttcctgtctaggaaaatgctataaagctcaaattagttaggaatgacttatacgttttgttttgaatacctaagagatactttttggatatttatattgccatattcttacttgaatgctttgaatgactacatccagttctgcacctataccctctggtgttgctttttaaccttcctggaatccattttctaaaaaataaagacattttcagatctgagagctacatctcaatgtctgtggttataattctggacaggataaatagctaaacttaatgtaggcaaatgcagagacatttatctgaaatgtagacctctacactgagacttttctggcatagtggctaaaacaagatctacacatgcataaaaagggacaatcaccttttcttcataaatatacagctttaggaatatttcaccattctttgtaggacatagtagtccttgtctttttttctcctgacattggaaagatgtgctaattgaaacttgacttagtaggaacattgtgccaactcaaaaccttgatt

SEQ ID NO: 70865 - DNA, 1012 bp, Homo sapiens
tttccaagcctccccccataggtgtttgttagttttaagggattaaaaagtaaagggctaagtcactttgttttttttttttttttttttttttttttttttagcgggagtctcgctctgtcacccaggctggagtgcagtggcgcgatctcagctcactgcagccgggttcaagctattctcctgcctcagcctcctgagtagctggactatagatgcatgctaccacgcctggctaattttttttttttttgtatttttagtagagatggggtttcactgtgttagccaggatggtcttgatctcctgaccttgtgatctgcccgcctcggccttccaaagtgctgggattacaggcatgagccatggcgtccggcctcttgtatgtttttatattgaaataagtacaagcaacgataccattacaaatagctcaggagtttttacagttccattaaaatgacgtgctaaaatgtataacgttaaaaatagtccttgaaattagaaaagagtagactctggttatcttgaccatgtaaatttttaatgaggtattaagaagtgtgtaacagttgaggtaacaacttgcataggtattatgaacaattttaaacatagccatttaatattccagatgtattttcggcacaaatgatttgtctattcagtgataaaagtctcactgcacctcactatcagctaacccagatgacttgttttgtgaaatttaagaaaaatttattggtagagacctctttcaagtttgtacttaacagatgatcactagtggtgaacagcattctacaggatactatctttcactaagacttcaacctgcaaataaacccacttataaaaaagggatacatgatcttcctgtggttaacagagcttagatacatagctggtctacagagattagttgattctaccctctccaaataagataaagttagcagcaacaggactttaaagaaacccagtgagattatcagaagaagaaaaagagtg

SEQ ID NO: 70866 - DNA, 2201 bp, Homo sapiens
tctctgcttcaaagtgaagatcaactgtatactgctctttggcacaggagaaggatactaatgggtaaaatctttcgaacatggtttgaacaatcacccattggaagaaaaaagcaagaagaaccatttcaggaaaaaatagtagtaaaaagagaagtaaagaaaagacggcaggaattggagtatcaagttaaagcagaattggaaagtatgcctccaagaaagagtttacgtttacaagggctcgctcagtcgaccataatagaaatagtttctgttcaggtgccagcacaaacgccagcatcaccagcaaaagataaagtactctctacctcagaaaatgaaatatctcaaaaagtcagtgactcctcagttaaacgaaggccaatagtaactcctggtgtaacaggattgagaaatttgggaaatacttgctatatgaattctgttcttcaggtgttgagtcatttacttatttttcgacaatgttttttaaagcttgatctgaaccaatggctggctatgactgctagcgagaagacaagatcttgtaagcatccaccagtcacagatacagtagtatatcaaatgaatgaatgtcaggaaaaagatacaggttttgtttgctccagacaatcaagtctgtcatcaggactaagtggtggagcatcaaaaggtagaaagatggaacttattcagccaaaggagccaacttcacagtacatttctctttgtcatgaattgcatactttgttccaagtcatgtggtctggaaagtgggcgttggtctcaccatttgctatgctacactcagtgtggagactcattcctgcctttcgtggttacgcccaacaagacgctcaggaatttctttgtgaacttttagataaaatacaacgtgaattagagacaactggtaccagtttaccagctcttatccccacttctcaaaggaaactcatcaaacaagttctgaatgttgtaaataacatttttcatggacaacttcttagtcaggtatggatttttaagaatcttattttcatcattgggagttcataaagtgtagcctataaaaaggcatattctatgtacatctagtgtgttgagctagtaccattttcaggtcaaaatagattgtttttataaatatgtatagagaaatcagctcactcaattccttctttcatgaatcattggaagtagttttacatctatggtagcaaaagcttttggagggagggagaaatcaggagacggagctctctaggttaccaatattacattcattatctgagggattgagaagaggagggtttaatcccagagggaacggatttaaagatgctgctattctcgggatgaaaatggtgcacatggccgggcgtgggggctcacacctataatcccagcactttgggaagccaaggcgggtagatcagctgaagtcaggagttcaagaccagcctgaccaacatggtgtaaccccatctctactaaaaatacaaaagctagctgagtgtggtggcagacgcctgtaatctcagctacttgggaggctgagtcaggagaatcgcttgaacccaggaggtggaggttgcaatgagctgaaatcacaccactgcactccagcctgggtgacagagcgagactccgtctcaaaaaaaaaaaaaaaaaacccaaagaaagaaagaaaatggtgcacacttgagcaatttcagggaccaaggagtagccctggaggacttcctataaaatcaaagggtcatggtctgagagctttaacaagtaggtagggaaattttaaggtaaacaaatgtgatttcatctagaataatcttatatgattttcctttattttaattactactcaaaagtttcctttgtcatgataaggtggactataaaaccagaatcttcgaagtaaaggttctctatactgagtggacttattggtgaactgttaatagacataaggttctctactttcccataacacacaaatttaaacaaaattttttttataactgaggctattaggcttttaggtcatttccttccccctgcacacctgcctctgttcttcagttcaacttgcattgtaataaggccatcttttgtttttatagcatactttcctaaaatgttgtttaagtatttcagatgtaattcttcttaaggaatatctatgaagtttattt

SEQ ID NO: 70867 - DNA, 1606 bp, Homo sapiens
gctactcaggaggctgaggcaggagaatggtgtgaacccaggaggcggagcttgcagtgagcctagatcgcgccactgcactccagcctggttgacagagcaagactccgtctcaaaaaaaaaaacaaaaaaaaaagccatttcattgacaagtcacactggtaaaaaaagaaaaaaaagccatttgatagctactgatttgaatttggagtgtgaaacattttttaaatgcatgagaattatagcacagatagttttaatccttatagatttcatttcaagcatcctatttgtaaggtgctattatattggtacaggtaatattttgtcagaatctgcatgagggatataaaaatgttttgtcaggtaatacctctttaaaatgaatatactgccaaaaatcatacatccaatctgctgacgccagagcgaatgcatagcttcacagcggtggattagcaaatgaaaagaggtgctctgaacccagtagaggaatataggaagtgtcaagaaaatactcccatcctcctttctttcctccaagctcttagatctttgtgtgatgagacccctttggggataccctagttactgtctgagttactggagatctctagggacagcagcctggctctgcagctcctgctttccacggtgcccttgcctctgtcgtctaccccttactgatttctttcataagtagacagggtaagtgggccccctgagctaaaatattaatctcgtgatccgtcattccactattctggtttcacgtctatttttaaaaagattttatctttgagagaccccccccttttaaaatgcaaattcccctgggagaggtcagaccttagttcttagctaacatcttgattatctgttagcaccttagttgggcttagtacacatttggctgagaagaaggaatccctggctaaaagtgatcaactagaaggaaactagcatttataataataatttattattattttattactattggcagctaagatgtactcagggccatattattaagtgtcaggagttgttctaagttaattccctcaacaaccctattggtattattaccactgttactttacagataagaaaactgaggtatgtagcacgtaatttatggtcacatagtaaatcctgtcaagtgttaaactcggggatttagattccagtgtgtgctcgctcaccgttttactgtaatccctctcttctaccatgatgtctcagatagatgacatctaatcaagatttcacccttttcacaattttgtatcaaatagaatgatgtgtttaattatagatgccacttccctttgaaggtcaagtactttgttattatctaaatagattttttagcaatagcttcaatgaaacaggtactttttttgtattcaagggaatttatttgcagagtagagaaaggagtaaagaggttagtgtacaatttagcacatacttaacactatctgagctgtttttatttaaaacatgttatttttacaattttgaaagtatagattaataaagaaagtacagtaattttcagtcccattacccagaggtaacctcagaataaatgtattctcac

SEQ ID NO: 70868 - DNA, 2182 bp, Homo sapiens
aggtgatgctcgaagccccggggcacttcgggagggcggttgtggcactcggttgaggaggaatgcgcttcccggcgtcttgcccgccttctctccatcgatcggtccccgcgctgccggcacctgctgccgcttaaagcttgaaaatcagcttcctaaagccattcccgatggccttcgatgggaaagaatgccatatggctgaattcattatgggggataagaaatatgtcagtgtgcgcggaggggaacctgttaatacgttcaaatttaagagtaggtaagacaccataccccgcccccatgaaaaaagaaagtgaactatatagtaactgttccaaatgcaaggttgagctgttgttaaattctactggtagctcgcagtttttatactggaagcaaaaccatttaggaacccttgggagattcactttctcctcagaccagtcctcaagtcccccactcccgccaccttttaagctttaattgttgtatctgggcaagtaacggggattgtgaaatttgcatggaaataagaccttcaggtcctgcacttgaattccttatctgttaagtagctgcctgtgggggtgaaagtaggggtggtgacttttgggcctggaattccattttgagttgtgttcaaaacgagcatttggtgtaaacaaggaaaaagaatgggctgttcactgtggtgaaatgcggaaagccaaatagaagttaagcacatgcttagagaatatttcataatctcaatgagattcaatattcagttgaatcttgaaagagatgaaaatttgtattcttggaactctaatcgttttgtccttaatttagcatctcaggatattttaaagagcgtttaaatgttttggcacattcaagttttctctccccattctatcttttttcatagtagccattagttttgcatatgttcgatgtcagatttttcagtccagtatttatcactgtgggctatccaaattcaaatgtagagatattctaatattgaacagttagtccagtgcatacagtttagaaagctgaaatattttgactactttgtgtatcagtcctgtttttcttcccaaatgttaattgtttgagattttttagcttaaaaatttttaagtgataaatgaacctgcatttagtataatatacaatggtacactttttggaatatttaaaatggaaaatctgttgaagatttgggttagatatttgaaataaattttctacccagttgtctttctcccttttctacagatttatcttttctgtactacaaagaaagaaagcgtcatatccactctaccaaacttctcctctacacacttgaatctattacagcgttttggtgcctaagagaattttctgctcattgggttgtttgagggcagagtctgtgttttatatgtgtatctctagtacccgactaactgcttaacgtggaggaaaaacccccgtgtaaatttgttgaattggggttttgaatggtagaggatacagaaatttggcttcttggtagccaaaaacaaaacaaaaaaacaaacacgtgctttgaagtctctgtccttcctgcagtgttaggcagaacaaacgtgggtgccagattctaatggagttgtctggtccagggagattagcgagaggctggggcacgggctcaggagtctaatcaagataggaaataaatcgtgtgcccgaataattctctgaattcagtaacgggggacagttttgctattaggcccagcctaaataggtgacaaataactgaaatacaggaggattctacaaataatggctttctggctaaaaggtgattgtaaaaggtgtaacattcacagcaattttagacgccataaaaaactttattaggaagaattcatttttaatggagttttacacgtcataggaaaaaggtaatttgtagtctaacgatatacttgctagatcagatcatagatgtgctggaatgacagagtctaggcattttacacacagagtatttgaattcaatttttcagacccttggtaggatgctcagtattattctgaatgtttctcccattgttacgaagttagctgcggtagattgatgtgtaaatttgttgatgtgacactgatgataaatgttttggaacaaaattacttgttaagtagggatgggggt

SEQ ID NO: 70869 - DNA, 1100 bp, Homo sapiens
ggggtgggggatggggatctgcacgcccggtttgtgacttcaggaaagcagtttccaggaggtgagagtttaagccaaacctgaaagaggttgatttgtaatgatttgcaggggggcactggaggcagccgccaggacttttcacttaggagatcagcatttgccctgatggaaactgggcgatcctgcagggactgacctctgagttatccaaaggccgacctggggaaagactgattttgaggttttaataggtaagtttggggacatcattgatgaaggtgggcagggaaggaggcttttttcttttcttttttttaatgttacagtaaaaagcttagattcgatgagacgggttaaaaaacaaataggaaaatttaaggagaagaatgactatgattgctatgtaaaaataaaattgcaatagagaggttctggagctcaggaaatgagctagagcatgctataatttaggcctagatagtgaagatcatgaataaaatggtagctgaggaaatttcaaagttgaataagtagtaataagtatgaagaaaaagctaaactacaaacatctgctctttaattactaacactagtaatgagaatttgtctccagcctcttcccttcccactccgcacctcttcctagcttacatcattgtattaaggcattttattgaagacactattcagcactctccacctatgccttacacagcttgcctttgcttttcttcccatttcactttttctcttcatttattcacatcattttagtccttaaaagaccccgcccaattactagatcagagggaggcaactaagactcttcctatctcccaaacgaccttccagaatggttttatggcattataataggaaagcaagagttttgatttttctattattaatattttgctttcaaggaattacaggaaaaaccatattgcatgccagaaatacttaaattttaaatatttcatcttaagagatgccctcatgtaatgcttttaatgcatttgagaaattcaggtggtgggcaaaagtacaacatagaggttagatgttttgagtgggagaagtgcactggggtcattatt

SEQ ID NO: 70870 - DNA, 1050 bp, Homo sapiens
tccatatattgcataacgtattcacactttgcccatcattcaaggcattgcatgtgctattgtcaacttccctaaccaccttttaaatttatcatcaacataaaattaagaagaatagtgaaattcttttcatattgatgacagtccactattttctacagagcaagataatcaaaacaaaataattggtcattttgaagaagaaatttactgaatgaagcagttggaaagaatggattacagttgtttttgagaaagtttacattaattgttcacattaaaaatatatcttccaagtatcttctctgctttccttagtcgttttagcaaaggcatctgtgtttatttatttacctaataagtagttattctctaaattcttacctctaagttctctaacttattctttaagttcttgtctctaagaacatttatttacctaattatttattcatttacctaatgtcatcttttggtcccataattttaaataagtgcaaagtgatgtttatactgccagtttggagttttgcagtagcaggtgtgattgtcttataaaactcttttgatatagccaatgtcatgttccttattcgtgtgttattttcgaaatgtattcaaggcagcacccccgagacagctgtgacaataatgcccccccccccatgacaacagaggaactgtgccaaagctcagcaaaacaaaatttacttggcaggggagagagtttagaggcttttcacagctctttggaaatgctaataaggtctcaaccttgaaccatgtttgctttttatctgggaaaccctttccagttacaatagcattgatatactaagagattccaagttaggagtttatacagtaggtttatgagacaggtaatccaaaagtcaggtgctccctcttcgcttggaagaacagtgcattttgggacattttaaagcacattgtcaacttctttggccttttttttttttttttttttttttttttgagttggagtctttactctgtcgcccaggctggagcgcaatggcgcgatctcgg

SEQ ID NO: 70871 - DNA, 1061 bp, Homo sapiens
tgctttggtacccttgtgcctagtatatctccttttactacagtgcagcatgcaatataattatttgtatgtgaggagttcccctccccatctccaacttcttgacagggactcatttatttatttatttataagagacaaggtcttgctctgttgcccaggctggagtgcagtggcctaatcatagctcactgcagcctcgagctcctgggttcaagcagtcctcccacctcatcctccctagtagctgggactacaggtgtgcaccaccacacctgactatttttggtagagatgggggtctcactatgttgcctgggctggtcttgaactcgtgacctcaagtgatcccccggccttggccttccagattactggaattacagatacgagccaccctacctggcccgcttttttttttttttttttttagtgcctttatctttgtttctttagagctcagaacagtgagtgatgtaggtagtcagtgtatcttaagtgaatagtcagtgttttgttttgatgggttaaaggtgaaattggctaactggatatttaaatttccctggtactctcaacaaataaaagtgaaaattatgtactaaaataataaggagtcaaaagttttcttcatttgcataccacaaaatattggtgattcggtagaagagagttggtggtgggaggaaaaataattaattagatccttttttgttctttgtgcagagtttacccctcaatcccaaacctttcctcaatggactaacaggaaagccagtgatggtgaaacttaagtggggaatggagtacaagggctatctggtatctgtagatggctacatgaacatgcaggtaagctaaagagctgtaaaggtcataacattgcatttattttgcttcaccttatttctcaaaggtttagtctgactaataagaatacatacaattaaattgacaaatatacggcaaaattcaaaaataaagtcaaagccaggagggatactgtgatatactaggtacaagacatggacttaaaccagaattcagctacagattttatt

SEQ ID NO: 70872 - DNA, 1813 bp, Homo sapiens
atataccacattctaatccatttgcctcttggtggacactgggttgcttccctctttggactgtagtaaataatgctgctgtgaacatgggtatacgaatgtctgttccagtcactgctttcagctctttggggtatatacccagaagtggaattactggattactggtaattctatgtttaattttttaaggaggccaagcgtggtggctcatgcctgtaatcccagcactttgggaggctgaggcagcagattgcttgagcccaggagtttgagaccagcctgggcaacatagtgaaactgcatctctacaaaaaaaatacaaaaactagctaggcatgatggtgtgggcagctatattcccagctactcaggaagctgagttgggaggattacctgagcctggggaggttgaagctgcagtgagctgtgatcactgcactctagcctggatgacagagaaatttttttttttcttttgagtaactgtcacactattttccacagcagctacgtggttttacatacccaccagcaatgcacaacggttccagtttctccacatcctcaccaacacttgttattttctatgggtgtttataaaatagttattctaatgggtgtgaagtggtatcttattgtggttttgatttgcatttggctaatgatgttgagcaccttttcatgtgtttattggccatttgtttatctttggagaaatgcctgttcatgtcttttgcacatttaaaaaattagtttgggattttttgttgtttttttaatggtagtagtttccaggcaggtttttaaaggctatcaagacaggtggtcaatccaatcatgaatccaaggattccatacttgtaagcagagtactaaaaggagtacttaagtaggcagagagctatgattttccttaacttaggcaattaccacctgagcacatgacattaaggcccccaaagcatagtttgagtgtggaaaattccttaaacaggagtcatttaccaagaccatagaaaaatctgggaagtatatgaattgtgatgaaaatattctggaagtagtggtgatagttgcacaggtttttgaatatactgaaaaccactgaattgtacactttaaaagggtgaattttatgctatggaaattaacatctcaataataaaagaattaccacttaatatttgttttagaattaatatagcttgctagtgaccctgctagagttgcaaaatgtctgagtaaccaaccactttgagtagtcaaccatattgataccagtgtttgaatttgttcactcagcaaatatttattgaattccattatgtgcctggcactgtgaatatagcattgaacaaaacaaagtccctgccctcaacagtttatggtttagtggtgggaggtggtaatataatgtgataataggcatgatagatgccatccatgaagaaaagggggaagacagtatgtgcaatattatatagagtagcctctctgaggaggcgaattctggaagataccagaattagtgtacaactcagttgagtatctggggaaaagcatcccagtttgagggaacagcaagtacaaaggccctgtggcagaagcatgcttggtgtgttcaaggcacagcaaaaaggccagagcagattgagttaagggacgaatgacagaaagttaggttaaaatggcggccatagagagcctgttaagtgatggtgaagaacatgatagaaagtatttggaacattattgtgtaatttagaaatgttaaatgttgtaattactttttacaaaaaattagttgctc

SEQ ID NO: 70873 - DNA, 1018 bp, Homo sapiens
gattgtgccactgcattccagcctgggcaacagagggagaccctgtttcttaaaagacaggaaaagaagaaaattcttactcaattatttgctttggttgttgactaatataaaagtatttggcatgttagccatagctttcgtatacctatttggacacctcaatatgagttagagactgccttcttccacacactgttttaatatctaatagaaagaaatattacataacctgggagattcagaaacttatgttgaaacaagctttgaatattaatttcgttgaaggtttatatgaaaccaaaagtactacaatagtaatagaaagctcatcttctgtttattaattatagataaatttgagttgttggtatagaaaggtctcagttaatgagttctctcaccaatattagctgtattgtaatattttcctcctgtgtgattatactaatatatttctttttattgaaagcttgcaaatacagaagaatacatagatggagctttgtctggacatctgggtgaagttttaataaggtaacaaacagcagtagtatatgtaaggagttactggtgagcattaggaatacctgttctaaatatattagtgcctcaattttggaattacttttttttaaaaaatcactattataatactttacagttagacttcagaagtctttgaaattgttaaacttgtcaaaggtaagttttcaaatgttttggaactggccaaaagatttttctagtgttgatgtttaattttctagctcttagctataatcttttgcagtggcaaccttttgcagtggcctttgttgcgggaacttagttttgaattttagttgggtctggctgttttgttatattgattttctgtactagcttcaaagctccaaattctggtaattatttcctttggaaaatcataaagatgtcattttataacaaccatatggtggaaaataagtgccatgtgcttttcaacaaatctatgtgaaacttttttttaaaatga

SEQ ID NO: 70874 - DNA, 1058 bp, Homo sapiens
taaccgtggcttttgaatattcaggtaaatctcgacaacaaatactattttgaaatgggaagaaatttcatcattttggaaaatataaaatatacccagatcttggtctatttttttttttttttcctcagagacagagtctcagtctgttgcctaggctggagtgcagtggcatgatcttggctcactgcaacctctacctcctgggttcaagcagttctcctgcctcagcctcccaagtagctgggattacaggtgcatgccaccacacccggctaatttttgtatttttagtagagacggggtgtcaccatgtttcccaggccggtctcgaactcctgacctcgtgatctgcccaccttgacctcctaaacatttcagcactttacagatagtttgtataatagctacttgaattaactttcagctacttgttcctctttttaaaacttttaattgaaatgtcacatacatacagaagagtacacaaataaatgcatagcttagtgagctgccacaaaagtgtaccttccagttaatctttttgaataatatcctcaaattgtgagcaagaaatgctatttgtcatactctctttagggttgttttgagggaaaaattaagtaatctgtgcaacttatcaagtacaaggtggtgagcaataggcactaaatatgtgatagctattttatggacctatttaatgatattctaagtgtaaggttatatactagggaatggaaataacatgtactgagcatttttattgcaaaattaggtgccgtgttaggtgccccaaaccatggggaaaatcagctaaaattctttttaagaagaatgtaagtaattggaattacattcatgtatcactgctaaaaatgagttgtaattacactttggtgcaaatatatttgctagtgtaaaaaagatggaagtgctgttagtgtagtcataatgaggtcatcttagggaaggagtaacttttcatttatagttttttttaaagcttgctttatgttcaataagatcccatcaggatcaccatgatatagtctgga

SEQ ID NO: 70875 - DNA, 1026 bp, Homo sapiens
gctgggactacaagcacatgccactatacctggctaattttttgtatttttagtagagacgaggttttgccatgttggccagggtggtctcgaactcctgtcctgaagtaatccacctgcctcggtctcccaaagtgctgggattacaggcatgggccaccactcccagcctaaagttttaaaatctattaaaaagacagctgtgtgataaatgctgactgatttcatatgtattttatttaatcatcaacaaaacattgttaaatatttttgcctcctcgttgtgtctgatgaacgtggctcacggagtctgtcacttattcgaagttctcggtgggtgcagaattcaagccaaggcctgtctgattccaaagcttgctttcttttacctcccaattaacatttattaatgattataataatcattgttgccattattaaccttgagaaattaaataattactcatcccaattgtattgtttaaataatagccagtaacaattattaagaagttactatgtgtttttgtaatatattgcatcattttcctctcacaacaccattacaaagtaaagtagtgtatctacccgggcttacttatgctttggtaataaatcactcctaaatttcagtggcttccaataacagaggtttaattatccttcactttccaatgtgggtgcttttctctgggtcttctgctgaaagaatatttcctgtctaggatgttgctggagttatagcaaagggagaaaggagagaaacaggtagtggttctcgaagcttcttcctggaggcaacataaatcccatccgatcccattcccattccctgggctgaatctgtcaataggcaagtttgacatcaacttagtggggaaagagaatcctctcacagagaggggcagcaaatatttgggaacaataacataatctgccacaggcaatatcctcatttcacaaatgaggaagctgaggcatggagagagggtaatttactcatattcccacagctagtaagaggtg

SEQ ID NO: 70876 - DNA, 1265 bp, Homo sapiens
tgtatggtaggtcctttttatttagtgtatttattatttatttcgtgtattatttattatgtatttattatttcactgtggtcaggacttttattctcaattatttgaagttttcagaaattctatataaattttagtgttttcatactcttaaaatcttgattaaaaaattttttttaaaagcagtttttaaaaagaaaggctttgaggctcactctcacatacagggctgatatttagccaggagatgagaggactctgttcaaataataaaatccttccatgctgcttggtaaatagccacgggtcccagccactctagcccttccctgtaacttgctgcaaaatgtctgatctgccagtataaaggccagtctctggtacagaaggaggtctctgggaccctgtggcaggaccatacccatctgattggctgggactggtgccttatttgggtgatgctggctgtcacccctgctgacatcctttaatttaatcttgggtattgacttgtgttcttattctctttctccttcctttttcctttcctctgaaccccttccctcctttctttcttctctccctccctttctcctcctctgtctccttctcgcctttctttcttttcaattttttcttttttggcagggatcttgctgcctttgacaaatcccatgatcaagctgtccgaacctaccaagagcacaaagcaagcatgcatcccgtgactgcaatgctggtggggaaagacttaaaagtggattaaagacctgcgtattgatgattttagagatttctcttttttaaatggaattcgtaaagaaatataaaacttcagctcacaattaaaactgtctttttagttttggctttttattgttttgttggtgattttactgaaataaagttgagctacttcttcttatagtggcatattctttgtaaattttaacaaggtttaatcttttgatttacaaattaaaaaattttgaattagctttatattaattttctctcagtatgatcacaaaatatgtcaaggtagtattttacctgatatatgatttaaattcattaatttgaatctgctgcagattcaaaaattcaacatggttaggattttgctttgctttttaaataaccttaaacataagtccgggcgcagtggttcatgcctgtaatcccagcactttgggaggccaaggcgggtgaatcacctgaggtcaggagtttgagaccagcctggccaacatggtgaaaccccg

SEQ ID NO: 70877 - DNA, 1047 bp, Homo sapiens
gcaatggtatcgggctctctcaagggtctagcatctagaacggtgccaattatgtagcaggtgcttgcaggtttgttagatgattagatgtttggaacaaccaagtaaaatccatgacagcaaggacttgatgttgttcatcttgttgtcttgagtgcctagaactgttcctgccatgtactaaatatgctcaactgattccaactactttagcatatactactcgagcacatgacagtcttttgctgaggtgctttggcattctttctaaaagatagatgggtgtttcattaatgtggtatccatttgggtttgtgagttcttggatgatgccagtagtatgtaagttaggtaaaatatttcctattttcctcactttggagtttgttttccttatttaaaagggactttgaaatttaagtatgtactgtagctttaaaactgcatttctgcaaaagcacgtgcatttttaaacaatgtaatctttatctttgcagttatgatatgactctgacaaatgcttgtattgccttaagtcaaagatggattactgtaagtaataatgtgtgatttttgattcctttttgaattgtgcaaatatgtctttactcatgaagcagggagggtactttaaatcacaaacagttatatttggaaaggctatttgaaagtcaggtttatctaaggtgatattatatctactctcaatatagaaaattaagggtttgagacagggtcttgctctgttgcccaggctggactacagtggcgtgatcatggctcattgcagcctcaacctcctgggctcagtcagttgtcccacctcagcctcccgagtaactgggactacaggcatgtgcctccatgcctggctaatttaaaactttttatacaaacagggtctgtgttgtacaggctggtctcaaactcctggtctccagtgatcctcccaccttagcctcccaaagtgctggaattacaggcatcaggcatgagccactgtgcccagcctagaaaattaagttttatggggggaaaaattgatgt

SEQ ID NO: 70878 - DNA, 1033 bp, Homo sapiens
tttttagtagagacggggtttcaccatgttggccaggctggtcttgaactcctgacctcagataattctcccgcctcggcctcccaaagtgctaggattacaggcgtgggccaccatgcccggccaacaaggatagttcttaaaaattctgtaacacttattacagcgttaggagtgttaggttcagtctaggtgttaagtttaattcctgatatactcccacttttaacatagggacatgcaagagcagaagcagggcttaactttccctgctgccatctgctgggctgggcttcccattgctctggattgactgcctgggagccagagtcggcttagactgtagtggtcatgccttacaactgctttcctctgtagaaaagccaaaaagaaaatatcttgattgaaatgtcttttcttctcagctgtgtccgtgtttttattaaaatatttttttttcaggttaaatgagggacatactgtgtacttggaacgccacatttgcggacgattgtttggtgaaaagttcagacattttaatgctctgggaggatggggagaactacagaattcggtaaaggagtcaaagttttaaaaaccttcatccaaagttgtataggtgttaaaaactgagtttttataaaagcgtctttactgtgtagcaaccaaaaagtcatttttacaagtgtggaaagtgaagtcaatgctggtataacactgtgttgatccacactgttcactgttctatgtaaggtagttttgatgacctggtctaaatagggagctgtgggacctcactgggtctttgctattaatatagctgtttactatgtttgcatcttatttggtatgtcatttttaagtgttgtctcctgaaagccaaatttgctgaccaggcattaaatcatttttctagtctttttataagaataaagcctgtattattgagcaagaaacaacagagaatattacttaagtaagcattctattaatagacttccagaagtttatgccaacatatcctagtgttcca

SEQ ID NO: 70879 - DNA, 1034 bp, Homo sapiens
atcactatcccggaggctagacctacttagaccaagcaaatagaatgaggaccaacccatatttatggggccttcttgcttcccaaatcatcccacaaccaaattacatctaggatagtgcagtgatatattatacttggaggcaaagaatcccagggctctggctcttctccaccacttaataactgcgtgaagtcccaactacttgggaggctgaggtgggaagatcacttgaactcagaagttcaaggccagcctgggcgacatagcgagaccccatttctaaaaaaataaataaataatgatgtgacacttgaacaagttttatgacctcgcaacctcagctggcacatatatataacgtatcaccacctaaatgaagggaggtggctgaaccgaattatttcctgaatagttttgtgctttagaatctacaattgttgtagcactggttcaggaacttctaattctgtgcctgcctcagtcacagctttgggtcctgagccatgcaagaagaacatgaaagtctagcccctactggaatatattcttgtttgatcattaatacttgggggagtcctttattctggcattcatcagaaatcaaactttcagaatcatggagctaggatacacagttaaatgactatatggtttgccgcataagggtcttttccgtatggatttccagagaaaattatttgacagtttttagcaataaattttagtttttcacagttactacttttaaaatgttcctctatttgtaactccaagtgtgtgttttcaaaacaaaattgttcaaaaccattctgtcctacagtgagtatataacgtccttttgaatctgttttgtgagtgtagcgggagcagggatggtggctgccattgccagggatggtgctgggctcttcacttatattatttattccttgcagcaagcctttgaagttttacacttacttgatggggaaactgaggctcgggggttatatttatttgcccaagtttgtgcagttagttattaggtggca

SEQ ID NO: 70880 - DNA, 1063 bp, Homo sapiens
cactactgtcacccagaccatagagtaggaaacactgcttaagagtttctccatgcttcaactgaaatgtgagggttaaccatagattaaaatggaaaatctgatttttaaaagtccaagaatctatttttggactttaaaagatcccaaaaggccaggcgtggtggctcacgcctgtaatccctgcactttgggaggccgaggtgggcagatcacctgaagttgggagttcgagaccagcctgatcaacatggagaaaccccatctctactcaaaatacaaaattagctgggcgtggtggtacatgcctgtaatcccagctactcgggaggttgaggcaggagaattgcttgaacccgggaggtggaggttgcagtgagccaagatcatgccattgaactccagcctgggcaacaagagtgaaactccgtctcaaaaaaaaaaaaaaaatcccaagaaatgaggactgtttttattttaatgtctaagaacaatgctgcaatttttaatgatttcttaatgacttatgcgaaagataaatagctatttcttcttgtttctccctttttcaggccatccactgcagagcaatccttccttgtcaggacactccttctgtgaaattaacctatactgcagaggtaaatattacgaattattaactcaattaaatgatgcatatcagtaaatatggtataaatgataagcagagatgataattgaattcctagagctagaattatttttcttaatgaaattctacctgaaatatgtaaacaaagaggctgtggcactcattctgaatctctactttaaaggcagttttaaacattttaactgtgaaaaaaaggaaatggaaaccaatctgacttttaaaaaggaattcagggctaggtgtggtggctcacacctgtaatcccagcactttgggaggccgagatgggtggatcacgaggtcaggagatcgagaccatcctggctaacatggtgaaaccccatctgtactaaaaaaaacacaaaaaattagccgggcatggtggcgggcacctgtagtcccagctac

SEQ ID NO: 70881 - DNA, 1037 bp, Homo sapiens
gtgatatacagtttgctgatttgcttaacgaacatgaagtttgaaagtacatgagttctaggaggaaatatattgtgtaatgtattgaggagccagagtgaaagaaacttaagttatagataaagtttttcataatagagaaaattttaggagtcagaagcaaacatattttgatttagatttgacttttacttaaagcccaaaatttgtgtgactgtcctagggttatttaacaatatatatgcaaatcttagaacccaaaaattttcaagatgcttagagtcccaaaaaatgagacctagactagcttttgactcttcaattcttctaatttcactctgtattttactctccataagcaactagttgttgtagcctatatctaatatgagttttttctggtaaatgaaactattttcttactatttaaaaatattaattttaggttttggatacaaaggaccttacaatagaaaaagtagtgatcaatggacaagaagtcaaatatgctcttggagaaagacaaagttacaagggatcgccaatggaaatctctcttcctatcgctttgagcaagtatgaatgttatgatctttctcttttacagctaaataatggggaaacatattcttaactaatttaaatattttttctttttaaattttagtttgtaaatatgtaatgattggtacactacttatcctgatcttctgttcagattaaagttgatacagcagttaaaattatatatacttaagatactaaaaatgttgtttgtatataatacaacaaggactttgggaactgttagtttctaaacgattcatccttttactaatatctagagtgatggtgggggcatgccatcataagaaggcatttcaagataacctgggcagctttacaagttgcaccctccttgcccttgccccagaggccagctgcatttattaatgggacaatgataatgccaaagatagaactgttacagtgcagcaatcttgggataagtgctttaaatgcattcttgtatctaa

SEQ ID NO: 70882 - DNA, 1090 bp, Homo sapiens
ctccagggctcaggtgatcctcctgcctcagtctcccaagcagataggactgcaggtgtgcaccaccacacctggctaattttttttttctttttgagacagtgtctggctctgttgcccaggctggagtgcagtggtgcaagcttggcgcactgcaacctccgcctcctgtgtctaagcaattctcatgcctcagcctcccaagtagctggtatcataggcatatgccaccatgcctggctaatttttgtatttttaatagagacgggcttttgccatattggccaggctggtctcaaactcctggcctcaagagatctgcctgtctccacctccaaagggctgggattaacaggagtgagccaccatgcctggcctctggctaatttttttattttttgtagaaatggggtctcattatccctggccatttacaaaattctgttacggcaatttcatgattctaccatatagattcttaaacttcagaataccttgataaaatattgtggtattttatttaatctgcttagttaaaaataaatcagaatgtgtagatttcctcatcatacagtaagaggaaaaagaaaaatcctttctgtattacctgatatccgcaaaatatttaaccaaaagtaatatgtgtgctttaggaaaaatgtattacctgaagactaattgggatgagaggatattagtaaatcttcccagacctcagtttctttagcctgatggtaaagtagttgaagtggaggctgggtgcagtggctcacatgtgtcatcccagcattttgggaggctgaagcaggcagatcacttgagcccaggagtctgagatcaacctgggcaacatagtgagaccccatctctgccaaaaattagctagacgtggtggtgcgtgccagtagtcccagctacccgggaggtcaaggctgcagtgaaccatgattgcgccactacactccagcctgggtaacagagtgaaaccctgtctcaaaaaaaaaaaaaaaaaaaaaagggattgaagtggagaagctgagatatactccctttcaagtcggaagccctatttgtgtactgctatatttgg

SEQ ID NO: 70883 - DNA, 1055 bp, Homo sapiens
ggtgggagtcaatggcactctgtaagacagaatttggctgtctatagacgagaattatttcatgatcagttacctatagtcaacaacgttgtaaaataccttccaaaaaatcagaatcacatcatccggagggagtcttctctagagtcaagaatgcagtttttcactgaagcataattcttttcttttcgactaggtctcactctgtcagccaggctggagtgcagtggcacgatcttggctcactgcagcctcagcctcctggggtcaaacaatcctcccatctctagctcccaagtagcttgggctacaggtatgtgccaccacgccctgctcatttcttaattttttgtggagaccatctctgtatgttgctcaggagtctccaactcctggcctgaagcaactctcctgcctcagcctctcaaagtgctgggattacaggcatgagccatcgcatccagctgtttagctattttctataactcaaagcaggtgctagtgaagcacttttgtctatttggaaggtaagcgcagattctggcacctgactctctgggttcaacagcaaagactcgtcctgtctggttgtgggactttggggaagttacttaacctttctgtgcctcagtatcctcataggtaaaatgggactgatatgataaaagtatcatatcatacagggttgttgtaagagttacagaagttactaataatgcacttaaactacacctggggcaaagtaagtgctatttaaatgttaactacaattaccttttaagctacagggaatcctcctcacagagcttgctgtggagtcacatggccttcaccaggctagaaggcattgtgtagctacagcacccacctgggctctttgtccattaggcaatgagccccacacaggcactgaaatccagggagactcttcagccacatggcgactgtggtttataaggtgacttggagtatgcttctgttttgtagtctatcatcaaatatgaaagcacaaaaaatcgtaaatgcttgcagaaaactcagatgctagggcactg

SEQ ID NO: 70884 - DNA, 1059 bp, Homo sapiens
acagatgtccacatgtccacacagatgtccacatgtgcacacccatgcccacatgcacacacagatgtccacatgcacacacacatatgcccacatgcacacaggcacacacacccacttgcacatacatatccacatgcacacgtggccactgccatatgcacagacatgtgcacacgcatacatgtacatgtgcacgcatggctggttaattcttgcttataaaatgctctcaagtgatgagcaagacggaaagttagactcttaatacagtttaaaaagaaaagaaggagagggggaggaagataagaagaaaagagatggttgagggaaatggaggggagaggaaaaaaagaggggatggagaaggaggaagaagaggaggcatgtcaaaaagagatgacgaaaactacactctatttgacattttccgatgacctctttcttccttccgttttgccagtgtcactctgtgatgataggtgtaagttgactgtgtgcattgcccgtctgtgaccgttttcgactcacagaaatggcagtctgaagtggctcggcctcttgcttgagagacagattggagcagagtctttgtggatgcaaagccacctgggccactgccgtgtgtgccaccctgaacttcaagctgccctgaaccgcgtgcgtttctcagtgtcacgtacagctcggcctgaccgtttgccttttagtgttctcttccttctcggtgtcctcctcctcttcctcactaacattcatccagagcctttcagtgcagaaatcaggtagctgctgaactcggcagctgcgtcctttttcccatcatctcttctgtcctttgctagctgtcatttcttccctcttggcttcaactgcacatccctgggtttgtcctaatagggaatttttcccacttgagtagacaagcatgagaatatcattatttttatatgttatatgttatatttttagcagagaaaaaagtggaaaatgtgtgcaaacttgcagaaggccccccggaggagggtcgtccctgtgcccatgctgtcaggaaggccc

SEQ ID NO: 70885 - DNA, 1421 bp, Homo sapiens
atgttgagttgaaatattaaatgtccagagggggttcatgttagtggggttgcacgcccttcagaggcagacattttcattgaggcagaaattgcagactcatgccagacacccatacgtggaacaattagttcttaaagtgttttgcatattttcatttgtctatgaaaacaggaaatttattaaggaaaaggcaaaactttaagaattattctttaggccagtgtgatggctcacacctgtaatcccagcactttgggaggttgagggtgggaggattgtttgagcccaggagtttgagaccagcctgggcaacacagcaagaccccatctatatttaaaataaaatgaaaataaatattattatttataaaagtccacaaaagactttaaaatattaatcctcctagttaatgtagcaacttgtttgacataaagtgaaaataaaaatagtgaacaatttccccatcctgggatagaaaaattacttgcatcattttatgaatcatcattaagttctccttgttctgtaatgaaaaaggagaatccagggcatttggttaaaaaataatgaagacttagctgctttatcttatagaactctccatactaggcgagcaccttcattattcattcacacaccagaatcttgcaggaccgtcacttgctatcatggagaaatcagtatttcctccttgagacccatagatcattactcactgattaaggtgttactgtttgaatatgttgagtgcaggtggaaagaatcctagggacaggactgaagaaaaggtggacccagtgcaaactccctctttcccaaattctagcttttctcatcgtccctgcctgtatcctgtgccccacagtgtggcttaccccaagttagttgcagctctttggataccatttcatctagcacgtggcactttgtattatgattgcctgttgatctggcaatctttctcactaaactatgggccctcgagaccagaatggaatcctgttcactgtggtgtccccagcatctggcacatggcttggtacacaagtgaggctcagtaataattgactgtctaaatgaattcacaaagagaagtctgagaaaggccagtattaatagcaagtcttcatgatcatctgagctggtcattttgcttgtcaaggttaatgtctgctgagtacctcctctgtgccaggagctgtacatgctgggattcagggtctctttgtaagggtggagctaaagaggttttgattgccatcttgcttctttggtttcctagtggagttagggtagggtgtcatgaagtgaccatatccttggagtaattgggtttctatctctttcacagcccttattcccatcacaacaacttgagctatagtcatgttgatttttaacaatttcagcttgggta

SEQ ID NO: 70886 - DNA, 3295 bp, Homo sapiens
acacatcttgtgcttccctagtcatcaggttcatcacttcgaagcatagaagctgtagactgaccccgtcaacagaagggtcatttaagacagtgctgatcactcttaccatggaatattagcttttgctggtgggaacattagcttcctagtcaccaaataactgtatgtgggataaaactgaaccttgaactgcctcataaaatgactttatattttaggacatgggaagaacagaagacagagcatgctcttttaagtctgataacatggtttcaagcccagcccccagcctttcttaccaatcaaggactcagaactgaaggcaattatttcttttggtggacttggaatctccgtttgtctacactgtcctcttcacagtggagtctttttatttcagacctacagattgtttttatatttgttgtcacagtgtgacaattttttgtacagtcggttttaaggtcttctctgccattagagccagtaggttacagctattgatgtaactatagctgcaatttttgtgcaggactgagaaacacagtgcattatttattgcggaatcattgctgctaaataactactgtctgtttatttaacacaacaattgaatgcctgaagaagttgcagtggctttattatatgtgaatgcatctgtttctcctcacgaattgttttactgctgcattttttgtttttaaaattaaactgcagtgtttcctggaatgtaaatttagctttgcttaatagtaaaataagtgagccatcttgaacactttaagtttatactatataatttcttaatgaacattggcaaatagagtagctaagagattgacaagcacattacgtttagataagcatgtgatgcagaagttgattcaagcaagtgaatccctgacattttgaggatctcacattagacaccaacaaattaaagctccaaaattatttattttttatgtgttcctcactttagaaacgtctactgcatattactggatatttgtatactaatacacttacctattttacattgtgttttaaatttagttaaaacttaaccgtagaagtctgttcaaacgcgaaaggtcttgctttgtttgttttaaatacatttattttattagaaaggatgatatttcattggggaatagtttctttcatttgggggctatgtgtttcaataacattcacttggaatcagctgaaagctgtaatatgtctttgaaatgagccatgataaattacaaacaagagaaatgagaacttacaggattgcttgaaattattgtgggtattatctgtttaccagagatactaaatattagttttaattatgcatctctttgaacatcataaacacactttggtgttggtaacagtattttaagcatttttgttcacttttaaggactatttgtttagtgcatcttacaaactataaatcttaattggtatattttgaaatggtcgtgtaaatttttgccttatatatcatgaaaatagtcataacttaatttcttttcctgaaattcactgtaaaacattcaggggtcctaccatttctgttcaggaaatcttgtagtttattgttgttatttaacagtattaagtggatttttgtatatttcattttaactttatttgtgaatagtgattgtggcatgtttggggtgttattttaatatttcacgatactaaaattttaattttaaaaaattctggaagaaacagattcatgtgtaatggtgaatattggaccactactgcttttcacatttgtaaattggttttatgttaaaccttgtagcctaacaaactgctgttctttctaactgacagacatgtattaatattgtactttgaaggttataaatatgtggaaattccttcattttgttttgaaatttataataacaaaatctccatgttgttaaaatgtggttttattgagtcacagttctttcttggggatgaaggctgtgccgagtggggtccttttcttttatgggtcgttcttaagataatgaagtctcactgtgctagaggtgttattgttttctgtttgtgccaatcatttgcttagtaatttctgctgggttttttttatagcactctcaattataaagtatcaaatttgtcacttcatagaatgtatatttgatttgttgcaaatttgacattatagcttttcataggcttaattcttgcgtataaaagatgaaaatatatatccatttgttacataaagtgtttcttcctaggaattcctaggggtatttcttcattttattaaggaatttgacaagcaaacaagtgtttgtttttttgttttatttttgatactcgagcaccattcagatcctgaaaacactgcagtgaagggaattgaaactccgaaacttggaactttgaatacctgtgattcctcttaaactggtaagattcttaaaggtaagagaagatgccttttatattttctttccaagtggtactgtgaacacacattggatgtgtcattctaggtgtatagagtggctgcattctgtctgaggctttatcaactttcatttgaaaggctatttgttaacatgttataatctgtcttttggactcgggacaatttatgtaggttctttttatcttttaaaaattgtgttgagacatatatatatatatatatatatatatatatatatatatatatatatcataaaatttggcattgtaattatttgtatgtgtacagttcagtggcataattatagccacaaagttgtataacagttaccactgtctacttctaaaatgtttcattactccaaacagaaactctgaaccattttacccttccccgcagcccctggtaaccgctaatctactttctgtctctgtgaatttgcccattctaggtatttcaaataagtggagtcataccatatttgtcgttttgggtctggcttatttcattcagcataatgttcacagttcatccatgtttagcatgtatcagaacttcatttcttatcatgactgaataatattctattatgattatacacattttgtttatcgatttatctgttgatggacactaggatatcccatcttttggcttttgtgaataatgctgtgtgaacattggggtataagcatctgtttgagtccttgtttttaattatttggggaatacatacacctaggagtggaattgctgggtcatataattctgtgtttgactgtttgaggaactgccaaaatgttttccacagtggctgtactattt

SEQ ID NO: 70887 - DNA, 1095 bp, Homo sapiens
atcattttactttctatataacacttaatatgtaaaattaacttttatatatagttgctagattacgagccctttaatggaaggattatgtcttaaactgtgtgtgtacatacagttcctagatgactgttctaagaaccaccattctattctctgaaccaccatccttttcttttccttcacttacacacaccgccttgtaccaacatgttctacctctgcttcctgcatcaaaacgtcttgaatcatttgtttctctccatttctcctgcctagcttcactcactgtcatctcctagattaccataatatctcttcagttgtttttccccactcctgtctttgctgttcaatccatggtctacactattgctaatacaaggattcagtgagataattggtgcacttaaaaaacatttctaacacatagtaaatcttcagtcactgttagctgttgttagtgttattcttcaaggattatgcaaaggagagttggacattttaagtgggaaaaatggatatagcaatatagaaattgagacaaatagggtaaatgcgaacaaattagttagatctaaaatatcccttcaagaggttttccgacaggctagtgcaaaattctgcagagaggcaaccttaaggaaaagattcttgtgcttcataatatgtaaatgaattgctaaattattttcatgatctattttaaaggggtgttggttgcattttctttgaaatggcttctggaagacctttatttccaggatcaaccgtggaagatgaactgcacttaattttccgactgctaggtaacagaagaaatcttttcccagtgattttgcacccataattgactagctggataagactgtatctctaaaatacatattttaaaattagatactgagactaacataaacagctgttagttagaataattagaatggacactatgaagatagatccttctaggtaacttcatctgctaagttttatctttgcaataaagattttatggaaaaacagaacataattagtatggaaaattggatgtcaccatattattaaggaatattgctaacttttttggtatcaact

SEQ ID NO: 70888 - DNA, 1134 bp, Homo sapiens
acatagttctaaatggcagaattggtatttaaacctaggtaatctaattcccatgccagaactcattaatcactgttacattatggctctttaaaataatatctccttaaaagtatatacttatcaatacatcttgcattaacagttacattctttcaaaattataaatgtcagtgacatctgtatatatttaccacatgtcaatctgtgttgagtactccgaggaaccaagaagcacatcaggtggccggtaccatagtgtgacaacttcatttgagtaggtctttgtgggaactgacttggctcgggctagtccttcatagggaaaataaaacaaagggttaagaaaaagctttaatggatctctcagaccctattctcaccatgactccattcaaagggatgcctgaaatggttaattcgtagcttcttgaggcttcaccactattaactttatgaattcgttgagtgcatgtggccctaagtaagcaaatccttacatagttgaactaaacaagaattccacaaccagagactgtgcttacttttatgtttgaatacacctggtgaagtattctgggtgaatctaaacttaagatgttttccttctgtccatgaatcatgatgacaaaattatttctcagctgcaattaaattaatccataataggccaatgacattgagatacacaattttacttctaacggctatgagcttttgtcaccttttaacctgattccaactttcatttgctataccattttttatcaaaaactgtaaagttattggtccataatctcattgagatttactgacaaatcgacttagagacaatttccttggaataaaattacagtgctgttctgtactccctttttaggttgtaagttacatggatcattctggagtaagacagacttcattgtccttggatattattaattgctgtttacgtcaggggtgtccaatcttttagcttccctgggctacaatggaagaactgtcttaagccacacataaaatacactaacactaacaacagccatgacctttaaaaaaaaaaatcgcaaaaaaatctcataatgttttaagaaagtttacgaatttgtgttgggctgcattcaaagccatcct

SEQ ID NO: 70889 - DNA, 2505 bp, Homo sapiens
gttattaactgagtaacagcatccagcatagtttgtattcttacagtaggtttctttgacctgagtagtgtatccaaatttagcaaagatttatttatccaaacttagtcaacaatatgtaagaacctattctgaaaataggctgtcgcagctgtgtgcttcagacatttctaattctgtaggtagtaattttaaacttacattttaaaaaaatattaagtttggtggttataaaggagagccagtttctgttactaaaagacagctcagaacatatggataacacattgctaaggatttttaaaaagggctttaaatgtacttccatatatattctgtcagggttgttttcatcttattttacatcttttgtttgcaaagtgttataactgtcattttgtatttttttggttttaattttgtttttcctgctttttttattggcaataatttgaaaataaaacaaggtccttgatgataatttcacaaatgttgagacgtttatttctttaatgccaggtttacatgattagcttaagttggaaagcgttttattatttatttgtttaaatggcctttatactttcaaaatacaaagtgtaacaagaattcatttaaatagtaattttagagttttaaaaacataattatgtagactggagagactctggcacagagaattcattcaggcataccgttgacctgctgccttggctgcctcagtgttcggatgccctgtttttcacctacagatgaactgaggggaaactcttgaatcctctgtacttgaggttctttttgttaaccccagagaatcaaaggtcttatgtgttccgtaaccctctttctaccaaaatgtacagcaaaaactctaccattagccttataggaattacttttttcagagtcattcagaacactacggtgctaatgcccctttgtgaatcacagtagattttgaaggctaagtaggaggtgctgaaagtaaagtacccaagagatgggtgatagaagctggtttaggttagttttatagtaagtaatttgccagagctatgcagcagctttctctttgatacctcagacttttcataaaatcgccaattccagtgccttattttaaagacactgccccagatcagagtttttgtttttgttttttttcaaggagagatgggtgggaggggggttggttggttgttttgccagaattttataattaaactatgtaaaccttagtaggcctgtaagtttatgaggatatgtttttttttttaagtcattttccacagtaaatcaactgttactgctaggaggaagttactttttaaaaaatatttccatagatactgttagactaaaagaaataggtagatgcttcaaatagaataataaactattaaattcagaaagccactatatataaaaggaaaaagacattgtacttaagtatgcaattactttctttttcctgttacaatgttctaggccagctgcttttctgcttaccatcatttatgcttatactaaagcatgtctcatctttaagactaatttttatttatttgtttctgtagctgtttctgtaccaaattctacgtggtttggcatattgccatagaagaaaggtattgcatcgagacttgaaaccacagaacctcctcattaatgagaaaggagaattaaagctagcagattttggtatggaatgtatgagatatttattagtacttccaggttctaaagtgtaatggttaaaagatcaaccactgtcataatgtgccattgcttttatgtgggtttggaaattttctcggtagcccacagaataagatatttgacagaactttggttggtgatttatgttggttattagcagcaaattctaaaatgcacaggctgttcttgggtgtggacaaagacccctagggctcctgagacccttgtaggaggcctctaaatgtaaatatattaccaaaattgtaccatctgttatttgcctatttcactgtgttaatatttgcaatgatggtcccaaaataataatgcataaaactatacatcaaagtagtggcaccaaaatatatctttttttttttttttttttttttttttgaagacagcattttgctgttaaagcccaggctggagtgcagtggtgtgatcttgactcactgcaacctctgcctcccaggttcaagtgactctcctgcctcagcctcccaagtagctgggattacaggcatgcgccaccatgcctggctaattttgtatttttagcgtgaccaccatgttggtcaggctgatctcgaactcctgacctcaggtggtccactcgcctcggcctcccaaagtgctgagattacaggcatgagccaccatgcccaggccgtcattgtattctttaccactacacttacgtaaagggaaaactgtcagttacacttacatgatgaagcaataaaatttattaattatatttaatttccatccttgactacattt

SEQ ID NO: 70890 - DNA, 1377 bp, Homo sapiens
agtagctggaactacaggcgtccgccatcacgcccggctaacttttttttgtattttttagtagagacggggtttcaccatgttagccaggcgatctcctgacctcacgatccgcccgccttggccttccaaagtgctgggattacaggcatgagccaccgtgcccagcctccatgaacatttttacaaccaatccccttggtaaattattgctttaaacttaagagaatcttttttttttttttttaaatagcattgttgcccaggctggtcttgaactcctgggctcaagtgatccgcctgcctcggtctctcaaaagtgctgggattataggggtgagccaccgcccaagacctaaacttaagagaatcttttaatcagttcgtatgttcaacttacttcaggtttttataaagactgccacagactaaacaattttctttttctgttttgcagtttcactattaaaggatttaaaacatgcaaatatagtaaccttacatgacattgttcacacagataaatccttgactttggtgtttgagtatctggtaagcatctcataaaaattcagtatttaactttactttagaaaaacatagtaaattggacttttagtttgttttttatttttctttaaactgcagctgtgcttagctaaattggactttttaacagcccaagagactttattatttagttatcagtttttcattaaattatgtgtatggtgcatccagtatcttttcttgaaaaacaactaattttgaaaaacactattaagtgaaccagtcacaacattctgaaaatggtgtatcacatagcagagtgctgtgtttttccaggataaagacctgaaacagtacatggatgactgtggaaacatcatgagtatgcacaacgtaaaggtatgttttcttgcgtgtgtaatttttaaattttgtttaaagcataggtgaaccattatataatgaaatgtaccagcctcataactcttcttcagggttttctgtttggccttttaaataggttattgtcctctgaacgtgcaatatttacccagaacttctgtttactacactatagctttcttaggatcagacctttttgtagaaccacttcattcttttgacatttcacattacaactgattgtcctaatatagaatatatgtacaggtgtattctgctttaaaaaaaaaattcaaaataaacacgaatgatgggtgcattctgtgaaaggccttctttaaatagtgaactccccaaataaatggtatttaattgtaaaacaacaacttttcagaactaatgaataaggccagaacatgcaggttttatgaacactatgctggaaataccaatctgtactgtcag

SEQ ID NO: 70891 - DNA, 1048 bp, Homo sapiens
ttgattttaaagctattgatctaattgttaatctaaaataaggtacaaaaagtaaatattctgtctatgtttttatactcttgaggcactctgtagtgttacagaagtatggaagctgtgcatatgaactgaaagtcctgtttactgtaagaaaagccatggctgatcattgtgtgtttttctttgcaagatggaacttaacaatgcttagaaactagaaattcaggtagagctctttattataagatggtattaaatagactcttatgatacttttgatgcgtcctttaaaaatatattttatagggtacatatgcaacagtatataaaggaagaagtaaattgacagagaatttggtggcattaaaagagatccgattggaacatgaagaaggtgcaccctgcacagctataagagaaggtataataattatacagaacattttaaaatcaaagtggtggaataagtgtctattttttataagtaaaaagagctcagatatacaagtaataaatgactggaagatgtaattaaacctttaaaaagcaaatttctaaaacaaatactcaaagggattaattatattagtgtataacttataatgaaatctgaattcattaaaaatcactatcatagacaactatttgtcatagggaaatgttatacattggtacatgaggaacatggtaactataaattaaccagataaactaaataaattaaaaaacagtgtgtaaacatatttatatcatagtaccattttataaagaagattattcagaaaatggcttgaggcaactgattagtaatgtggaggggaaaaatggttccttgtaatttatatctaaattaatgccagaagtttcaaaagttaacatttaggaaaaatacagaagatgatatggagaatgttataatattggggacaattttaagtattataatatcaaacccagtagtataaaagaaaaaattgatttccatgaacttttttttttttttgagagggagtctggctctgttgcccaggctggagtgcagtggcga

SEQ ID NO: 70892 - DNA, 1065 bp, Homo sapiens
atatttttgaacctttgaatgttccaacattgggtttattttaaaacttgatagatattcaaccatttgattataatcagatttttctattcttagtcattctttagagtgggaaagtttcagaagttgaggaagagatgaattgaaactttaagaatatatacaaggctgggcgcggtggcttacgcctgtaatcccagcactttggaaggccaaggcaggcagatcacttgaggtcaggagttcgagaacagcctggccaatgtgttgaaaccctgtctctgctaaaaatgcaaaaatttgccgggcttggtgctgcgtgcctgtaatcccagctgctccggaggctgaggcaggagaatcacttgaacccgcgaggtggaggttgcagtaagccaagattgtgccgctgcactccagcctgggcaacagagtgagacgatgctgtctcaaaaaaaaaaaaaaaaagtaaatactacatttttcattgtttacttttcagtcagaaattggctttggaaaaatggaaacctacatcaaattggaaaagcttggagaggtaagtaaatatctcaaaaatgtaagacacatttttttcttattcgtcattcaaactctgttactccacggtttttgttaacctggaaaaaacgtaagtactgatgtctacaagattatatacttgttctggaaaggtaacagagtttctaggagttagagtcttcaattcttgaaattatcccatcagtttgagaggaaatgaattttttttatagctttgaaatttttattgaagcagaaagtattatgttttcttaataacaaagtaggcatttgtcacttagtctactgccagtctactgtctgtgccaccatgggaaattgcatgagttcagacctgtgaaaaatcagaataaagataaaaacacattttttgaaggttacggaaattcttaagatcttggttttcttgaacttactactagtactactgatttagaaatggcctacctcctatagtaggaaagggcaaagaaaacaatagttaatagggaaggcttaaag

SEQ ID NO: 70893 - DNA, 1022 bp, Homo sapiens
taaatttcttgatacaatgatataggcaagattcttttcaagtttatcccagctcacattgtataattaaataaagtagaaatgccattaacatggcagtaataaatacaattctctttccccatgttgcatacaagatcatataatgtctacttggttagttatttaaactgatcacagagtttgtggtagtgtttgcctaatgttactatatggtataataaatttaaagtaaatttcaagttgaatttaccagtgaaaggactcaaaaattactgaggttgcaaaatttcatttctgtaacacttcgctgtatacttttgcttacagtaaatgtttttgccatgagtatattacatataatcaatgtaggtaactttgcaactgcaataaaactttacaattacttatcactaagaaataatatgttagagcctgtgaatacaaaagccaaatgccttgcctttactattttggattacctttttttttttttaaggatttaaataagcggttatcactgcctgcagacatcagaatacctgatggatatcttgaaaagttgcagataaacagtccaccatttgaccaaccaatgagtcgaaggtctcgtagagcttccttagtaagtttttggtctcctatacctccaccatcaatcagatctgcttgtttgctgcttctgggtgtaaacattttaaattaatttttatacttgactttagaatagctaaattttattatattgccttctcgatttttattattttccattcttaaaggtttattggagtccttaagatgcattcaataggatgcatattggaataggatttaaggtatattttatttttggtaaatgttattaatacatgctaggtagataaatacatactagatatatagatacactagatatgtgctggataaataaacatgtattaatatatactagatatacagagaagtacacaaaccataattgtacagctcaacgaacctttgaaatgttaatatacctg

SEQ ID NO: 70894 - DNA, 1011 bp, Homo sapiens
cagctctgcatctaagctttgtgaacttttgaaagtcatttaacctttcaagtctcagttcccagatctagaaaatgaaagaactggctcattctcagagatattatttccagtttataattttattactcaacccttgataataacttgaatgttaatttttttcataatttgaaagtgtaaaaagatttcatactattttaagacatttgagtcatgttttcatctattaactgcatacctgtggcacccagaatgtaaatgactttttatgctgtgatttttactcgttggccttctatattttacccatagtgataataaattatatattagaatataatgtatctcttttaatgtctcattttttgatatagatattgttcatgaaaatctaaaaatgggatcagatggtgagagtgaccaagcttctgggacatcatctgatgaagtccagtcacctacaggtgtttgtctcagaaatcgtatacatagacggatctcaatggaggtaatcatttaaaaaatacaaatatacttgtgaatatgtgtgttggtatatgttaatacacatacatatcaagtggagtaaatgcccatttaaaaattttcatgaagacacgtgacacttgtaagaaagttacttctttgcattcataaattgcagtctgtgaatatttcctcttttttaatttttatcccaatgtagatatgtaatatagttgttcgcattctgtgaaacattttattttaattttttgcgaaacgttattttaggttatccattaaggagaagtgaattttcaaaaattctggaaatacagaatgatacattagcaatgtcttctttttagaaaatacgattttaatgatatttttgagattcatctggataattagcattttattttctctgtttcaaattttaagaggtataaataaacagcttttttttcttgcattatattataaaagtgggtgtcctttcctttgtggttcactgtacctact

SEQ ID NO: 70895 - DNA, 1076 bp, Homo sapiens
taaaatatgttccacaagaaaagaatgtgttggaatcagctatcaggcactgacaggtgaccaaaaaggtgtagaatctctgtgaaagctgttggtgaaatccatgtgctattacagagagaaaataagcatagtagattatggtagcctatgctactagcaatctttgtaacccaagaggaatcaatgtctcttatgacgtcttgaagtattacttcaaggtcaaggagaaactcaatagatcgcctatttgcccttatttactacctattaaaagttactactgtaataaaataagttttaaaaaacatatacaacttgagaaaacaaatatttttaatctttcaccatttgttaaaaacaaagcatgttttatgatagttaataccaaaatattctagaaaatatgcaattggtctaaaatattagctaaaacatacgttcattttctttgactcatatcttttctttaggaaaagaggattgtcttgtagtcaaatactaaaaatatgtcccagaaaccaaccactaagatatatactgtgtttattttattcctgatcatcattggcaaacacattggcaagacccttctatcctaagagtaggcacactgcgcttcccaccaaaaattcaatgggggggggtcccaccaaaaattcaatgagggggtctaaaagagaattaaggattttgctctgtgtatctagaataggtcctctggcaagaggaacaacagtaaaatcatgatgtttgagatttgacccaaatgtacaattttcccctcctacatataattctatccaaattattatattaaatttcctactgagcccatccctctctcctccccaccatgacaaaaacaaaacaaggccaggcgtggtggctcacacctgtaatcccagcactttgggaggtcgaggcaggcagatcacttgaggtcaggagttcaagactagcctggtcaacatggtgaaaccccaaccccatccctactaaaaataataaaaaacttagctgggcatggtggcccatgcctgtaatcccagctgctcaggaggctgaggcaggag

SEQ ID NO: 70896 - DNA, 1050 bp, Homo sapiens
tttcttaggaaattgaagactatataacttttgtttggttactaactggaatatttccctctcactccaacattacgatacctggtctcaaaccctgatgaattgttctattccacatatccttccatttttcactagttcttaaagaagaatgcattttataatattatcttgattgttaaataactattaattttttttattcttataacccaagttaatacagcttaaaagtgcataggaagtctgtgaaatttctgtttgtggcttcatcagtttcataatgtttcatgcatttgacagtgctttttacaacataaagtagtagtatccagatgttaaaataaaaagagcttgttaagtgtgttaaatacaaaatcctggtgaaatttctagaggaaggctacatattcaaatctgaaatagccctagggatgtcatagtagtaactgggaaggaacttacgtgactggctttcagtgtgtcatgatgtgcagagtatctggcagatcttccttacctgtgcctgaaattctgctgttagagatttgtggcagtggctggaaagcatggacacccttaccccttccactagaatgcacatacttatgttttgagagaggaaaaggtatagtggagtgggctctggactttttaaagtcataggtttggattttggatacacttaaacacttcctagttgatgactggctaagccgtttattctacccaggcttcagttttcttatttcctttactcagaagggtcattatttgctcaaggttacccagctccagaaccagtactttagaacccaggtttcttcacttcagagtctataacaatgctactgttctgcaaggaccctttcattcatttgttaaggttttccttgataacatctaccttttttttttttttttgagacagtctcgctctgctgcccaggctggagtgcagtggcacaatgttggctcactgcaacctccacctcctgggttcaagtgattctcctgcctcagcctcctgagcagctgggattacaggca

SEQ ID NO: 70897 - DNA, 1616 bp, Homo sapiens
aagatgtctctagtgtaaagtagtgtaaagtcttacagaaacaaagggtagatgagagtggcaatagctcagtacaacttaaatatctagtgtgtttaaacaaatggcatgagttactgactgtcaaggtagagctataaaggttgactatcagaagtaaagaatagcatttagagtaaccctacaattaacaggtttcttaattggaatgaacttcatggtttactttctcctttgcttgggaagtgcatatattatctcatctaatccacatcaaaacctccatttctgcctatgatggagtaacttgtaacagactaaaactgctgaaaactagaaatgctaggggaaaaaatcattttgaaggcattgtaaagcttctcagtgaatcaacacttgaagagtcaagattcaggagagaagggagacagacacactctgtgctggttttcctcttgatccattttccagctcttaagctattgggggtaagaagataaaagctgagcaaggcataagagatgagcaaaaaacgactgaggaagttgaatggagctttcaatagtttgttgtggtggtgttctggccctagtgaagagccacaccatagagtgaggacaaatcagaggcctacctatctttgtagtgtctgaaactcagtctcaagtcagctcagtcccaattggattgcatcagtctgctcctacagagactgttaaaaaaaataaaaattaaatcctttctggaggaaggtaacatcatctggaggctctacgttttttccgtatacatatgcatatgataactcacaatgtcttacatacaataaaaaattactaagcatacaaaaagatcaagagaagaaaattgacaagagaaacagattgatagattgttcagactttggagttaaaagcaggggctttaaaatactgtattcggttcatgaaaatagatgctgaggtggagaatttcactagagaactggcatctgcaggaaggagtcaaatggaaattctagagctgaaaaatatagtaactaaaactaagagcacaacagatgggtttaactgcagattagacacagctgaaaagaggatttgtgaactggaggatacgttagtagaaaacattaggcataaactcgactttaaactgagctaaggaatagaaacttttcaatatctcaccaaagtatgtctcttattttagagcatgtgggtgaaaagagtccttattaaagtgcagtcgcaactcttgctattttaatgtgtatttagtattttttggtatttttattttagtggatttttaaaaaattattaaaaaacattatttaagagagcatcttattctgtcactcaggctggagtgcagtggcacatttgtagctcactgcagcctcaaattcatgggctcaaagtgatcctcccaccccagtctcctgagtagctgggcatacaggcagatgccaccatgcctggctaattttctttgtttttttcagtagagacaaattctcgctgttttccaggctggtcttaacctcctgaccccaagagatcctcctgccttggcctcccaatatgccaggattacaagcatgagctactatg

SEQ ID NO: 70898 - DNA, 1533 bp, Homo sapiens
tgagttttcatagttcctacgacttccctttgttcctctcagctctggtattgacagttgctttttgcatttactatgtctgtgatacatgtctgtcctcctttttgccttttcagttctccaattttcctggttagcaacttttattaaattgtctgttaaaattacaggtgtagtttctgtctcttgactgaaccctgcctaatacactggtcagaatactaggcctttgccagccaaagtccaggagatcacattaatagctactgagcctctgcaatgtgcagagcctttccctgttcttggtatcctgttggatgtcttctgtggtcccagagctgcctgggtatacgtcattatcacactgcattgttgtctgcttttctgtagtgtttctcatcttgaggccagtgctgatgtcttttgtctctctgtccttagttcctaacacaggattcatataaactaggtgagtcatgataaaattacctgatgaagggagggatcttattttgataatttttggcatctaaaattcttcagaaaatgagatgtttaaaccaaatcttaacctggtatcaaagattatgtgataccctccagaagtcacctacctgaggcttgattaggtttttctagttcagttgttaatgagattgaatatgcctcattctcactggcatatcttaccagctcttgtaaaactgttccagggaagaatgtaaatccatctatcaagatacctttcaaatgatcaggcctcttcccgtcaacccttccacctccattacgcttgtagagtgaaccctgtttccttcaatgtactttcttcgttagtacctaaacgtatgctggatacagggtcatgctgagagtttccaagacttctagatattttgattgcagtatgctttcctctccattatttagtggggtcaccttggcctgtataaatcccacttccagatcccttcccccatcatagtgcatgttataggctcttgtgtcatttctgtcttaataccttttagtgtaggttaccttcccctaagtataattaaacaaatctataattactatgtctgttcctgctttatttcctttatagtggagatttgttgactatagatagcttgaatgtctcggtttactttatagggatttttagaggaaaaagtaaatatttctttgaaatttctatgtacttatcaagggatatagataatttgttttctgtctttcagaattttgatggggatttggtttaaactttatctgctctttgagttttatagtataaatctttttaagaaattgtgtttatttttgtttactcttgaattttaatacatcatagtatgctaattaatatagtgtttgtctccaaatgccaaaatgttatgaaattgtgaaaattgtttagctatattctttttcttgggaatatgataggaattgctacctacttgaaattaggcatggccatgtgacctgatttagccaatgaaatctgagcaaaagtaatgtgtaata

SEQ ID NO: 70899 - DNA, 1156 bp, Homo sapiens
aaagtgtcaaaatacttcattttctagtgaatattagacgaaaatgtggaacacttcaacaattggaatattaaaaggaggatatttcctacttagatttattttacttattagggaactgaaaatgccgtctaagaatgaggggcaacaagattggcctgtgctcaaattttaggaggcacggtgcccagagagggctccagagctcttttgctggctgcctcttctggagcagctgactggccagctgcagagcacattgatctggtcatgattgctttcatcctggagtagagcaagttcacacaatttaaatcaagagccacattagaagctcctgacctcaggataacctctcatttcctacctttgaaagagggaacaagagggaacagttcagtcacttcctaacatctagccacaaaaatacatgggaagatatagccacatctaaagattgtgatctcctgattttctttataacttaggtagattcagaataccatcttccagttttcccttggaatacaaggaacattagtcttaatctactgttctgtgttgaatagagaaataattccttcccttccacacactcttttttttttcctattgaacttttcctaggccattcatatagatgcagcctagatgaaatagacttggactgttcgtaaactcacccttttcttgaaatatcatactgcagtgtgacatttcttacctgtgttatatggcagaccagtgttttttgatgtatacgtttttaaatgcatgctttcttttggtaaatttaggcctcccattattctctgaatatccctaccagtcactataagggatttttttttttttttttaagtagagatgaggacttgctgtgttgtccaggctggtcttgaactctgggctcaagtgatcctcctgctttggcctcccaaagtgctgggattataggaatgagccactgtgcccagctcattaatataaaagttttactgaagtttattttctagagatttcaactttgcttctgctgtgactcacatgccaggataggtaatctcacatatggaacactgtaagttactggattgataagagggactgagaattgtgagcagttctcacttcttaagttgtaattgtactcttt

SEQ ID NO: 70900 - DNA, 1282 bp, Homo sapiens
taatgaagcaaagagagaatctaggctcataaagccatcctttggttaactagaatccatttaattcacctaatggaaaattcagatagcccaaacaatattctgtttgtcagaattctggttaattcaaatattactgttttaaaatgcttttctatatcctcataggaaatctttcaacattttttaaaggctatcatttgtaatgtatatgcatattttaccctctttttcttcactttgtgttaatttctttattttttctatttataatatactgaggtttcctaaataagtaaaattagaagaatagagagttctgcaaataaaaatgaaaacctctgaaaaaaagtggctgtggagtattttttttcagttgattattcaggtacaccttttcttactgttttggtgaaaatctacaatttggcctttaccttagatcttataaagatgatagagtatgcttggaaattggctcattgttatgctcccttcctgttaggattggtatgtgaacaatttctaattttccacttagcaagtaatgtgatggaggattagagtgcctcccacccctcaccaaatcacaaaaaaagcttttctgaagataatggtagttttatagttttgagatcaattgattcggccctaggaagactctattttgaggccttttcaatatctttgaaattaactggccatataagagggagatttttttccttcacagctcttcttcccccaaagaaaacctttaccagaagattgaagaatgctggcatttttaatatgttgccaagtcttctactgttgccatggaaagttggccactacttagtagaatttgtcttataaaggctttaatagtgttagtttttaaaagatgttataactattattgtcataaattacagaatgacaaaatagcatttgtccagttcagatgcctcttggagagaaagactagaaagttgtacacacacacacacacacacacaaacacacactcactcacacactgtctctctctctccgtcccccctctttttaacatgataagcaaattcatatttaccttgtgccaagtatgctaagaacattcttaatgaaacctacatgaatatttagaaagtaggtgattttgtgagatttgcagtttaaaaacataagaggcaatacataatactatttgatcatgattgaaaaatatgtcatgtaataattcagttatttttgaagggaaatgaaatttcattctttttctttttattttttttga

SEQ ID NO: 70901 - DNA, 1027 bp, Homo sapiens
aagtgaaggcaaagtgattaaaactttctacctgggtgcagtggctcacgtctgtaatcccagcactttgggaggctgaggtgggcagatcacctgagcccaggtgtttaagacaagcctgggcaacatggcaaaatgccatctctttaaaaagtgttttaaaaaattggccagctgtggtggcacatgcctgtagtcctggctactcctctggaaggtaaagtctgcagtgagctgtgattgtgccgctgctccccagccagcgtgacagagttagagaccctatctcaaaacaaagcaaaaaccaagaaaccttcctgtcgttccatcttatttttccctccctttttttttgttctacttggagcgttttagttttaccgggagttggcagttttcttaattttatgtataattgtcttttgtttcaattattttatgttttttcctttagtggatgtttttgtctgactcttttagcttgtttcttatcagtgatactgtttcctatctgtatggtctcagttattagttttagaaaattatttttaaaatgtgagaatgtataatcatataaaaaatgtacaatgtacgttctctaacacagtggttactattttcaaatattatcttggcttttctccaatatgttttgtatttttgtttaagatcctttttatgttttttttaaggtaccaaataattgtggctgttacttttagtgtttgcaaaagatgcttaaccatttcatgttgtttgataattattacttctcatttttcattattttgttttaaaaataatttcaacttttatttttgattcagggcatacaagtgcaggttcgttacatgggtatattgcgtgatgctgaggtctggggtatggatgagcctgtcactctggtagtgagcatagtatgtgataggtagtttttcagcccatgcccccatttgccaaccccttctagtcatctccagtgtctgttgttaacatctttttttgttttttgagacagagtctcact

SEQ ID NO: 70902 - DNA, 1525 bp, Homo sapiens
cgaggaggcggcggtcgcggcgcctgcagctccttggagacgctggcgctgtgcgcgggtggggagcgcggaggaggaggaggagcccgcgcgtgggagcgggtagagacaaagatcagggcagcctcctgctggcgggtcacaccccggagtgttggtcaagagcggaggtagagggaaggtgggaaacccagcaaaccgatggggaggggaaaatggggggaggagggtgcctagtgctgtctccgtcgcagttgcttttctcagcatttttgtgcccgatgctatgcccgatgcttttgctccccaactcagctggatagctccagattccctccctcctgtcacccccacactgccacattgactctcctgtggtttttccctcgttctccccctacttttcacccactccttttcgggtaagcagtattttgctttcagcttggggaacatttgttaatgacaggatgtctgagcttgttctgaccctgaactgccttgaacttctctctcttcctcccaccctttccttttctgggatctataatgtcacatggccgttaacaattagcttttcttttgcaaaagtggcaaaaagcgtttagctgaaatctgtggctctcgcctcctttacatgaatatgtccaccaaagacacctcgttggtcatgttctatcacctcttcgtcaaattgacatcaggtcctaacaggtcactttcaagatacagaagaggcaaattttgttttgagacttggccattcctagggtcagcaaagtgtattcctggcagccagaccttcagtcacttatcaggaaatgcttgacctaaagacagacaattctttccccaaactttgctgtttcttttttgagtctttgttgaaagatttcttttaaaaggcgttcgtgtgagaagatcacagcaacaaatctggcttgttctgttttagacttactttcttaactcttgggcagaagaaaatgaatgagatttgaagacctttgataccttgggtagacaaagcttgccttgaaactagaaataagacgaaactagattttaaggggaaaaaatttgctagtggtaatataattggttttgtttcatttttttatgagtctgaggagttgacattaaacgttgggatgttgctttgttaatgaagtcatttcaatttttgcaactcttaacatctgcatgcttccataaacagtgggttggaacaaaagaaaatgtgactaagggatattccttaaattcttttttatgttatgagagagaatattggaatataaagaatgttactttatctggtaaaccatctcataggccagaagcactaacagtttgaatggttggcttaaaaaaaaacgggagtctttgaatttaagcttatgtaaaattactatgcaaatataggttattatttatttttacagtgaaaataaaacactattgaagtataaatggaaagaaaataaaagcaaagcctgtttaatatagagacattaatgttgat

SEQ ID NO: 70903 - DNA, 1028 bp, Homo sapiens
ttaaacttgaatgaattaaaattaaacgaaattaaaaattcagttgcactaatcacatttcaaaagcttggtagctgcaggtttctagtggctatagggaacgataatgaacagcacaaatatatagcacgtttccatcatcacagcaagctttactggataatactgcatcaaattatcaagctttgacttgcataagaaaaatattttttcttttcagttgagttcttttccatgttacatttttattacattcagttttcagaaaaaatatgcagtaaaatctgaaattacacattttttttttcactgtgctacttgcagcctattgaagacaaaggagaattcagtgttccaagctgttatgggaatattaaaaatgacaacggtggttctagtcttacctttgagcatcctttggatgatgtaaatgtggttgatttgaaatggatccacgactttgtattaaaatctctggaagttttatatcaagtggaaaaatgggaaacactagtatctcttgccattcagttcaatacagtttcacagtaagtactgctgtaagggcaattaaaagtagaagacttcattgaaaaaaaaaaaagtcttttaactaatgttttctttttaatgtattctttacccctgtctagtgagaggtatacagaacaagtgacaccacttctggtgtatgcacagcgccagcttctgctgagaatacagaagttcaagggcccagatattacccaacaaccttgtgcaaggtatgaggctgaatatggagagaaggtaagtttaagttagttctattattcatgctgttgtgatttctaattagtccacatataaaatacaaagatttagaagtcagataaatcttattatttctgctttagtatttccacttactggcatttatcattcaaatcaacaaacattattgagagcctgcagtcaaggcaaacaggaactaagtccctgtccacaagaagttcatatcaggccaagactaacttagccataaagca

SEQ ID NO: 70904 - DNA, 1037 bp, Homo sapiens
aggtttttcttattctgtgaagaatctcaatggtagttcaataggaatagcagtgaatctctaaattgctttgggcaatatgactgttttaatgatattgattcttcctatccatgaacatggaatgtttttccatttgtttgtgtcatctctgatttctttgagcagtggtttgtggttcttttagagacctttcacttccatatttagctgtattcctaaatattttattctttttgtaaaatgcatttttaaaaagttcaatctgtaagttagataagagaaataaaaggaaaagagatattgataggcaaaaacaaagatggaaaaaggttgttttgcacatttttttcttctttttatcttatttatgaatgcttttggtatttggccttttgctattttccttattctgtttcaagtcccataatagcttccatttccataatcaatatagattattctattagttttactatggttaagttgtagaccttttaactagagcacaggagaagatttgggaatgtcatgacttctttgcttttaactgataagccctggattagtcagttctcatgctgctcataaagacatacctgggactggataatttataaacaaaaagaggtttaatgaattcacagttccagatggctggagaggccacacaatcacggaagaaggcaaaggaggagcaaaggcacatcttacatggcggcaagctggagagcatgtgcaggggaactgccctttataaaccatcagatatcgtgagacttattcactatcatgagaacaacatgggaaaatccaccccgatgattcagttacctcccactgggtccctcccaccacatgtggggattatggaagctacaattcaagatgagatttgggtggggatacagccaaaccatatcattctgcccctgacccctcccaaatctcatgtcctcacatttcaaaaccaatcatgccttcccaacagtcccccaaagttttaacttatttcagaattaactcaaaagtccaca

SEQ ID NO: 70905 - DNA, 1032 bp, Homo sapiens
gctgctgccataaacaataatagttaacagctagcacctgcttttgtgagactgcaagaaatccagtggggctaacagcaaaggaaaaggcaaaagctgaggttagaaaggttggcagaaattagataataaactctcttagagggaaggatagagatctagttttatctggagaactgaggggagctagttaaaaggatttaaagaaagaaagtgaaatgatcacattggcattcttttcacttgatcttagcccaaaggccgagaagtgttatatttgcgtgtttttgaaaacctttgtcagctgcgtgggaaacagattgaaaggagaccaaatggaagtaggagagtggccactgctttcttgtgtcttaaagtagagatgatgaaagcctggacttgggtggtcagcatagaggaggggacagatgtgaaggagagacagaggatgtccacaggactgtgatccacactggctggaggtggcggatgggtgaggaagggaggagttcaagtcgccttggtttctggcttgggtagccagatggatgatgatgccttcacccagacaggaaaactggagaggggcaggttagaggaaaaggtcgctttggaattacttgcttggatttagttcatccaaacttggatgacaatgagtagagctatccagtgtatggttggatatactaatgcggcactcaggagagagcagattggagatttgtattttagtcatcaatgtattggtggtggttgaagtcaagggtttggatgaggtcacccagggagagttacatggagcataaacttgaggatggcgtcctggatagcaccaacatttaggaagctgcgtcagtcaaaataggcttcagctatacagcagtaacaaacaagtgtcattgctttaacacaatggaaagtctgtttcctgtgcatgctactgtgttcagtgaggttgaatcctgggctgctcatcatggtggaatctccagcttggtgcaagcttccgtgggttgtttccaagtcaga

SEQ ID NO: 70906 - DNA, 1036 bp, Homo sapiens
acaagttatttccctaggcgtcacttccttatctataaattggtgaaagctatttctccgataggattacattagaagcaatatttaacacatttagtatagtgccagtacaatgccagtggtaagcattcaatacattgtggtcatctttatttttccagccttaaaataatgtgaaatgaatcatttgttcatttgacctttaacaactcccttcattagtaactcttacttagcctatctaaatgtttgtaaatttcaaagagtaaatgaccattttaatatgtatctttttttggtaagtatttgtggcagataatatatatattcttgatattatttctcaaccatcctttttaaattaaactatttattttgagataattgtagagattcacatgcagtcacaagaaataatacagttactgtgtatcctttactcagtttcttccaatggtaacatcttgcaaaactgctgcatatcacacccaaatattgacagtgatacaatcaggatagagaacatttccatcacagcaaggatcccctctgttgtcctttagtaattccaccccctccttaactcctggcaaccaccaatctgttctccatattggcagttttgtcatttcaagaatgttgcataaaaggaattttatagtatgtaacattttgagattggcctttttcattcagctaaattctgtggagagccattaaactatccttttgatgaacaaaaaaaaattaagaatattatcacattttattttggcaacagaattatcattagcccaaagtgctttgtgcggtatctagcacacagtaaatagtgaatgttcagtggcactcagcgaaagtgctcctcttctgcctactactacccttcctcctttttcctcttctctccttcctactacttttttcttgccctttgcttctctacatcatcttattaatattaactgacaaaggctaattgtttgagttagaaatactaaaaagagttaaatgaaataatttatgtgcaatttct

SEQ ID NO: 70907 - DNA, 1062 bp, Homo sapiens
gtaggcgcagtcatgcaggaaaacctcagatttgcttcatcaggagatgatattaaaatatgggatgcttcatctatgacattggtggataaattcaacccacacacatcaccacatggaatcagctcaatatgttggagcagcaatagtatcctttaaaaaaaaaaaacacacacacacacacacaaaccgcttattaggttaaacaaccactgtcaatgaaacttttgcatgtgcctcatactgagtaatgtgttttgcattgctaccaaggatagataacgtaaaatagtaatttacaaaacaatatatcatatgaatgcactctgattttatctgttgcgttcatttaaaaaaaatttagttacaacccacttcatttgaaaacactgctattaaaaaaagtatattctgtctacaccatagaattagttatcaaaaatttcttattgaaccaaatggaataaggttggtagttgtggaaataattccaaaaggttttggaatgagtttttgcatctacatttgggtatttgtggatctgaactgaaaattaaagacagaacttgaaggcagaagcaagttggggaggagataaaaaattgcccaatatctccatcttactaatgtactctccatatcttccttcctctctgtgtgtgtgatgaaaattacatttcctaaacagacatagtaaagttacctagattgaacttttctaagctttttatgtttctgattgacaccttccctgtcttggtgagctcctcaatgtggataaaataaaatgagggagtgaagactgtaaactagggtttctgaaccctgtgctattgactttttggggcagaaaatttgttgtggacctttcctgtatgttgtaccacgtggaggtttattggtcttcacccgttaggtaccaatagcctctagttgtgacaacccaaaacgtttccagaattgcctgaatcactcccagtagagaaccactgctgtgaccacagtgctcctatcaccttttatgtgaaaatgttttatgtaattggtatgttagaaattttc

SEQ ID NO: 70908 - DNA, 1072 bp, Homo sapiens
atctgatttttatcaacaccaaagtattctactttctgataaaaaaatcaaagctttaaaatgtgactggttcaggaacaaaaatattaaaagttttatatgacttactattcttgcatgtatataacaagaaggacaaattttcttactgaattaaatttacctccttatcattccttgattttgcagtaaaacaaattactttggtactctgttaatcaaactcatggtgaagtgactacatttttgaaggactttccagatgtgtaatagggaaaatattttaaagagagcgacaagtatatgaagttgctgttctctatttttagattttcattatgtttagagcttaattttccctcttactatataagagaaaggtagcaatttgtagtaagattattttttggttgacttttgttttaagttttactaggagttggcatttactgatgtgctacttaatagtctaacaacaaaactgatgtagctatgagatagtgttgtatgacttttggaaattggtcttacagttttcttgcatgagcagatgtgcactgaaagccttcatacagtcttattcttaataaggctttgatcacttccatggaggttaattactgaagaacaaggagttcccagccttagcaacttggggtccacatagtatagattccaagaatggggttaatgtgagacaccagagagattagttttttgtttcttgtcctttaacttacgttcctcactttctcatgatttctaaaactacaagagaaataaaaaagaactagattacccacccacattatgtttcagtccttttttttctatattctaaggagaaaagtagtggtaaacaggaagaagtcaaggaaagggaaatggtttttctcgctatggtaatatctaggtaggaatgatttgatttgcatcatgtatcataataaaattacagtctatgctctgtttacaaaatacctgaaagttatacagaacattcaaaagttaatgcagttagggattctgagtgtctaattaacctttctccattgcttttactcacagattt

SEQ ID NO: 70909 - DNA, 1065 bp, Homo sapiens
tttataatcgcaattcttataatagtctagtgctatagatgttcatggattgtttgatgctccataactcctcatttagataactttttagtaacagcatcttccagtggcgacaaaatagttgtctcaagttgcaaatgtaaacctgttccacttttagagcttgctgaaggggtaagtgattttttttttttttaaacttttaaaaatcttagttttgcttgactggcaattgcttattgtggtgcttgcgactaaatataaaggtttttaaaagcattatttttaacttaagctcaaaataatatagtaacacttaaaaatgagatatgtgtacttactaaagtatttttaggtaaaatagttttgaatataggggaacaattgaagacttgaattttgttgactaggcacttcatttctccattttccctcagtgggagaggatctctgttgctgctattttaggacgatatcccacataggttactaggttgacctgagcatataaactctaatgacacagcactgctttactgatcttgggctcaggaccatcaggaacagactcacagctgatggtagctctctgcttcagattctgtccacctgtactgaggggcctgtctgagcctcccccatactctccttaaacaggttggctttgtcaaaatgagcttaggtcccagggcgtttaaatgaagctctcactacgtactgttgccttatccttttttttttttcttttgagatggagtctcgctctgttgcccaggctggagtgcaatggtgcaatcttagctcactgcaacctccgcctccccagttcaagcgattctcctgcctcagcctctcaagtggcagggattacaggtgcccaccaccacgcctggctaatttttgtatttttagtagagacggggtttcaccatgttggccaggctggtcttgaactcctgacctcatgatccgcccgcctcagcctcccaaagtgctgggattacaggcatgagccaccacacccagcctatccttttgttttataagttaatccctctgattaag

SEQ ID NO: 70910 - DNA, 1059 bp, Homo sapiens
atggaacaatttactgagagcccagtaagccattcttcttttctactatacacaccagtaaagagctcagcttcagcagatcaccatccgtatttctttattagcttcctaaggatcaagcatgtgaactgtgttcctcttagctttttggccaagactgtacaactaagaacaaagtaacagctgctcccctgtgaaaggtcatagtcctcatgaggcctaagcaggtcaataaatggaaagtggatacttaggccctcctcaaccatgaggccagagcccctgtttgtggcgtaatagacagttctgctacattcactgtcagagtaataattaaagaaataggtgctgcttctataagatgcagaatgtacctattggaagtgaatagaaaagtaagatggaatgtttagcagttctctatatgccattttattagaaatgtctctaagtcaaattctgaaattatgctttaaacaaatatttgggatatgtgtgctctttgaccagtttgaagtgttaataactctggttttggtatatagttacttatataagctaatatacctgtacacactaacatttctacacatactttgttctcctttccaaaggctagtgaaaactttagtggctgacactcctctaactgcggtagatttcatgcctgatggagccactttggctattggatcttcccgggggaaaatatatcaatatgatttaagaatgttgaaatcaccagttaagaccatcagtgctcacaagacatctgtgcagtgtatagcatttcagtactccactgttcttactaaggtgagacattttcttttcagcattttttattttattaaataaatctaactcagaatatggaaattatatgtggtcaattaaacagtatagttttgtttcataattacataatgattttacatgtaatgtataataattttagtacaaagccatttgatatttagttttaaaactttttttcttttttttttctccttatatatctctctttttaaaagtattttaaaagacattttaatttag

SEQ ID NO: 70911 - DNA, 2136 bp, Homo sapiens
acagtttcatatgcaactggtatgtatggcaaattttattttaatattttaaatgaaagtagagttgtgtgaatttttaaaaatccatgaaaggtaatatattttagttgttttgtttagtttctaagataaatagggagttttatagactaaataagtaaaatagattttaactggtcacctcctttttaacctctgagatacttaagccttcttttttccatggctttcttcctgataagtaagcaaaaagcattttaaatgtgcaaatataaattttccaaatatactaatttcaccaacgatcttccatttatattaacaaactagtaagttgttaagtacaagaaatatcattcacctagttaattgaacatgagagaaatgatagctgaaagtatattaaacatagcctgccaaataaatgtgaaatatcaataatttaaaaagcattttcctgtttttctagaatgaaatgcattctttgctggaaagatactcagtgaatgaaggtttagtggctgaaattgaaagactacgagaagaaaacaaaagattacgggcccacttttgaaatttcagtgaataccttaatgttctgtaatttgggaagtttctggcaacacagaactacatagaatcagtattgttttcatggcctccagggaaaaaatgtttttcaagtaagagtaaaaggatgatgggattttataccaacaactgtttcatcttaaaaatatgtatatttttatattaaaaattgtacagtatgtcatctacccaataggaaagtcaacaggatctttattttttgaaagctttagccatccactaagtgccctttttcataagagaagaaaattgtgcataaaaattggttatgtttgttttttagtcatcttttttaacatatatttttgattgacaaattgcctttcaaatttttggggctagttgagatttaaagagtttgatatgccttctatttttatggagaaagtaattttaaaatggcaattggtgtttctaagccattgactaataaaacatagggttggctagtaattattttgttaacttgatgaagtcaagtatgactattatttattgtacatttgataagacaatttttggaattttgaattgcacaaattacatgatatcttttgcatttatgttactatattgtacttctgacaaatctttattcctgggtggtatttttaagatatctttacctataaaaaatgtttaaggttcataggactcgacaagagctatctggtgattttctcattagtaacatgcaacgttgtactgcaaaatttcaatcaacatgacaacttataatgagtggagatttcatattaggtactaaatattatagtattatttctattttctttttccaaataagaagcttggattattttattttgtggtctttatcattaactttaattctttctgtactgtgtataatatttttatattattggccttaccataaaattatttagaaaggttgtcaaaataagttatacctctttggcaatagatagatgtatacatctacctactatgatctacaattttaggttaagtgaagcttgggggggctactgacttggttaccttcttgtctcttgtcccaaagatttaaactgtgtacctttgtatagctcttctgccccattttgacttctgagatgaaagtatttactaaaattaaaaaaaaaaaaacaaaaaacaaacctttagctcactaactttatgggtttctgaagtgatggaaatttttaaggatatatttaataagcataaacttactaataattacttccaaaaataaaaacaggaatattacttttacccagtgtggtttatagcatacatttgtactgaagcatatagggatgttaatgtgatcttttcctgacagattatgaaagcattatgacttgtaacaagtttccttgtatatcactaacaggtttagaagacataaatattagtgtgttttgcctacatggtgtatttaaatctattaatattttcctgttgcttttttaaaaaaataaatacacataatgtatattaaaagaggtgggatgaaataattttagtaattatgtg

SEQ ID NO: 70912 - DNA, 1023 bp, Homo sapiens
tgatggttgtatccagagggttttattcttcaaggttgattggttgttctagcacaaaggctacttttcattcactcccctctcctgtggggggcagactgttgagtggagactatggaagaaaagaaagtgtggttgtccaccagggagataggcacagttcctctcaaaagtaatctcttaccttaaatggcatagaggtgaaggtaagaaaatctcttaccttaaatgccatagaggtgaaggatttggtgatcctagagcagcaaagatgggtcaaatgaaagtacagtccagtagcattatgtacactcatattgttgccacaataataaaaagtaaaaaaaaaaaatggagtgaatgaattgaatctccgttttctcttagttcatgctagctgagtccttgacaatgctaaactcttagaattatgaatgttcagtgcaagtgaagagttggaatgtgatataaaggcaaaagggattgttaaatttcctgtgtctcccctttttccaaagcaccatgaagaaacaggtgcatgacacggggctctttgatgactatgtaagtgcaattttcactcccgtattcaggttgccaacaatcgtttacagcaggacgggatcttaattcctaacaggtttgcatgtattcaaagactgactttgaatgtaatttatacaggttggagagatttggaggaacagagaatctgatgccaaatgtaagaataagctttatttggaaatgctcatccatctgtttagtactgactataaaaccacaatgagtttaaacaatgagatgtgcaaaaaagcaccttgtattcacaagcattttgtctagcatgtgatcaaataaacataatctactttgctgattgttgtcaggttaaaatgctgtaccaagtgtgggagggctttgaaaactgtaggtgggcagtttgctatcaaggctagagagagactctaaagaaaatgtttcacaaagataaggtattcattcaacaaccagttatttaat

SEQ ID NO: 70913 - DNA, 1705 bp, Homo sapiens
taaattgaccattgagggggttcccaagggttctccttcgttttgttatcaaacgttaggtttaggattcttgcgggtggtgggatccaaagccagagacggtttcaacaaaaatgcaagcgcgaatttgtcttgcgtctgaacgcactgttcaaattaaacaatttagacatgccccaactatgacactaagaagtgaatggtatagtacacttttgtcacaaattcaagggtaatttaagtgcccgattgtagaggtctggcttcccctgggtttctggaacaaaagaagcgttcgcgaggagaggggtaactccccgccctccccctcccaaagtaaatcaaatcaaggaatatgagtgcctgcagacaagcctcgcttcttttcttccccttcagggctagcgtttggggaaggcaaggctgcggctactcttggagcttcagtgtcccgggaggaagaaaggcccagccaagggtcctcacactggcgtggaattcggcgcgttcgtaggcgatcgaccccagagacgaaagctgcttctcaagctgggggagggagaggaaacggcgcacaaaagcagtacgacctgtcccttatcggcgtctaaggggaagggtggagaaaacgaaaacagaagcgggccgggagcctcggctcccgccccagcgccttttaaactgcgtttctacctcctctcgctcagcgcggcggctaatggaacccgcgcgagccgtctcgccaatcaccgccgcgcttcctcccgtcgcccgccaatggcggcgcgcgttcttggggcgtgggcgaagcaggctgctcgcctcctgcctgtagtgtgtgggctggggttggtgcgagcttccagcttggccgcagttggttcgtagttcggctctggggtcttttgtgtccgggtctggcttggctttgtgtccgcgagtttttgttccgctccgcagcgctcttcccgggcaggagccgtgaggctcggaggcggcagcgcggtccccggccaggagcaagcgcgccggcgtgagcggcggcggcaaaggctgtggggagggggcttcgcagatccccgagatgccggagttcctggaagacccctcggtcctgacaaaagacaagttgaagagtgagttggtcgccaacaatgtgacgctgccggccggggagcagcgcaaagacgtgtacgtccagctctacctgcagcacctcacggctcgcaaccggccgccgctccccgccggcaccaacagcaaggggcccccggacttctccagtgacgaagagcgcgagcccaccccggtcctcggctctggggccgccgccgcgggccggagccgagcagccgtcggcagggtaaggacgcggggccggggctacaaaggcgggcgtttggcggttgccgcgcgcgctcgccgccgtttgcagcccctccctcccgggcgccccctcgggcctcccaggtgcggggctgtccctgcgccccctcgcgtcgccccttccccgcggggctgcaggcgccggagcggagaggccagaagttggggccgcggggttcgcgttctttgacgtgtgggtctgggaggtgtggagttgcgttggcggcggttgttttgcacgcagtcgacgccgcttccctggaccaccagccgcctgcagcgggcgtttagacggggacttccgtgccctttcgaaagc

SEQ ID NO: 70914 - DNA, 1026 bp, Homo sapiens
acttttgcgtgtggagggctttttgaaccgtttatgttttctagtttgttttaatttttcccagcaacaggccatcttttggcggaacaggttcatgccgaattaaaaggagcattttaaactatatttttaggcgcctattataattttttagtttttatttatttatttttttagatggagtgtcgcacttgttgcccaggctggagtgcaatggcgagatctcggctcaccgcaacctccacctcccgggttcaagcgattctcctgcctcagcctcccgagtagctgggattacaggcatgcgccgccacgcccggctgatttgtgtattttttagtagagacggggtttctccaagttggtcaggctggtctcgaactcctgacctcaggtggtcctcccgcctcggcctcacaaagtgctgggataacaggcgtgagccaccgggcccggccctgcaaacaaatatttgaaaattgcagtttggattgcgttttccccacatattggtaaattttgcttgaggaaacgaaagacttaggattcaggaaaaatttatttcatgacattctggtgcatcagtattgcaatttggaatgtctgatcctggttaaatctcaaatcggctccagcaaagcatgttttgtttcagaatagtttgcttttttacctgtggattttaatatgctttttgtgggtttgcttatgcctgccgagttaccaggcttcaaatcgtaataggatgaagctaaaactagtaattggtgtaacataaaatgccttgtaagagacagtgaatgtggtgtttggagttgttgggaatgatcactagtttaaaccgaaattattccttccttcaaattttactttagtttttaaggaacctgtctaatgtgttttcccggctactcaggcagaaatgaaagacaaatgtaatagacacatgtaaatttaattgaaaatcttattctcggcttcagagaagttgaaagttttaccaaacgtcttcagtccggtgtctgg

SEQ ID NO: 70915 - DNA, 1039 bp, Homo sapiens
aggtgggaggatcgcttcagcctgggaggtgggggttgcagtgaactgagatggagccactgtactccagcccgggtgacatagctagaccctgtatcattaaaaaaaaaaaaaaaaaggttatttaaaagaaaatgttacccaaagtcagttttacttttagttgctcttttgcatttttgatgccattactatctcttttagataggtaatccaaaatggactattttaacaacaatgtctttaagttacttgcttggctgtgcggtttgtatgattacagttcaacttagaaagtgttctccaataatgagttgctcttaatttaatggaattgctaaggcctaatattactataaaccaatttggtagtgagtttgcatgtttatgttatacaggttattatctagtaagtgaacactttaattcatatggaaatgattactggactttgtttacagaaagccacaaaaaaaactgataaacccagacaagaagataaagatgatctagatgtaacagagctcactaatgaagatcttttggatcagcttgtgaaatacggagtgaatcctggtcctattgtgggtaagttgataaaatttcaaatacagtatcttttctctgaagcaggaccccaaattattttctcctttttgtttagcagtttaggttccaaggactggtttgtcattaatcatttgttatcagcagaacctgtgtttctttgactgtaaatgagtgaaataaaatgagaggattgaattagataatctccaaaattacctctattgttgagattgttttatatggtgcttatatcgtactttttttttttttttttggttttgttttgttttttgtttttttgagacggagtcttgctctgtcgcccaggctgtagtgcagtgacgcgatctcggctccctgcaagctctgcctcccgggttcatgccattctcctgcctcagcctcctgagtagctgggactacaggcgcccgctgccacgcctggctaattttttgtatttttcagtag

SEQ ID NO: 70916 - DNA, 5501 bp, Homo sapiens
catcagccaccacgtcctttttttttttttttttttttttaagacagcatcttacttcctctcccagctggacagtggtgcgatctcagctcactgcaacctctgccttccaatttcaagtgattctcctgtctcagcctcccaagtagctgggatcacaggcgtgtgccaccatgcccggctaatttttgtatttttagtagagatagtttccctgtgttggccaggctggtctcgaactcctgacctcaagtaatgtacccgcctcagcctcccaaagtggtgggtttacagtcgtgagccactatgtctggccgcattatatggtatttttttttttaagaacttgagtttagaaaaataaagggtgaaaatagcttaaaatgttgctgaagatagtgtctgagctgcatcctaaatgaaacaatacaggtactaaagcaagttctgccttaatccaggaacaaccaggaagctatatgagaaaaagcttttgaaactgagggaacaaggaacagaatcaagatcttctactcctctgccaacaatttcttcttcagcagaaaatacaaggcagaatggaagtaatgattctgacagatacagtgacaatgaagaaggtaaaattttaaatgatgttaatcaaatgtatggaattttttcacactcaaaattcagtgaccatgaagaaagtaaaatttaaaacaatattggcaagatacacaaattttattcgtgtcattagagtaattctgtaatttgatttaaatactttttattgaaaattctaagaagcaacatagtacaaattcataattttccatcacctgaaattgcaagttaactttgtcttttttgctacaaatctcatttttctgagagaataaagtattacaagtaaaggcaaagtttctcgtacttacctgtacctatcacctccacagaagtaactactattattaattcaatgcctgtctttcaagttttatatttcacatacacatctgtctaatacatggtattattttatactttaagaataaaaaatttatataaacagtatgctaaatcttatcacttgctttttcttactccattatttttgaaatctaatcctgttaattacatatctgtttattcttcataattaatacatagtggtagcatttaaatatggcatattttctctgttctctattgataggcatttaaattgttcgcagtttttgttaatctgacctcagggcaactttaaagcaaatattttgactatatttttagtagactgtatagtatcttaaaatttgatcatgatgtttaaatattttttaaggatagtatgtgaaataaatgtcctttaaaaattataaatacaacttgatttttgtaaacttttaattaatatgacttgtgattatttattttgatccagattgtttatatctcaataagctttgtctaccagggcaaatctggcagattagttcagaatatgaaattatagtcttttcctttgacagcactatttttagcaaagaggcaaagaataaaatcagctcaaacacaggtaatgcttaaacttcctgcctcttttgcctctacaggaaagaagaaagaacacaagaaagtgaagtccactagggatattgttcctttttctgaacttggaactactccctctggtggtggattttttcagggtatttcttttcctgaaatctccacccgtcctcctttgggcagtaccgaactacaggcagctaagaaagtacatacttctaagggagacctacctagggagcctcttgttgccacaaacttgcctggcaggggacagttgcagaagttagcctctgaaaggaatttgtttatttcatgcaagtctagccatgataggtgtttagagaaaagttcttcgtcatcttctcagcctgaacacagtgccatgttggtctctactgcagcttctccttcactgattaaagaaaccaccactggttactataaagacatagtagaaaatatttgcggtagagagaaaagtggaattcaaccattatgtcctgagaggtcccatatttcagatcaatcgcctctctccagtaaaaggaaagcactagaagagtctgagagctcacaactaatttctccgccacttgcccaggcaatcagagattatgtcaattctctgttggtccagggtggggtaggtagtttgcctggaacttctaactctatgcccccactggatgtagaaaacatacagaagagaattgatcagtctaagtttcaagaaactgaattcctgtctcctccaagaaaagtccctagactgagtgagaagtcagtggaggaaagggattcaggttcctttgtggcatttcagaacatacctggatccgaactgatgtcttcttttgccaaaactgttgtctctcattcactcactaccttaggtctagaagtggctaagcaatcacagcatgataaaatagatgcctcagaactatcttttcccttccatgaatctattttaaaagtaattgaagaagaatggcagcaagttgacaggcagctgccttcactggcatgcaaatatccagtttcttccagggaggcaacacagatattatcagttccaaaagtagatgatgaaatcctagggtttatttctgaagccactccactaggaggtattcaagcagcctccactgagtcttgcaatcagcagttggacttagcactctgtagagcatatgaagctgcagcatcagcattgcagattgcaactcacactgcctttgtagctaaggctatgcaggcagacattagtcaagctgcacagattcttagctcagatcctagtcgtacccaccaagcgcttgggattctgagcaaaacatatgatgcagcctcatatatttgtgaagctgcatttgatgaagtgaagatggctgcccataccatgggaaatgccactgtaggtcgtcgatacctctggctgaaggattgcaaaattaatttagcttctaagaataagctggcttccactccctttaaaggtggaacattatttggaggagaagtatgcaaagtaattaaaaagcgtggaaataaacactagtaaaattaaggacaaaaagacatctatcttatctttcaggtactttatgccaacattttcttttctgttaaggttgttttagtttccagatagggctaattacaaaatgttaagcttctacccatcaaattacagtataaaagtaattgcctgtgtagaactacttgtcttttctaaagatttgcgtagataggaagcctggtacaaacaatttaacgctttctagatcacatattagtctctaagttgttttctgtttcctgctttacttatgtttttacaattctccaaaactaagaaaattctaattaggatataaggagtatttactgttcaatagaataatatgcatcctcctttatacctaggacagaattaaacatttgttacacattcagaacagtgatgttgttctttttgatacttttatctcagtatcttttcacgttccataacttgtccatatttttgctcatattttcttacttttctttgttatttattcatgtctgcaacatcaatcatagtagtctagatcaatgcaactcaaagcaccagtctacaaactgttacttatccacaggcaagataagcatgcacaagaatttaaatctagagatactttttaggtcaatgacaggatttgattttttagcaaaattttattaatagctaaagcaatgtattgatttacactctgatgcaagtaatttatctcttcattgactggtagcaaccaattcatggaccagtaccatggaccacactttgagaaacacttctttggataataatagatatcctgggatagtgcatgttcaccatctattttgtcagataatggggccttttaaaaaataatactttgctttcatgatatattgtattttgtggaaagttaagtttagcaatatagactctaaaagcaaattaaatttttttaagccataagaaattatactatatcccagtatctgtatgtctgtataaagcagtgtattatcatgttttcatttctgtgattgtaagttaagagtcttaactgcagaggtattgtggaaagtagtagccttaagcataataaaatatggtctcttgggtactccctctggccattaccacattcttagattatatgtgtccatctttgcagctttctgagagtaattttatttgttgtcttctgaaatgtacatgtatacatgtacctactgagtgctatgtgatttttaaaaatgtattactgtagaatgcttctgcaaattcaataaagttgttaaatttgaacagtgttgtgtggtctccagaaacatgttgttctgtgtgctttattcttggagttgcaacaagttaaatatttgtatatgaacaccccttttccatttcatcattgaaactcactttgacatttcagtggtataattgaaaatattctgattatggtatggtttttcttctgtttgaggaccatgtttttattgactgttggaatctaaatttataagaggaattaatctgtaaccagataccttattcgtttaaccgatttctattccactactaatggttttttttactttgtgctttctagttcttagattctgagttaacaaagcataaaatagattttatattgctgggggttgtaccaaacatagatacattgacagatccattgatagaagtgttgggagatggacttgaaatcttagtcctaaataaagactgaactgtttaaactaacttgataaaaatcactgttcgtttttgggaacctgcaagtattaaatagattctgtactaactagtattaacactggaaagttagcaagacacatatagatgtcttgaccactttttcacacaagttcagagttcatgtaaaactttagaattgacttcctttctgtctcttcagtaagaaagtaatctaacttaaatttttggtagtagaagttttagaaataacaactgactaattttgctataccatgataaatgtctacaaaaagggatttttttttttttgaaatgaagtttcgctcttgtccccaaagctggagtgcaatggtgtgatctcagctcgctgcaacctccgcctcccaggttcaagcaattctcctgccttagcctcctgagtagctgggattacaggtgtctgccaccaaccctggctaatgtttgtatttttagtagagacggggtttcaccatgttggccaggatggtcttaagctgacctcaggtgatccgcccacctcggccttccaaagtgctgggattacaagcgtgagccaccatgccctgccagggatgttaactaaaatcagtcttttcaaaacctagatcttcaaatgatgatgaatttaagactagga

SEQ ID NO: 70917 - DNA, 1150 bp, Homo sapiens
acgagaagtgacctgtgattggtcgtatttttctgtgaacaagattccttctttacctgagttgtacctaggttttttataactacatcaaaaaagcttttatattgtacttattaatgttatggcagttacttatagaagcttggtactatatggatttttttcatttttaaactttcccttctatgttccaaattttaatttagtaagtcaacctttgctgtacagtagtagtatactgtatggacaaaacaatggtaacaattgtgttattttaaatggcctttttccacatctaaattgttcttactgaaaagctttcgtgggagcattttgaactcacttcatgttcaaagctatgagtcccagataaaggaaaggagaataggtaggaagaagtggttgtcagatgaaagggtaagggagataagcaaaaatgggataaataatgaaacagttttcaagacaaattgcagttaaacaattttggactagtgaggtattaccagtagacttgtttttcaccttttaatgtgcctaaaaccagggttcccgattaatattaggataacatcatcatttattgagtgtttcagagagtaatggtttctccaatgttatttccagactctaaaatagagctcaagcttgagaagagagaaccactaaagggcagagcaaagactccagtaacactcaagcaaagaagagttgagcacaatcaggtatctttagttttattaccaccgtgtacaggtataaataacctcctgacaacactaatccatgttttagcctttaatggttgacacccagattccagcacgctcaataaacttaattctgttgttaaatgatactaaaaatctaaactttgtgggttttgtcagtagtgtagcctgtgattacagcaaaagcaaatttttaatgtctcatttgtgtttgagtctgtgctagatgtagttcaaagccagttatatggtgttttgaaagaaatattttaaaaggtggaaatatctagacacttttgatacaatttctttaaaaggcaatggaagggttttatatttgtgtctttgtctctagatttctgactttgattttatgtttgcctgtcttgtcttctgcgattctttcctaaactcagaag

SEQ ID NO: 70918 - DNA, 1046 bp, Homo sapiens
tgattataaccatatgaaaataataatgtttatgctaacaattacaaaagtttgtatttttgttttaaaaggaaactgacttataatagatgacttttttctaagtcatgatcagtctgctttttgtttagacagagatgtagctccaatactagagccaaatagcacacagtgagtcaaaaagggaactggtgatagttgatgtgctttttttcccataatgtttataatttgtgagctactataggtggattctttagtgtattttagcactttttaagtgtttcctgatgcctaaatatcagttcaattaatacatttaggaatattttgaggacatagccttgtttgtaaatgctggcatttggagacttctatttcatggcttctcagtgtgccagtatggccgttattaaagtatttgatgttagaatatgactttttaatgtgttgatgcttgaatagagctattctcaagctggaataactgagactgaatggacaagtggatcttcaaaaggcggacctctgcaggcattaactagggaatctacaagagggtcaagaagaactccaaggaaaagggtgatgcaaggcttattccttgggttttcagatttgtagggttttagtattattttatatttattgtttttgttttgttttcaaactaacaggtggaaacttcagaacattttcgtatagatggtccagtaatttcagagagtactcccatagctgaaactataatggcttcaagcaacgaatccttagtaaatatgtttcataaactatacaagtggtattctttgtaaattaccctttaattggaaatggggaggtggtgaattttggcaaatctcaaatttacatgttttttttttttaacaattttaaactgattttccccatatagttctgaattttagaattttcctataatatccaatttatgtaaagaaatctaattcattgtacaagaaagtataaggatattttttgttaaaatatttgaagaatgaggcttcatatgtgaggcactaagt

SEQ ID NO: 70919 - DNA, 2070 bp, Homo sapiens
actggaaatttcaagcatgcatctcctattctgccaatcactgaattctcagacatacccagaagagcaccaaagaaaccattgacaagagctgaagtaaatgaatacaatttagatcgatgctatcattgatctttcaaagaggaaatataaatatttgtttgttttttttttttttttttggagtgggagggagcagagctttctttattgggtggtgtgtgtaaatatgcataaattattttaaggacacttttattagtgaaaacagaaattaactaatatagtttgacatgctaatactatcctcttgccactgtatccctcttaagttccagttttcaagggagtggtcatttctgttctgcttataatatgttctgtttgtcatggatgcaagtttgaaagtgctgctgggctatgagggaggctacactttcttttgttgacgggtcaaataagagactttaacataacttcatgtggtgctggaatgggttaactcctgtgtaattaagcttgaaagtactaactgcatggtgcattttaatttgaatgaatctttacaaaaggagccgaaacatttattattttgttctggacataaaggtaaacagtaaaacaagctaaacattatattttttttaatttgggcatattgcattgactataattttaaaacatatagtaaagtttgctaaaggttcatgttaagtatcttctgtattttatcttttactacagaattcttaataaatgaagaaacagtatacttttttttttttgaaacggagtcttgctctgttgcccaggctggagtgcagtggcacggtctcagctcactgcaacctccgcctcctgggttcaagcgattctcctgcctcagcctcctgagtagctgggattacgggtgcccgccaccacgcccagctaatttttgtatttttagtagagatgggatttcactatgttggtcaggctggtctcgaactcctgacctcaggtgatccacccgcctcagcctcccaaagtgctgggattacaggcgtgagccaccgtacccggcccaacaatatactcttaatagtaaaaaacaaaatcaatgagggaattagcattgccatgttagattactgaattttttccccccagttatttaaatgtgtggcagtttttcactccaataaccacatatataaggtatcttcaagaaatttgaagagagccttggaagcatgtggatacctaaataataatttagaaatggcagctgtaaaatctatgatagatttaaaggcattttgttctctaaaacttactatttatgttttaattattgcatgtttacactaaattttaacttgtggttgtttgtttgtctgtttcttattaggtgggagaaaaaacagaggaaagaagagtagaaagggatattcttaaggaaatgttcccctatgaagcatctacaccaacaggaattaggtattcagatacatttaaacaagtactagtgtattctagtagggaatctttatttttaattcttcatcacaaagttactgtacttctgctcagaattaagctgtttttttggagccaggtacaatggtacatgcctgtagtcccagctactcaagagactaaggcaggtggattgcttaagcccaggagttcgagaccagtctgggcaacataatgagactctgtctacccaccgacttttaaataaataagtgaacgaactgttcttttgggagcagtttaattcccctaagcccaccagtaaatattcttgaaagttgaatgagtttcaaaattgcgattggtaaatggaggattttaaataaatcacttacttactacttaaattcatatgttaaaatctaaacgaaaatctagtgagaaatagtttttcccccctaagtttctcttttctaattgaaaaggctgtgtttatgtatcttaatttttaactgaaagaaacacagccaaaactgttttgtttttcctctttactcctaaacatgagctttgaagagcctttaagaaggcaggtttagtgactattta

SEQ ID NO: 70920 - DNA, 1501 bp, Homo sapiens
catcgaactttttttttttttttgagacggagttttgctctgttgcccaggctggagtacagtggcgtgatctcggctcactacaacctccacctcctgggttcaagcgattctcctgcctcagcctcctgagtagctgggattacaggcacccaccatcatgcccggctaatttttgtatttttgtagagacagagtttcaccatgttggccaggctagtcttgaactcctgacctcaggtgatctgcccgccttggcctcccaaagtgctgggattgcaggcgcgagccaccatgcccagcccatctaacttttaaaatagaaaatatgtagaagttttaaataggttgactgacctcactgctttatatgtatcaattttctactgttacctcagggaatgtgcttggaattaggagtggcaatgacattttatgttatttctctaaatcatgcctttatctaaaattatttttcttttcctcctttcactcccaacagtgctagttgccgcagaccaatcaaaggggctgcaggccggccattagaactcagtgatttcaggatggaggagtctttttcatctaaatatgttcctaagtatgttcccttggcagatgtcaagtcagaaaagacaaaaaagggacgctccattcccgtatggataaaaattttgctgtttgttgttgtggcagtttttttgtttttggtctatcaagctatggaaaccaaccaagtaaatcccttctctaattttcttcatgttgaccctagaaaatccaactgaatggtatctctttggcacgttcaacttggtctcctattttcaataactgttgaaaaacatttgtgtacacttgttgactccaagaactaaaaataatgtgatttcgcctcaataaatgtagtatttcattgaaaagcaaacaaaatatatataaatggacttcattaaaatgtttttgaactttggactagtaggagatcactttgtgccatatgaataatcttttttagctctggaactttttgtaggctttatttttttaatgtgggcatcttatttcatttttgaaaaaatgtatatgttttttgtgtatttgggaaacgaagggtgaaacatggtagtataatgtgaagctacacatttaaatacttagaattcttacagaaaagattttaagaattattctctgctgaataaaaactgcaaatatgtgaaacataatgaaattcagtaagaggaaaagtaacttggttgtactttttgtaactgcaacaaagtttgatggtgtttatgaggaaaagtacagcaataatctcttctgtaacctttattaatagtaatgttgttgtagccctatcatactcactttttaagacacagtatcatgaaagtcctatttcagtaagacccatttacatacagtagatttttagcagagatcttttagtgtaacatacatattttagagaattgttggctagctgtacatgttt

SEQ ID NO: 70921 - DNA, 1020 bp, Homo sapiens
agctgggcgtgatgatgtgcgcctgtagtcctgtctactagggagactgaggcaggagaatcgtttgaacccaggaggcagaggttgcagtgagcagagattacgtcactgcactgtagcctggcgacagagcaagactccatctcaaaaaaaataaaaaagtacaaaaagtacttgcttttatattacatcataagcagtagttaataaagttgtatactcttaagaggtgggcattatgattattttttatttttttattttttatgagatggagtctcactcttgtcacccagactgtagtgcagtggcacgatctgggctcgatgcaacctctgcctcccaggttcaagcaattttcctgcctcggcagagacggggtttcaccatgttggccaggctggtctcgaacccctgacctcaagtgatcagcccacctcagcttcccaaagtgctgggattacaggtgtgatccactgcacccggccggcattatgattttgtgtactcttgaaatggttatctttgtggatgatttttttttttaagctgaaacttacctcatgaataacttgattaaagtagtaggtgattaaaatttcaatagaatcaaatgagacaaaaattttaaactgactcatttgagtttcaactttacagtcattgaccataaagcacactaaaaatgtaagttatttttaaatacatctgaaataaaaatacttactaaaaaggaagaagccgaagatgtatatttagaccagcacacaattttgatttcaattagccttattctaatatttagcttttagatctttcatacacattttcacgtactttgcaattgagaccagaaagacttgtaggtctttctgcagaatgagtgggtccttgcaaagtgagtgggaaacttactcctagatcagaaatgtttgcctctctgagtaaaatgtttctttcagatgagccatagagggggcaccttttactcaacttttctttgttttgaaactttgtttc

SEQ ID NO: 70922 - DNA, 1037 bp, Homo sapiens
aaaacatgtacttggtcttttgtgtgtgtctgttttattccattagaataaatgtgtccttgatgtaaatgcaaagcatttcttcctgattaaattgtagatgtagactttacaatataattcaataataaaaagtaattaacctctagttttgtcgttgcaataaatggttttcagatagcacaaactgtgatttctggataacatttcttatgtgatatttatggattattgtgttttatttcagtctgttcatatgttttacttcttattgtaatcgggttctcgtttattcaaaggtaagcaatgtgtagctactgtactcacagaatgacattaagcgctccaaggcacctctcccacacctagttcctttttcccaccacttttactgtctttagtatttacctatgacccttatgattgttagtcttgctttgagactaagcccgtgtcactgtgatacgtcatggagctgtgctcacaagatgaaagtgccattatgtcttcctcattcatgtgtccccagaggtgatttgacttaaattagtgtttctcaaggtagtatagacaccataattaattataaggcaaatcgcatcaaaggcttaaaacaacaagttttattgcatgcttaccatgtgctaggtacttttctatgtgcttaatatgtattgattcactcaatcctcacgataatcctatggagtaggcattttcgtaatatcattacaaatgaggaaactgatggttagaggtgttaggaagcttcttcatgtttgcacacagctgagaagtgatggctctggttgcatataatatggcagagggaacctaaaacaaacaattctctgtttacatgctttaaaccagttctgtgttcagccctgctcctttcacaactttggtggtgccttctgagtttcaaacctctgaagcgttcttttgggtaaagtagctcactcctagtttttcttgtttttgtttttgttttctttgagacaaggtctcacttaatctttctctgtggctattta

SEQ ID NO: 70923 - DNA, 2341 bp, Homo sapiens
tctcgtccgtggcgcacctggcgcgggcgaaccccttcaacacgccacatctgcagctggtgcacgatggtctcggggacctccgcagcagctccccagggcccacgggccagccccgccgccctcgcaacctggcagccgccgccgtggaaggtgagatcagaccctgcccaatacagtcgtgtggtctacttgtgggccgcccagcctttgaggcctggacccggcttggaggacagggaaggacgagtccagcccgctgcaccgtaggacggcgcccagttgcttgccctggggtatcggccttttccaccataggcgggtgtcagatccttggccttccctcaagggcgtggaagcgctgaggccctgtgtcccttcgtgacctccgtgtgcccgagggaagagaggccgtgactagctctttctccgccgtgagctcgcttggtcagcaaactaagtactgggtaaactctcctcccgaaactactgaccacccacagttctactaactatattacctgtcctttgatttgcccttagttttcttaaaaatagtcctttcctaagttttatatttgtcgacgccaggtcagtcatttttgcacttaattgtatatgagataactagatgtcctgttttcgtgcgactggaggaggcagcttgcagccctacataggcaatagaaaggagataattggtgggcgtccctttggtgtgattatctcttgggattcttggtggttgggcccagctttaacttagttgtgtgtgttttaaatcctagtgaagtatgtacatacagagaaacctgaaaaccgaattgtaggagtcctaagaatgttatctaccttgtgcctgtaaaatcgaaagatttttttctttaaatcattcatgtgcttctgttgtctttagtatggatagagtccttatttacactatctgtcgttcagtttaaaagttaaagctaacattatttgtgtattaaatgtatttgactgcaggaatttgtgcgtatccgtttttatgttacaggagttcttaagtggggatagtattggttagtggctgggataaactttgaagttgtttgcaagccttttacatgtcgagtgatctttctgagtttcgtttgtactctgaagtgtgctcttaccagtggttaataatttgaagtttgactttaattgtaaaagccgttaatgtagaaaacttttaaaaaaattaatatggcagaatacgagctattaatagtatcagatacagaaccctcataatttttaaatgatctgaatttggcagtgaatttttttttaagccacttaattgtggccaaagctattcagctgtgataatagtatctcacagggaaacattttctttcattccagtggccttagtcatctctgaagaaatacttacttgatttttttttttccaatcaaacagagcagtatagctgtgactatggatctggcagattctttatcctttgtggacttggaggaattattagctgtggcacaacacatacagcattggttcctctagatctggttaaatgcagaatgcaggtttgttttgcatgctggactagagcatattgaagcatgactgactgttaagttataagatatagtcatctaacaagctgtgtggaaacctaactgtccaggaggtaagtttatgaccagtaacatgagttttatattaaaatgcatggtgtgtcttctcttactacagagtacagttgtgaatttggctccgcgaagtattatgcactgtgtggctttggtggggtcttaagttgtggtctgacacacactgctgtggttcccctggatttagtgaaatgccgtatgcaggtttgtattgagatgacaacattgaaagtatctctcatgtgacttaactctaaataaaatcttaaatgagaatttgaagacatcacaactgctagaaacttcagtaggaaaccacatagaatttctttaaattgtgggctttattttgactagtgttttaaatccaataaatgcctctattgtttgagtaaattgttcacttttagagtctggctgtaaatggctctttgctgctgctcttcacttctggccggagttcttcaagcttactagtgccccaaatagtcatttaacaagcacctatgtgttggagtgggtaaacaagtctgtgtattatgtgaagtaacaatgtcctttatctactaataagaccaaggcaaagagtacatgtagatttatttaaagtgctcttaatatcttagtatgaaaattttgtcagattagcctcttgtttatttacacaacattttaaaat

SEQ ID NO: 70924 - DNA, 1021 bp, Homo sapiens
tttttttttttgagatggagtcttgctctgctgcccaggctggagtgtagtggtgccatcgtggctcactgcaacctccacctccctccctcaggctcaagcgattgttctgtctcaccctcaccctcccgagtagctgggattacaggtgcacgccaccatgcccgtccaattttttgtattttagtagagatggggtttcactgtgttgcccaggctggtcttgaactcctgagctcaggtaatccacctgcctcagcctcccaaagtgctgggattacagatgtgagccaccgtgcctggcaggaattactgtagttaccttttgtgtagttgctgaaatttattatggaacccaaacaaaaataatcatgagattaaatttttatgttagctgtttggtgcatttaattttttttttcttgttttaaataaaggtggacccccaaaagtacaagggcatatttaacggattctcagttacacttaaagaggatggtgttcgtggtttggctaaaggatgggctccgactttccttggctactccatgcagggactctgcaagtttggcttttatgaagtctttaaagtcttgtatagcaatatgcttggagaggtatgtaattaactttaaaattgaatgttccgagtgtttaagactttccgagtgttcttagatttttgtctgtcttgccttattttagcactgaagaaaatggtcctacaaagtgagcaacttgttttaaatcgtatgcctgtgtcagcagagacaggttgataaatgtatttcattaaattacaattctccttttaatatactatcttgttttctaagtaagttggattttgagttttttagagaagggctctgggactcctttgcgtagttccggggcatggcatctagatattttttgaatattcatgttgttcacatagttacgtgttttgttaatgaggttatgagaccacatatatattccatatcatcgtgtgttactttataaaatgtctgaagct

SEQ ID NO: 70925 - DNA, 1422 bp, Homo sapiens
ctcactgcaacctccgcctcccaggttcaagtgattgtcctgcctcagcctgctgaatagctgggattacaggcatgcaccaccacgcctggctaattttgtatttttagtagagactccatgttggtcaggctggtctcgaactcctgacctcaggtgatccacccgcctcggcctcccaaagtgctgggattacaggcgtgagacaccgcgtctggctgtgaacttcattttttagtattaagcctaccagactttttaaaaagactattataacatttaatgtctatttacctgtatgtagaacataaacttgagaggtaaagataagttaatacatggtttgagccctggactgagttttttttttttccctagagtaaggaccatttgtcggtctacaaatgacttgatgtttggcctaaacatttactattaacttttagggagggcttgttagtatccttgtgatctattcacagttaagaatttccatgaccacaacatgcttccttagatccacctttgtggatgaatcttgaactgagttccacttgtaaacttcttgtttcttgtggttccagtagtcaaagaaacatccagcaacttttttggttgtatagtcaaaggtgcttgagtcattggcatgtaagagaaatatacctgcatgttagtctaacgttctgatagaaatgacatgcatttatgctgccatttgttactatcaggactcgactcgtgtgcggacatttctgttaataatgacagtctctgatagatgagtgtatgcaactgtgtaaaacaagtctcttgatttcctagattctacaagggggttgctcctctctggatgagacagataccatacaccatgatgaagttcgcctgctttgaacgtactgttgaagcactgtacaagtttgtggttcctaagccccgcagtgaatgttcaaagccagagcagctggttgtaacatttgtagcaggttacataggtacgaattacttagaacacacttgtctgaaattatgaacaaataatcatttccattattggcgttttttgagagggaaaaatactccaaaggttataaagcagtgtttttgtttttttggtttccctgaggcatagtctcgctctgttgcccaggctggagtgcagtggcatgataatagctcactgcaacctcctcctcctgggttcaagtgattcttctgccgcagcctcccaagtagctgggacgggcatgcaccgccatgcccggctgatttttgtttttgttttttgtttttttttgagatggagttttacccttgttgcccaggctggagtgcagtggtgcaatcttggctcactgcagcctccgcctcctgggttcaagcgattctcctgtctcagcctcctgagtagctgggattgca

SEQ ID NO: 70926 - DNA, 1517 bp, Homo sapiens
cccaaagtgctgggattacaggcgtgagccaccgcgcctggcctgatttttgtaaagatggggtttcaccatgttgatgagtctggtctcaaactcctgacctcaggtgatgtgcctggcctataaagcagttttatcttcccataacattttatatgctttttaggattcataaatacttgctaactagttcctaaaagggctgtttcatgggatgtcattattaggcttgggaatgtattgatcttactgttgcaccatttttttgttgttgtttattaagaattttatacagaaagtgttgaataaaatctgaaaaactttaaaagattgttccgttttacataggatagacagcttgataactgtacccgtgtcaccctgagtctgatttttattttagaactagaaaaatattattttaaaatcataaaaatgattattggctctgtgaagttttgtttttaactggcactgtatgggatcctttatcttttttcagctggagtcttttgtgcaattgtttctcaccctgctgattctgtggtatctgtgttgaataaagaaaaaggtagcagtgcttctctggtcctcaagagacttggatttaaaggtaggatgatgtttttttcttgaaagaaagaacaacagttttggatatgttgcatttttttcatttgcttttcctgtttgaaccaggtgtatggaagggactgtttgcccgtatcatcatgattggtaccctgactgcactacagtggtttatctatgactccgtgaaggtctacttcagacttcctcgccctcctccacccgagatgccagagtctctgaagaagaagcttgggttaactcagtagttagatcaaagcaaatgtggactgaatctgcttgttgatcagtgttgaagaaagtgcaaaaggaacttttatatatttgacagtgtaggaaattgtctattcctgatataattactgtagtactcttgcttaaggcaagagtttcagatttactgttgaaataaacccaactcttcatgatttgcctgtgacttatttttaaaacttttttaaaaaagatttagctttaaaatagttggaaagaatgaagtatataagttaaggaaaaaatacaaaactgaccatgaccattgttggttgaatattccagttgctattcagaaattgtcatatgtctcaagttttatcacacaaagttcctgtatttctagggaagcagactttaaatttctaaaaacttgatttaattatagttaaatatgtgtagtcatttgtggttattttggcaagtaaatgtcagtgtatacttacatttttgcagcatgtactacaccttttttatgttggtgagtttgctaatccttatttgtaagacaaggtaaaccaaattaggctgattcttagaatgacagtaaaggaccaaagtgattgacagctgaaaacaattttcaggtacactaattctctttacacagatctgactttttttttttttga

SEQ ID NO: 70927 - DNA, 1047 bp, Homo sapiens
aactagaaaataaaatagagaaagtagaaaaaaatacagtaaaaaatataggtgatcttctttcaagcagtattgatcgaacagcaacgctccgaaagacagcatctgaaaattcacaaagaattaactctgttaagaagacgctaaccgaactaaagagtgacttcgacaaacatacagatagatttctaagcttagaaggtgacagagccaaagttctgaagacagtgacttttgcaaatgatctaaaaccaaaggtgtataatctaaagaaggacttttcccgtttagaaccattagtaaatgatttaacactacgcattgggagattggttaccgacttactacaaagagagaaagaaattgctttcttaagtgaaaaaatatctaatttaacaatagtccaagctgagattaaggatattaaagatgaaatagcacacatttcagatatgaattagtttgacattattgagattagactaaggtaatttttttaatgggacctctcatgagaagactggtaaatcaaaaataatgatattttggagcaaaagtcattttatatttaatcctattttgtacagtaaaaataaaactttaaaacaggttgattttccaaaataaatatgctaaaacctatttttgcaactttacatagcaagaactttatccatccttctgacatacatgttgttacccacacacacacacacacacacacacacacacacacataggagaagcagaatgtgctagttagcatggggagatctcgaaggggcaggatctgaatccccacttgccctctctggctgccagggagcccagcatgtgtgtttagggacctaactgaagggacccctcaggggacagggctgcggcattcattatccagttagaggaagagaaactagaaaggtcacagtgagctgcaggggaaaaaaaataaaagcctatctgggtccttcatggctttaggaaacagggaaaggaacagtagtgtctcggtctatttgggctggtgtataatagtatagcaagaac

SEQ ID NO: 70928 - DNA, 1137 bp, Homo sapiens
ttccgtctaaaaaataaataaataaataaaacaatgcagggttaacgtatttgtgaaaactattaatgtaataaatatctttgtcagtctgattctgatatacttggatattttagacatcttcagaattttaacgtggcatgtgttatgctcctgattgttaaagtgtgtttctctaatatgaaaattattaagtagccttgggaattgttttgtgttataaatgcagcttgagtctactgaaagcatcctgcaggaagctacatcatccatgtctttgatgacccagtttgagcaggaagtatccaacctccaagatatcatgcatgacattcaaaataatgaagaggtgctcactcaaaggatgcaaagccttaatgagaaatttcagaatattacggatttctggaagagaagcctagaagaaatgaacattaatacagacattttcaaatcagaagcaaaacatatacattctcaagtaactgtccaaattaactcagctgagcaggaaataaaattgctcactgaacggctaaaagatttggaagatagcacactaagaaatattagaacagtaaaaagacaagaagaagaagatctcctgcgagtagaggagcagctaggctctgatacaaaggcaattgaaaagttagaagaggaacagcatgccctctttgccagagatgaagatctgactaataaactttccgactacgaacccaaagttgaagaatgcaagacacatttgccaacaattgaaagtgctattcactctgttctcagagtctctcaggatctgatagaaacagaaaagaaaatggaagacttgactatgcagatgtttaatatggaagatgatatgctgaaagcagtgtctgaaataatggagatgcagaaaacccttgaaggaattcagtatgataatagcatattaaagatgcaaaatgaactggatattctaaaagaaaaagttcatgattttatagcatactcaagtacaggagaaaagggaactttaaaagaatataatatagaaaataaaggaattggtggtgatttttaaattcatgacatttattctgatgaaccatatcattatacataaattgattagtccattgattttgagttact

SEQ ID NO: 70929 - DNA, 1049 bp, Homo sapiens
cccgggaagcggagcgagggcgggaagacccccgtggcccggagcagcggaggcgggggctgggcagacccccgaacgtgcctgagcctgctgtcgctggggacgtgcctgggcctggcctggtaagtggacgcgaggctgcctgggccggcctcctgtgggccccctgctgtttgggctcccacccggctcaacatccagccggaggtgatccaacctcccagacctgggccttctgtgcctctgtcttgaccccaaaggaaggaaacagcccagccttgtttttccctttcgggcgtttcttgtatctcatttccccccgtgctggtagcatgcccctatcgctcagaaggagttgaggctaaggtttgggaacgagccatttgttaagagctgcagattcggccacgctttctgaagctcccgctacacgtcagaagcgttcacgttgttataaaccgttacttcctgtccgctgtgccccattccgggacacatctgccccaccctactcaccccataaatacctaatggaaatacttgcaaccttaaaacagatcattatgtttggagaccgaggcaggtggatcacttgaggtcaggagttcgagactagcctggccaacatggtgaaaccccatctctaccaaaaatacgaataatcagccgggcgtggtggcgggcgcctgtagtcccagttcctccggaggctgaggcaggagaatcgcttgaacccgggaggcggaggttgctatgagccaagatcgcatcactgcactccagcctgggcgaccgagcgagactccgtctcaaaaaaaaaaaaaaaagaaaaccatatcattatgctcccaaaggagcaaacgttatagtagcagagcttggaggagtgctcatattttgatcaccgtgcatgcattatgaatttaaggtcttttattaagtaagttacagattgaatatggtaaagctacaaaaacatagcacttgtgttcacttaaaactaaccagttgcagttttaaaatcaggtaaatggcgatatattggtgtc

SEQ ID NO: 70930 - DNA, 1035 bp, Homo sapiens
ttctgttttacgtccatgaagagttttggctttccattttgttgtgggttacaaaaggttttgagacttagttcagataagttgtgcagttttaaaacgtatttaagatttgcatattttagtttaacaggactaggtgaaattggaaattagtttcagaaaaccagagtgtcttatttgcttagctattggacatcacctaaaaaattcattcattcttgttttttcacatcgaatttcattactataaattaaggaacattttatgtttaagaggacaaaaacgttattaacattttaaaaaatgagagttttgattcgaatcaataactttttatcagttttgtgcccctgctgggcattttgtaagccttgacaagcataggcaaatgccctacgtccgtccctgtttttccaagtgctacatttggtgacttcaaaaacagtcattgaagcttgataattattgcccccttctgtgagctccaagttacttgtgctctgtttttgcacttcgggcattcacattcccactctctctctctttttcttctttgagtagactgtgaattatttcaggcaaatgactcaatcttttctgtagtcttggtgtctgacatatagggaggggcacaaatgtgtattgaatgaatgaattgataaacccgtttagactctttcactctatacattgtgtaaagttctgttaatgttttgaaaacttgcagatattgtgaactgggttttatgcccatggaaaaatttgcattatatttgaaataaagttgctagaaacgtcaagtattttactataaaggctgttattctttcctcatgtcctcctggtctgagaaatcacatcagaaagtgtttcctgttgctttgtgggaaatgtgtttagcaaggaggacctagagctgacatcctccttgaacgagaactaatactcaatagtaacaatgctctattcactcttatgtttgataaggaaaacaagaagtctcttaatattaggacttcaatgtaatcactatt

SEQ ID NO: 70931 - DNA, 2010 bp, Homo sapiens
atacctttccaagcactgggttttgtccatttaaaaatttttgccaaggaaaaaaaatcagttttgttctttttacgtttcttgtttattagtgagattatgtatcttttcatatttttattggcctgacaaatattttggtgttttggctgtagctcatggttgacagctcagagagagaaagatctgagggaagatggatgcaaaagctcgaaattgtttgcttcaacatagagaagctctggaaaaggacatcaagacatcctacatcatggatcacatgattagtgatggatttttaacaatatcagaagaggaaaaagtaagaaatgaggtaaagctctctgaagcagtccacacttccttaaaaatttttagaatttcagaacttgtactggtctccactactttatgttgcatacatattcattgttgtatactaaactacttaattttttttagcccactcaacagcaaagagcagctatgctgattaaaatgatacttaaaaaagataatgattcctacgtatcattctacaatgctctactacatgaaggatataaagatcttgctgcccttctccatgatggcattcctgttgtctcttcttccagtggtaaagattcagttagtggaataacttcgtatggtttgtatccattataccttctatcactttgctatcaaaattgctttgggtttgtcttattgtagatgtaatcttttgaagagagtgtgaccagttcactgaaaactgcatgttaaaaaaattgtagtgatgttttcaatttaaatattttttatttgcatccacattaactctcaacttttcttcttgcccagtgaactgtactgctgagataataatatgtctaccctaatttttagagacaataagacaatttataggcccttgtttattttccagttctatgtgtttatagagtttataggaaaaaataagaatctttagaaatatatgttcttgaaaggtattccataaatgttcttccttttacacttgccttcccagtcttcaatatgagagggaatgaaaagtcaggaaataattgggtgagtaaagcagatatagatagaaacttccattttctttagtcatcttgaaggatatatgtttgtctttgctctctgttgtctgagaaatcagaaaattgaagttaatatgctagccacattttcttaacttctcttggaaattttcaggctaagcctcagctttgctctttgttttttatggtattacttcagtaattattccaaagttctattcattcatgcttgttttgttttggattttagtaaggacagtcctgtgtgaaggtggagtaccacagaggccagttgtttttgtcacaaggaagaagctggtgaatgcaattcagcagaagctctccaaattgaaaggtgaaccaggatgggtcaccatacatggaatggcaggctgtgggaagtctgtattagctgcagaagctgttagagatcattcccttttagaaggtaagtgtcttagtccatttcatagtctagtaaggtagatagacatgtaaaaatattatgatatatcaatacgtgataaattgaatggtagaaacaagtataaggtacagagttagaacaaaggaaggatatgttaactctctgaagggaggggatggataggacaagcttcctgaatgagatgacatcttagcaggagtttggagaaagaataaaagttagctaggcagtgaaggtagggatgggagactagggaaggtgggaaaggtagtgggtggttactggggtggggaagggcatactgggtagaagagggtttaagaaatgttggcaggtataccactgaccttagcgatcctggtaggttctcagggtattcatcaggaatagttgtatagctccatcagttctaggctgcccccattcatcagtgtgttctcattcatcagtgtgttctctctgtatgacacttctaggggaattcaaaga

SEQ ID NO: 70932 - DNA, 1026 bp, Homo sapiens
atggtgaaaccccgtctctactaaaaatacaaaaatttgctgggcgtggtggcgcatgcctgtaatcccagctacccaggtggctgaggcataagaatcgcttgaacatgggaggcagaggttgcagcgagccaagattgcaccactgctctccatcctgggtgacagagtgagatgccgtctcaaaaaaaaaaaaaaaaaaaaaaaaaaaaaaaaaaaatatatatatatatatatatatatatatatatagtttttaactatttatgtctatacagttttaagtaacccagttgtcttttgaaatttcaatgctttaattttttcttatttgtagggaaatagtaaagaattgacgtatctttaaatacagtagtgacattttacattactgtattcgtatgttggtttttaatcatggatgctttcttcataggctgtgttcctatttgtttctgtcctttccaagatttctttgtgttattagattattaattgctaccaggataagcctcctgtgaaagtagtgtggagttttccctgaataaaggcaacttttctctgaattagtttctctgagtgaattgtaaatacagcctcctcatgcaaagctaaattgctccctcttgtgcccatagtcaagatgtttagattctttctgaaatgtggaattaatggttcagtttttaactaaatgttatattgtgatggttagagatttacatatcagatggtcatttggtctgtttgcctttttaaagctggtagtgttttctcttttcttgcatgtatttaaatgccctaaatttttagttatacatttagggaaaaaggcctttgaccctaggtaataggtacataaattaaaatatgaaagaatttactaggtagccatatcaggatgctttctttacctttaatcttgggatgatttttacaaattttattttattttattttattttgagacagagccccattctgatgcccaggctggggtgcaatgatctcagctcactgcaacct

SEQ ID NO: 70933 - DNA, 1007 bp, Homo sapiens
attacaacatatgaaattgctagtttttaggtaaaaaatggtcacatatcatcattattgtatgattcattctaatgctaacctgagctcagttctagtttggttttggtgcttaaagactgagttggaaaatcccattacttggatagtaatggtcgcttttttttttttttttttggcactcagtaagtgatggctgaaccttttatggtaggatctgtaattttaatatgttctgatttagggtttgaggagaaggcagtctctaattttttttttccttatttgaatcagcatattgagaagagtatagcaaagaggaagaatcattttcctagatctagccatctatttgttttaaaaaaaatttaatttggtagattttaaaagacactggtgggattatctttttaaaaggaagcttaagataagtgtcattagtgattaatattttttttttaaattaggtctctcttgatcttggatgatgtttgggactcttgggtgttgaaagcttttgacagtcagtgtcagattcttcttacaaccagagacaagagtgttacagattcagtaatgggtaaggattattcgtttactttttagtacctttatatttaatttaattacatttaaatatgtgacataccaaattacttactttgtcttgtgatttttgtttgcaggtcctaaatatgtagtccctgtggagagttccttaggaaaggaaaaaggacttgaaattttatccctttttgttaatatgaagaaggcagatttgccagaacaagctcatagtattataaaagaatgtaaaggtatggttatttatttgtttatgaggagattatagggagttatataatttcccttttgttaattgagctaatgaatatggtaatttagcacatgaacatccaaaaacttttctgggagatttagtattttaggttctctgatatcttaaatggatacatgatattatggtatttatttattcattaaaa

SEQ ID NO: 70934 - DNA, 1036 bp, Homo sapiens
acagagtctcacactgttcctcaggctaggatgcagtggtgctgtcatggctcaccgtagcctcaacctcctgggctgaagcaatcctcccacctcagcctcctaagtagccggcactataggcacacaccaccacacctggctgatttttctaatttttatttttagtagagacaaggtctcattatattgcttagactggcgcatatatatatatatatatatatatttttttttttttttgtaatgacatcttagccagatttgatctatgttattttgacttaataaagataatcaggaacttactgaatgaaatctttcttatttctaattttttttgggataaatatctagaagtgaagtcaagagtgataaatacttaaggcttttgataacatgcagcagaaattgtttcttagtaatgtaagtaagtaagtcgattcttattagtgacaaaataggatggtattagcatagtgacttcattttttttttaaaggctctccccttgtagtatctttaattggtgcacttttacgtgattttcccaatcgctgggagtactacctcaaacagcttcagaataagcagtttaagagaataaggaaatcttcgtcttatgattatgaggctctagatgaagccatgtctataagtgttgaaatgctcagagaagacatcaaagattattacacagatctttccatccttcagaaggacgttaaggtgcctacaaaggtaatgggatcaatgatcctcatcattgggtatttattgcatgtaagctttgatatagtactgagcatgttgttacagagaaccttggaaggataagacccaggggactgaggtggtggggtgttgggtgtagaaatccctctgctgttagcttccattaagggctttgtgttgaactcaggagttaacctatttctgtggttctagtgcagctgaagaagcatctgacttctctttctcttttctatcttgaggagtagctgagtttcttcttaagaaatggagacattcttac

SEQ ID NO: 70935 - DNA, 1014 bp, Homo sapiens
ccgtgttccccggtgccagcgtgtaagctgcttgtggtgtgcctggtccagccacagcctcacagagagccagagcccatgctggcacctggagctgcctgccccgctgcagcagtcagcacgtctgtgcgcagtggctggaccccacgctcactcacacacgcctcgctgttccacgcctgactcgcccttggcaggcttgggacccaggctggtagtgtgagctgaatgcagcctgtcaggccaagtgggtgaaacaagaccagtgggcccaagcaaaacttgggcaaaggcgccaccggccacagaagtttctggccagaaaatcaacaccccaaagatcctgtaacattttcattgatatttacaaacatgtaacagtgaatagttctctagttatgtgaaggcatacacattctgacagaaattctgattttgggagtagctttgccaaggttcctttctgttttgcaaaatgacaatgattaaactcacttaaagatttttattgaatgatgaccagtagttaagcagtttattataaaaaatattttattgttacttgtgcaggtgttcaaagctgaaacaggagagaaacttctagaaatcaaggctcatgaggatgaagtgctttgttgtgcattctctacagatgacagatttatagcaacctgctcagtggataaaaaagtgaaggtaggaaaatcttttcctcttgagttgtaatcacaacagaattcattttatttttccatgatcatgagaccagagtaagtagagttaaaggactctcacctgttgatctactaacctgattcattgtaaattaacactatctgaaaattctttacttttttttaaagagacaggattttgctctgtgacccaggctggagggcagtggcatgatcatagctcactgtaaactccaattcctgggctcaagtgatcctcctgccacagccttccaaagtgttaggattataggtatgagccactgtgcgtggcctgaaa

SEQ ID NO: 70936 - DNA, 1110 bp, Homo sapiens
tctcctgcctcagcctcccaagtagctgggattacaggcacgcaccaccacacctggctcatttttgtgtttttagtagagacgggatttcaccatgttggccaggctggtcttgaacttctgaccttgtgatccacccttcttggcctcccaaagttctgggattacaggtgtgagccactgcgcccaatgccgcccccccccttttttttttttgagacagggtctcactctgtcacacaggctggagtgctggagtgcagtggtgtgattgcagctcactgcagcctcaacctcctaggctcaagtgatcctcccaccttagcctcctgaggagctgggactacaggtgtgcaccaccatgcctggctagaagaaattttaatctcctatttgtaggatatgactctggccagttctgagatgatatctgggcagagatctcaacatttagaaaaaagactttctcttaattttcctgttttcaggtgacccttctctcaactgtgttgggtatagaatagccttgtattctgccagagtagggacacaggccccctgggttgcagagtgaagggaggagatttcaatggacttttaaagattcctcttgacttagcttcacctttatcagaaggtactgggtgccagcacttcctgagtctttttgaaggacttaacttcacctttatcagaaggtactgggtgccagcacttcctgagtctttttggagttctgtggggtgattgggctgcttggatttctccactgcaggctcagaatttaatttctaggagtctgcctattacttgcctttctgctttctagacttgatgattttgttgctgctgtctctttctccattttccttcgccttgtggattatgccgagagaaaaattcctattactattgtttacctgagttttgggagagtttggaaatggtctgtgtctgttctctgttttctgaaacataatacctgagactgggtaatttataaagaaaaggggtttacttggctcatgattctgatggccggaaattccaggattgggaagctacacctgatgagggccttcggctgcttccactcatggtggaaagggg

SEQ ID NO: 70937 - DNA, 1339 bp, Homo sapiens
aaaacttctgttcatttttgcattttacaatgtttattcataaaaataaagtctagctgtgtgattttgggcagtcttcctaacctgtcatggttctttggaactgtgctccgtgagataaggatggccttgtaaggaaaggtctccatggttacaccgtttgggaaatatgttttgtattgctttcccctattaggcacactgtatgaactaacatattcagggccccaggaagtcctcttacacaatttatgccatcgaatccagtgttcctcaaatgtatttaaaacatagaatgctttcttcatcactccttttttttcttcaattttgattacattggtttaggtgatttttcaaagtgttttcttacacctacaattttatgatttgatgactctgacagaaatgctcatcaatgactgaacaagatagtgaaatttttataaagtaaatgaggaaaatatgaaaaaagtaaataagaaaattctttgcttttcttccccacatctaatagtagctggtatttgtggtattcagagtgccctcacatataatttcttttgatataagtattcaagaagcagcgggttacagtagccctatgataataatgaggcaactgaggttcagagcagccaaatgatttgtctaaagttacattgtgattaggagaaccagatcttctgatttatggctcacttacattctcatctaatagtgatttcaaaagacttgaatgagggatattactgttttaaagagcataattgaaatataaaatatggttatataagaactcactgagggatcatgtatatgattgttattgatttagtgctacaatccttggatgttggttgcttatgagtttgtacccctttagcaggaaactaagaggaaaaatacctccctttaagtttgttaaaatctataagaacagaaaagaaaccactgcataagcaagacttgaagattaaaacttttttattgtgataaaatgcatataatgtaaaagttgccattttaaccatctaaaaatgtgcatttcaatggcattacattcacaatgctgtgtagccattactactatatatttccaaaactttttcatcaccctaaacagaaactttgtaaccatgaagtaataactcctctttcccctctcttgctagacctttgtaatctctaatgtaatctgcgaatttgcctaggtatttcatataaatggaatcatataatatcggtccttttgtgtctgactcatttcattgagcatgttttcaaggttcattcatgttgtagcatgtatcagaactgtatttcttcttatggctga

SEQ ID NO: 70938 - DNA, 1534 bp, Homo sapiens
tcttgatcttaaatcagtatattgtatcaatacatgtagtaaataaaaatcatcttatttggcaaaaactttggaagagtatattcagcatttataaatcttaaaaattgaagaaactgcggctgggcgtggtggctcacaccggtaatcccagcactttgggaggccaaggtgggcggatcacctgaggtcaggagttcgagaccagcctgaccaacatggagaaaccccgtctctactaaaaataaaaaaattagctgggcgtggtggtgcatgcctataatcccagctacttgggaggctgaggcaggagaattgcttgaacccaggaggtggaggttgcagtgagctgagatcgccccaagctgagattacgctattgcactccagcctgggcaacaagagcagaagtctgtctcaaaaaaaaaaaaaaaaaattgaagaaacttggattacccaaagtagttttttggggttcaaaaacaggaaaatgattgactataatggagcaatttggtagttctagagagaaataaaaatgactgagctaattttattttagcaaacctctgctctatattattttgatcatcttcatttatgagtattcattttctcttttgaataaacaagcattagggagaactactctgtatgttaattgggccagtctattcatttattcacaaagcttttatttctctttaggctagcttgagagctcatctgtgatgaattttcctttatagaaaatatgttttaagatgagcagtatttttaaagtatatgtatattgatccatattttgtttatgactgtcaataattatgccagttatcagtaattgtcatatttttttcaggacttatatttgaaatgggaggatattagaatagcttatctcttaaagtattttaccttcataggtatctctatttatgttgacagctttttgacattcatactagtggcctattgggagaaatccacacgggccatcacagcaccatccagtactgtgacttctccccacaaaaccatttggcagtggttgctttgtcccagtactgtgtagaggtgagtagttgaatttattctgtgaagcctgggtttccagagatcaaaggatgacagagaatgggcagcttaaaccattaactgctgaggagccttgcttgagaaattatagagtattttctttatagcctaatgacctctaactttgggatattaaaccacatagccagctttattattttaacagtgattgcagacttgatttgacagtatgacagggaattcagcaagcatttgctgaatgcctaacatgtgccaggaactgggaaaacaatggaatgactgctggtcatgaaacatgacatctcttatccagtatagatatgtggcatttcttaaacagtgtaggcacagactcttttcttcttaaaaaaggtggtgagaaatgagtccagttcagatttcttagatcattgagtaggataagataggatgttcattgccaggcactaatgaa

SEQ ID NO: 70939 - DNA, 1091 bp, Homo sapiens
tcgctctccctccttccctgcatatgtaaactattttctgtttttggcttaactgtccaatatttcttgcatatataagcagatatctatatgcatatatatccatacctgtatccttctatatgttcttgtacatatttttccatctcatataaaagatagtagtgtatagtatatagactcttctacactttgctttttttctgttaacaatatatcctagagatttgtcgtcatcaaggtgtttttctcattgtttttaatggctgcatgatattccattatgtgattaatgtagtttattcagttggttccctattgatgagtatttagtttcctagtattttgctataaaaaataatgatgcactaaataatcttctgcataagacattttgtagttttgatagtgtgtttctgagcaatattcattgaagtggtattgctggctcattcttgctattttcaatatttttgctctcttcaaaatgcttatgtatgtgatttcctatatgctgtgtttattctgtagttgtggaatacagactcacgttcaaaggtggctgattgcagaggacatttaagttgggttcatggtgtgatgttttctcctgatggatcatcatttttgacatcttctgatgaccagacaatcagggtgagaaatattgagattttcattttgaacatttcctgatggtgagctaaacctcctacaaactaagaaattgatgggtagcactgaggtaagcagaataggaaactagtactatattcctattcaccctggaaaagtgctgttatatggactgtaacagtctcattcattcgttacatgttcattgaggattaccatgggccaagtgctgtgggaacttcagtgattaaactgtattttggttaatttaaaatactgcatttgattcctcagaaaaatttttgacccttttctttaccttgaattcctacatccaattacttgccaattctgagagagtctaccttttcattttctattattatctctacctttccatttctgctgcccaagttcaggactttgttaactgttacttctcttgttgtattagt

SEQ ID NO: 70940 - DNA, 1041 bp, Homo sapiens
tgggattacaagcgtaagccaccacgcctggccacttttgactttttataatgcctttaggattctgttttcttgactttgctgagtcagttaccattctcttgctttccagcctcccacattttgttgctgttatctcctttctcattcttttgatcttgccattttagtagggctttagaagtgaaggatagaatgcatatgttcagtggaaattattatattcttttatttagtatatatattaattgtggtggcaatatttaattgtattgttaaaaacccttttgggaaaaagatcttttaatgttatgtctgtgtgagtcctaggaagcagtatgattgcaatgaaatttggctttagtacagaaacttacttgttataggctcccatgacactggtgttctagctgtaaaactcagtgtaatagtcacctttcttcctctccagatgtctttggaatgggtaaaactaaaaactacatctgatgaagttcttttgagacattgtatactatgtattctatcaaaagttaaattcataaggtttttatgaccagcttgacgatttcaggtattctcagctagggggaagaataatttctagagatatttttagaaaaggagttagattatatttagaaatatgagttaagtagttgtgtttcttcctctttttctgttctactcagaatactttttacatttacagtgttttaaatgtaacaaaactctatagatattttcgagaaatgactggttgggttttgttttcattttttaaggtttttgtaaatgattaagtggaggtttgttttaattatctttgtatccccaaagcctggaatccagtaagggttctgtaaatctttgctgagctgaagttattgccaaactttgaagaatcagctcacctgattatagcccttaggattgtgaacattgaggtctactttggtagtttttgatcctttaccttgaagtaaataaaggccaagtattacccatgcttacatgagccagtatataggactatgttag

SEQ ID NO: 70941 - DNA, 1475 bp, Homo sapiens
gggtttgttgttgtatttctcattttctttgctaaactcttaagtttctttatgctagatccttgtttgattcctatttgccttgcatataggtactaaatagacatttattaaataagttaatttgaagtcaagtattaataaagctctaaatacagttgcttttagtaattaagaaatgtcctttacatagacatagcataaaaataaacttctgtgtacctctgtgtctcagatacgtttgtatgcatattttgtgctagttactcatgttatttcattccccccacccctttccttatgtctgaggagctcctcctgaagctccacatgaaaaacaatgccttctcacttccgtcattttgaggattgcgatgggggatagctgagatatttgaagcttgggaactcttgtgttttggtttgaagctgctttgatcaactggccttcccaggccagcttcagtggggccaggatctgtagacttccccagcttgtaggttcagaaatctgtgactatgtaattaggataattttctcaggaaaatttaatcagatggtgagctcactggcatattgtgtgtttttttttttctatcttctggtataattaactgttctccaagcaactgaagaaaacaaattttatttaggaggaaaagtattttattttgcccctagtcaatttacataaccgcagcttctgtctgtaaaatgtggacaccacagtcttctctcttattcctctctgttttactgaaatgccatgtgagtaaaagactttagacaagagaatgtacactctctccacccctccaatgagataggatcgggggaggattataacagacttatttctttgatattcaggtatggaattggcaattggacaaatgtatctttctacgaggccatcaggaaacagtgaaagactttagactcttgaaaaattcaagactgctttcttggtcatttgatggaacagtgaaggtaatttaaagtataaatttgttttttgaaaaagtattctcatattgcaatgattatattgagacagtcaaaagccactgtgaggctaattacttacttaaaaatttttaatttttctcatgcttgttttctgttaattgcagtcacctacatctgctgtgtttaatgagcatttatactgttagtcacatttaaagtaaaggggtcagaacagccagtgtattaaaactcttgttttatagacctgtcttgtagctgattatgctttttaatataaaatgttcttaaaagtgtcaacctccaagtgttttttttttttttttaaggtatggaatattattactggaaataaagaaaaagactttgtctgtcaccagggtacagtactttcttgtgacatttctcacgatgctaccaagttttcatctacctctgctgacaagactgcaaaggtaggtcaatcaattgaaaccatgcataaaac

SEQ ID NO: 70942 - DNA, 1088 bp, Homo sapiens
ggctagtatagtgactaacatttaaagattacttgtcacatgctagtaatttcactctctataatctcatttaatcttcacatcataggtacaattgtcctcattttacagatgccgtgtctgaagctatagaagcttatatgagttgtcctagtcacaagaatctagtgaacagtggagctagcactcacattcaggtctgcttcactccacagactgctcttagctgattcagtgttcttctgtctaggtctaaattaaggaaggagtgacattgatccttgagctgaatttaacttgagtaaataaagggaaactcagaaaaattaacaaggttgcatgctggaacttgggcatctcatgacagtttatgaattgccagatattagaatgtccatgtgattgaatttatggctgaatagcaatcaaggcagatgcttattttgagtgtttatagcattgctaaacaatcctaattgccttccagatctggagttttgatctccttttgccacttcatgaattgaggggccacaacggctgtgtgcgctgctctgccttctctgtggacagtaccctgctggcaacgggagatgacaatggagaaatcagggtaggctgtttgctgacatgagagcactgctcttcttgtagcttgggctagcactgttcacagtggggacctttgttcacgggccagggaagcatagtcctgaagttgtggttggatgaggcattctttttgtttcttgtgcacattgtattcacagctgcactccactgcagaaacggattcattttagagttagagtgaagcattccctgtatatgtgaggaagcaagtgctctagtcatttgtagttcattctctgccattagcttgagaatgattcatcttaattcttggacttgaaccaaaggtttttggtagcagaatttgaggaaaataattttgtaaattatggtctggattataaatgaattgcaaattctgctttttctgtgctgaaagaaaagatctctttagcactatacccatttgatagccatttccagtgtggtttgttgcagtcctctgtggactgcct

SEQ ID NO: 70943 - DNA, 1050 bp, Homo sapiens
aaaggggcatttgagtgaagagagggggaatcttctgcccattctcccgagaaggacatgcagacaagagagttgagtctggccactgctgtaatggactctatagcttcctgtctgcagctctcaagcaggctgcatgtttctccagcacaactcaacggttggagttgggtgtaggcggagcagtgaggccatcaccagtgttcatcaggaagaggctgaccaggttgaatagtatattcagcattaaatccgagacattttcctcctgtttgcttgagttcggttggggggaggagatagggtaaaggatctgctggcactataaattgtcacacagtgtaattaccaatctaatgagaattttatttttctctgaacagtggtggaacgttgtcactggggaatcctcacagaccttctacacaaatggaaccaatcttaagaaaatacacgtgtcccctgacttcaaaacatatgtgactgtggataatcttggtattttatatattttacagactttagaataaaatagttaagcattaatgtagttgaactttttaaatttttgaattggaaaaaaattctaatgaaaccctgatatcaactttttataaagctcttaattgttgtgcagtattgcattcattacaaaagtgtttgtggttggatgaataatattaatgtagctttttcccaaatgaacatacctttaatcttgtttttcatgatcatcattaacagtttgtccttaggatgcaaatgaaaatgtgaatacataccttgttgtactgttggtaaaattctgtcttgatgcattcaaaatggttgacataattaatgagaagaatttggaagaaattggtattttaatactgtctgtatttattactgttatgcaggctgtgcctcagggtagcagtggcctgctttttgaaccacacttaccccaagggggttttgttctcctaaatacaatcttagaggttttttgcactctttaaatttgctttaaaaatattgtgtctgtgtgcatagtctgcagcattt

SEQ ID NO: 70944 - DNA, 1123 bp, Homo sapiens
gcaattctcctgcctcagcctcccgagtagctgggactacaggtgtgcgcacatgccaggctaatttttgtatttttagtagagacggggtttcaccatgttggccgggatggtctcgatctcttgacctcatgatctacccgccttggcctcccaaagtgctgagattacaggcgtgagccaccgtgcctggccaggccccttctcttttaatggagacagggtcttgcactatcacccaggctggagtgcagtggcataatcatacctcattgcagcctcagactcctgggttcaagcaatcctcctgcctcagcctcccaagtagctgagactacaggcacgagccaccacacccagctaatttttaagttttcttgtagagacagggtctcactatgttgtctaggctggtcttgaactcttggcctcaagtaatcctcctgcctcagcctcccaaagtgttgggattgcagatatgagccactggcctggccttcagcagttctttttgtgaagtaaaacttgtatgttggaaagagtagattttattggtctacccttttctcactgtagctgctggcagccctgtgccatatctggactctagttgtcagtatctgagttggacactattcctgctccctcttgtttcttacatatcagacttcttacttgaatgaaacctgatctttcctaatcctcacttttttcttttttaaaaagcagtttctccactgctaaatgttagtcattgaggtggggccaattttaatcataagccttaataagatttttctaagaaatgtgaaatagaacaattttcatctaattccatttacttttagatgaatggcattgtgaatgccattcttttaatgaatttcaagagaattctctggttttctgtgtaattccagatgagtcactgtaactctagaagattaaccttccagccaacctattttcctttcccttgtctctctcatcctcttttccttccttctttcctttctcttcttttatctccaaggttaatcaggaaaaatagcttttgacaggggaaaaaactcaataactagctatttttgacctcctgatcaggaactttagttgaagcgta

SEQ ID NO: 70945 - DNA, 1079 bp, Homo sapiens
tctgttttggggggcatttttctggtttgctgctcttggtgcttatgtagtttacatgaaaatagaaacttcattacttctcggactatcataaacccttatttccaatcttgattaagtaagtctcagttcttgataaagtagctaaggttgcattcactacatttcaccagagtctttcaaaaccagaagcatagggttgatctgctatctggaactattctattgtgaattagaactttcaccaactataaatgatgtagatctcaacttgcagctaattttcagtttgaaccccaagttgctgttttctctgttctcagcatggtggcatttcagccaaaagtcccagttcaatcaaaactccccatgaaaaatactttaggacacagacggtctaaaaagttgattcatggtaatattattaggccaaagtattgtagattaagagttacctgtttattcttttaattgaaaaaaagatgttttctgttcaaagtatgcattttagccaaaatgaaaatgtctctcccagtaataagtaaatcactgtggttcccaattctgatcaatgtttccttaaatgtactttgttaacaaagatgactaaaatccaccgagttcacaatccagtggaggaaaccaacatgtgaacatttaattaccccaaagtggtagaagtattaccatagaggcactttcaagttgccatcagcctaagggatcataatagacgatcttaaaaatgacatatactcatgccctcctaaaatcagtttattagggctaataacaggtagcagttgagagctgtacaccctgccctgcacaactgaattatgtgcattagttcactcagtccacacagtaggtattgccattgctcccactttacatatgggaaaacaaagtccaagagaagttaagtcacttgcccaaggtcacacagacagcaggtggcagagccaggatttgaaaccaggcagtccactccactacccacactgtgaatccagagactggactgcctctccaatgtgccaggaacattcattgccctgggttttgttttttgtttt

SEQ ID NO: 70946 - DNA, 1115 bp, Homo sapiens
tttgctcttggtcattgaagataagaaaataaaaatatcggacctgtgttaaaggttttttcctgtttttcctgaagttgatgaaaatatttatcctctgaaagtagtgacgtgaagggggaaggtatttctggttttccggcaaatataaaatacagtttgcttttttccaaggcatgaatttattggtaattttccttgcataaatgcataaatgatttttttagtcaactcaaaatgttttaaagcaaaaagaatgacttggaagtcaattattaaaccttgagcaccctaaaacattttttgagttttttttaaatgtgattctttgcattttattattttcctcttttccttcctggatgctaccttggtagctgccatgttttaaatattgacaagataagatagttttctgtttatatcagcagtcgtctgtctgtgaaatatggacgaatcagaacgcaggatttcctttctcagcgatccatcaggttcataatgtaaggttacaaatggttcttttcttctcctgaacttgcgctatgtactgtgttgcacagtgttgtcaacagctataggtactgtgtcctggcaatgcagaaaatttgtaatgtctggtgactccgagactctttgtctattatacttcatttactgtgccttgtgattagttgatgtgcaaacattgtcctaaaacaagaaacatacttggttttaaagtgtatggttaaaatatgtcccatgtgagttttggctttcattccaggcgtctgtgttaaacttgcttttacaggaaaaagaaaagggtaaattgatatatatatatatacacacatgtatatatcagcattattcctccccattttgtacctccccatattcatggactcttcaaccctttgtgtctaatgattctcaaagattcatgtgcttcacttgtgagaaatttctgagtatgatttgcatgttattctgtatacattttatgcaaatgtggggggaggtgagctgggagaggcacggttacagctacaaagtggttctcagcctttttccatttgacagtactgaattgatctttgcaaattgtatgaaattgtgacccattttac

SEQ ID NO: 70947 - DNA, 1132 bp, Homo sapiens
tggggaggggagggacataatttatcacaacagggactaagcaagaggaacaagaagtggggaaggtgatgagttctgcttgaaacatttgtcaggcaataagatcgagagtctgaagatagaaatgggagaccagaggaatagcaagaaagatttggggtggtagagagtaggggctgactaaggaccatgaaaaggtgttctgagcggtctgagggcccagccacatacagtcaaccattatgaatatgtactggctggtggcagggcttctctccagcagaaaacaacagtgaggttagagaaggcacatgatttgattagatgttgaagatttacaaggcgagcagaggaaagacaaaggaggtagtatgctgaagatgaaaacagtatcttcaagtttatcctgcctaaggaaggagggatatcataaatgggataaatggcagggatgtaacagagaaactgagggaatggagattaggatgaggccaaacagcgtgtgttctgagagtcagggtgagtgttgaagggatggaaagaggcaggcaattatctttccttcatcagacaacagatttttactggacacagtattagggttctccagagaaacagaaccactaggatgtaagtatacatacatagaaaggtatgttttaaggaattggcccatgcagttatggaggctggcaagtccagaatctgcagtttgatcccaaaggctgcctgctggcagagttccctcctgcttgcgggaggtcagtcctttgttctactcaggccttcacctgattggatgaggcccacccacattaggaagagtaatctacttcactcaaaatctaccagtgtgaacagcagtctcatccaaaaacatcctcacagaaacatctggaataatgtttgatcacatatctgggcactgtgatctagctgagtagacacattaaccatcccttagcccagtagggtgactactgtgtagttaacaacagtatattgtatatttcaaaatagctagaggagaagacttgaaatgttctcaacacagagaaatgataaatgtttgaggtgatggatattctaaacttgattgttacaaattctatacatgtatcaaaatatcaca

SEQ ID NO: 70948 - DNA, 1041 bp, Homo sapiens
gtgaagaatagaatagccttagttaacagagagctattatgtacacacaagaattaattgttctttttttttttaacagagtctcactctgtcaccaggctggagtgcagtggtgcgatctcggctcactgcaacctccacctcctgggttcaagtgattctcctgcctcagcctcctgagtagctgggattacaggcaactgccaccacgcccggctaatttttgtatttttagtagagacgaggtttcaacatgttggccaggatggtctcaacctcttgacctcatgatccgcccacctcagcctcccaaagtgctgggattacaggcatgagccaccatgcccagccaaattgttcatttttaaagaaggtggtatggcagtatggagacagcattggctttggagtcaggggacctgggtttgaattctaacattgccacagaatatgctttccatgaactttagcaatttactgaagcatactcatcagtgaagtggggttagataatttttactccctaagactggtatgagtactaaataaactctcaatagatgttctttactctccctttcctaaacaataaaataccataaattgtgctaaccactaaaatcgaactgaacattgcatataatttcatcattcttgcatcatgcagaaggcattttaggaaattttattaaattattattataaacgaaagaaattcttgcttcttgctggaaaaggtgttgactaaactaacttttttatacacaataatagctaccatttatttaaggccacctaagtgcctggggttttgtttgttagtatacatatatttcactaaattttcacaactcgatttgtagcaagtattactatgctaattctgtaaatgaagttaattggtagagacccacaaatagaatccagtactttttgtccaaagtctcctctcttaattattacattaggttaaagggtatgaatctaaaacttcattcacaaactttcacagaacactagcttcttgagatataaatattc

SEQ ID NO: 70949 - DNA, 1033 bp, Homo sapiens
gtgtcctgaatagtattgcctaggttttcttctagggtttttatggtattaggtctaacatttaagtctttaatccatcttgaattaattttcgtatgaggtgtaaggaagggatccagtttcagctttctacatatggctagccagttttcccagcaccatttattaaataaggaatcctttccccatttcttgtttttgtcaggtttgtcaaagatcagatggttgtagatatgtggtattatttctgagggctctgttctgttccattggtctctatctctgttttggtaccagcaccatgctgttttggttactgtagccttgtagtatagttagaagtcaggtagcgtgatgcctccagctttgttcttttggcttaggattgtcttattaagataaataatagtgttttcattgtcttttggccattactgtatcataaatgctgctcagactagattaaaaagcatagaaatcagagtcatttcaactagtagatcatattcacatccaattaaatttatggcataaatatggcttgcatcagactttcacccaaaaataaaaataagtgacacttgcaatgagctaggcatgatattggatgctttatatacattgcctctgtaaattcttgcaacaaacatgaatctggtacaaattaagagataagttcagacagtaaaacatatttcctgaggttatgaggtagagttaggatttgaacctaggcaatcatgagaatggaagtccatgaagccaggatcacgattctgttcctagcacctggaacaatgtctgctatttggctctcaataaatattatttgaattgaatgaatctgactccagagtccaggggttttttttttatttttgtaggtatgtagtaggtgtatatatttatggggtacatgagatgttttgatacaggcatgatacaggcattattgcatgggcaaatgggtatgcatcacctcaagtatttatcctttctttgtgttacaaatgattatttttaaatgtacaat

SEQ ID NO: 70950 - DNA, 1009 bp, Homo sapiens
ttattttagtggacatctgttcattcacccttctcgtgattaaaattaaaacattccaaatttcctctgaagaagccacctccatctcttccctattccatgcctgaacatatggcctggatcttcagagccaagctcggcattccagcctctgcctccacctctatggactactaagtattcttcatcaggaccagctaccagtgcaaaatgaaaatatagggccccttgttcaaaaattattaaaaatttttagccagtaacatcaaaacattaaagctagcacaaggcccttctatctgcaggaccttgtgtaaccatacaggtcacacacccttgaagccaaccaagctcttcattcctttatgtagacccttagttccatctggtgtcattttccttctacctgaaggactgtctttgacattattctatagtgtgaggctgctagtgataaattttcacagcttttgtatgtctgaaaaatacttcattttgccttcattcatgaaacatagttttgctgggtatagaattctaacgaacagtactttaaagatattgctccaccagcctctcttctgctttatttctaacaagaaacctgccgccattttgttgttcctctatacataatgggtcagtttttttccccctggctgcactgaaggtgttgtctttttcactggtttacagcaatttgattattacacacattggtatcattttttgcatgttttctatgtgcgaagttttttgagcttcttaaatatgagacttatcattgtcatcaactttggaaattttttagtcattatctcttaaatttttttgtttttctgagacagagtcttattctctcatccaggctggagtgcagtggcacaatctcagctcactgcaacctccgcctcccaggttcaagcgattctcctgcctcagcctctcaagtagctgggactgcaggcatgcgacaccacatctggctaatttttgtatttttagtgga

SEQ ID NO: 70951 - DNA, 1043 bp, Homo sapiens
aattaggcaggaaaataggttctgatctattgctatccccagcagccgtcatccttcaattctgagaagttcacccccatttaataaagaacagtggctcccttggagttatcctgcaatctgtagtgagagaaatagggctttagatatctgagcactttcccttccttacataattcgtcaaagaataatcacagtttagagctggaagggacctttaaatctccagctcttcctctcactggagtcatttcacaggtgaggaaactaagtcccagtcctattaaatgacttgccccaaggaagattgctccttagtaactgaactggaactaaatcccagatatctgtgctcatgacaattgcctcctgagtgaatatggtgctatatcagagacccaaggctgtgagttgcttgtgtgtttgtgaaagaaactgaaaagggacaggaaatgaaagaaccaattgactaaaagcaagaacaggaatcatttataaaatcggccttccttttacatttcaggcttaaaaggcagtttttgcagcctccatggaccactgaactcccttctcaaggctagaaggaagggttgcagcaggaatccaagagctctagaaatacaagaaaaagacaaatatgaaaaagaagaaaagcagatataggccatgtgagctgtccagcagccaccggggtcattcacttatttatccttgaaggtagcctgagagaagcttcactgatagcatactgtgctgtttcaataagtaaaataatcttaatttattttccttcttaatctgggtagagaggaaggaaaaataggcaagatggaaggtcattctctaagagagcaaagacacatctttagagcattaaactccagggaaatgacatttttatgggattaatctaggaagcagcataatggaatggttgggaacatggtcagactatccgagtttgaatcttggctccattctttgcctaattgtctgaccatgggcaagtttctaaatctttctgtgcctggttcctcaccttt

SEQ ID NO: 70952 - DNA, 1033 bp, Homo sapiens
gttcataatatttaatctttccatttgtttaacacattgtaatatagatcacctttatctgagttcacttcttctatactttgtcccactcttccttgaggtgccaaggctcctcatgtcattccctggctgccaaagtctccctaagagaggtgtttcattcaaggccacttccctaaggggctctctctgcacatggccactatgtgtctcattctcatgtgaaacctttgaatgacctgagaacccatctgctaagatatttcaatctcttgggtccccttaatggttgccagtgtgttcttctttcctcgggtaacagttttttttaaatagaggtggtgaggagtggtagaattctggatctatgttaaaggtagatctatctgtctatctatctatctatctatctatctatctatcatctgtctatcgattgatctatcaatctatctacatatatatttggatgaattggaggtaggatataagaaaataaaagggaccaaagttgtaattcaaagatatttggtgttttgacctttggaaagatggagctgatattagtggagatggggaaatctcagttttgaacattttaatttgaaaatctgttggatattcaagtagatatgtagagtagatagttgagataatgattttttttcagtgagggagggtagggtgggaggaagccatgtgataattttatgcttatcagaagtaaagagtatccgttttaaaagaccgaaaaatagcatctcagcctattgtgagtgaatttatgagttctgaactctggatagttgtgttgtgaattgctgggggaaaagaagctgagcatcgccagtgataacaggtgttctctatctttatagaaagctgtgtccaaaaagttgtttccacatgaagaattttgtgcattagcactttctcaagggcacctgctaagcaagtcaactaccttgggtaactaattatcttcagttttgctagtagtttcaaaccatcacctcctgcaggagaaaactga

SEQ ID NO: 70953 - DNA, 1087 bp, Homo sapiens
atctcttttatctagttatctgggtatttatctttatgtctctaatctatttgttttgctcctttttaatgtttcagttttagacattatctattgacatcccactatggaatatggcattcctctctttcctaccgcttactataacagtaccccacacaagcacacacatgttttccatgactatctctttaacacattaattgcaaaatttgggttagattagtcttctctatttacttgttatgtttgtcgacagacattatttataatgttactgatccataggctaaaccctgattcctcttcctttccattacaatgttttatttcccctaggattaattattgtctttcctaattgtgattgattttctatgtatatatagtcaacacaattccagattcatcttttcttaacatgtttatgtgtatcaggtattctatatgcttcatgtctctgaagaatctcacctgagcctttccattcatttaaatccggactggtcaccttctactccttctgataggtatcaaccttgcaattcttctccatcatttggggatttttattgcctctttcctttgttggatatcttgatttctgtatgccatgccttttcttgttttatgcagcacatctcccagtaatttcatgcaaatgtctttattctgtcctcactcttgcttcatagactggatgtgaaattctagtgttgagaataaattccctagagaaattaaaacaatgaccatattgtcttctagatgccattgtcactataagctttgctttaggttgattccattggtccgtttagttggagaagtcttgacaacagcatctttagatctttccttttgaccggaacatcctaggaaatccctcttttaagctcctaatgggaagttcttagggctgtttaaggaaagagggcacacaggaatgtcaacatccagtatacctgttttctcaatcacctattttcattatcttaccataccctaaactgtgattagtttagagaactgttttactcttctaagagaagaaatcttcagtgttttgcaagattgagggacggat

SEQ ID NO: 70954 - DNA, 1048 bp, Homo sapiens
attctttaatatttgggagataattttatgacttctggatgacgtagcccagaatgaagtcatctgaggttgccgtgctgaaccttaggtgtagcagtgtcagcttaagtagctggatgatgcaaacaaactggaggcttgggcaatcagtcagaattcatacctctgacaagcagaactcaacaatctttgttttgtaacacctgagttggagaggtgctcaaatcatggtctcttttggttagatcctttattcatctattgctgtgtggccattttaccacaaatttagtgccttatgcaaaatatttattatctcacagtttcgtgtgtcaggtattcaagcatggcttgggtcctgtgtttcatgttctctcacaagactagaatcaaggtgtcacccaggaatgggacctcgtctgtggctcgactggggaaggatctggttccaagctcacatggctgttggcagaattcagttccttgtggtttgtcaatggaggaccccagttccttgctgaatgctttcaattccttgaccgagagcctcagtttgtaagcctcccttagttccttaccacatggcctttccatatggtagcttacttcatcaaagccagaaagggagagaatcaacagagggtatgtttgcaaaatggaagtcacaatcttatgtgacataactatggaattaacatgccattgtctttgtcatattctattagctagaaacaaaccagaggttctgcttccactcaaggggaggggattacacaaaggcatgagaaacagggataattgggggtaatttcagagtttttctgccataggtccctaacacagaagcgagttataagacattgccaaattcttaatgtttgagcttacaaaaagtaattatgggtgagaattgatgcattcaatttaggtaaattatataatatcataaagtcaagattatataagttttagaggattttacttgaattgtcaaatatttatatattatttattattattttaaaaagcagtaccccaaccatcttct

SEQ ID NO: 70955 - DNA, 2935 bp, Homo sapiens
atgtgtttttttttttttttttttttttctgagacggagtcgtgctctgtcgcaggctggagtgcagtggtacaatctcggctcactgcaacctccgcctccggggttcaagcgattcccctgcctcagcctcctgagtagctgggactacaggcacgtgccaccacacctggctaattttttgtattttagtagacacggggtttcaccatgttggccacgatggtctcgatctcccgaccttgtgatctgcctgcctcggcttcccaaagtgctgggattacaggtgtgagccactgcgcccagccctcctgatgttttcttatatgaacactagcacatcataaggggttatcatctgatgacctcccaacaccccctccttaataccatcacattggggtttaggatttcaacatataaacttggcggggacaccgacatgaggttcatagcaaggaggctttcagtttatcatcaaggaaaatccaaactgcagtcaaaccacagtcctcaattataacatttctatgttatattggactattaaatgtggaaaacatttctgtatgtctgttatttatattactggttaaatgatgagcatttgggttcagttaaaatttaatttcataggatatgaaacatccaacttgctgattgtgatatgacaagtaattccaaaagttattttggagaaataaaaatgtaaggaaatatgttttgtagcatccatatttttaattaatgtgttttacatattaatgatgtggcttgagttttggaagtattttacctatattcttagttcagtttagcttttgttgtctcttttcttccaatagagggcactctgattcagtaatttcaaatacaaaaccagccatcttatgtaagaacttttatttttgaatcggagatttttgtttctattaaaatattagctataatatggtagtttgaacacttttactaatataagttaaaaattaaattcttattatgattgaatgtattcaattggaggttttgcatgtaatataaaggctagctcaagttaaaattgcattttgtcttgcatacattttaattcaaaagtcagtctgttttatatactcttataatatgcatctgaaaccattttctaagttgaattaggacattatataatctagaatgtaaattttgaagaaatataaatatcctaacattctttaccaactcatgaaatttaggttttcgaaagaatgtgaaatcatctgaaaaaattttctattctctttatgttttcccaagccttatattcatgttttttcctccatgtgtataaacaatctatacaattcttaaatgtgaacacagcatgccatagagaaatttgatgataaagatcattagagcagatttcagaatccaggtaccaggaaaagtttttttgttttttttttaaacatttgtaatagaacattacctcatcagcgtatgtctttaagaagtaaataagaagcttaagggatgaaacgtgttatgtatttttttctcttgacacaagcagcatctaaagcttttggtttgaaaggggttgcattggcaggttttgtgcaattttgttcagcaactatgcctcttttctgttattttactttcttttccaatgcaaaatatttaattacatgtcagccttctgaagtgtgaggtattttattttagtattttaagatttcaagatttaccttgaaggattttcagttttttttaatgccaagctattcttgagaatactctctgggagtgaggtccctacttttggaaaatatacttaatttagttctaaaattcatcaagttttaaagatcagtagagtcagattagattgcctaaaaaccaaatggtgtttctgaaacaaagtttaccttcaaacacattctaacccaatttctagagcttattatcaggaatgcatcaatttcagaatttggagagagcttcgtggctatcttacccaatttccatcagatttagagaatcttgggaggcaaattttttgaaatgtaaatagaggcttattataggaacataactgattctttagcatgtataattttttatagtggtgctaaatcttaagcagtggtatacaatgttcaaaagaacattctaacctgaacaatctatttcttatgtagttgaacagaccttttggatgtggtgactcaaggtgattcaactaaggttggaaatctcctaacaggttttgcaagaattagggaatgtagaactaggatcatgttgacctgcatttatatattgaaaacaataccattaaccacacgtatgtactgtaggtacattaatggaaaaatccagaatcagaagggtaagtttttgttcctaccctcacctcaggaagaactttttgtaaccttagggaatctaggaagtccttgagaaaatggctagtagaataaaagagtcatttttctgaacttctagcacacttgctttttaccattcttgatacatctctttctgccttgccttgtaggtgtatatgttttgcattacttcttatatacccctttgacagtaggttcattattagattgatctctgtagtcacatcctgcctcacacggtgccttgaatgtagtggtctctcagtgaaagttcattgactgaataaatgcataaaaaggcaaagactgcatataaaagtgtatatgttcttgcaaatgaaccattatcattgcaaaatgcatttaattatttggagatgaattccagagaccaaagtggaggtttttcccagcaatcatgatgggaatctcaaccatctttcttagggagataacttagtctagcagttaagagcatgagattgtgagtcctacagatttggttgtacaactctgttctgcaatttactagcagggtg

SEQ ID NO: 70956 - DNA, 1671 bp, Homo sapiens
tagcatgttacttaaaaaccccagatgtttttctctcctttagctcctaccctgttcagcagtgattatctcctacacttgttatggattggctgcaagtatgatagaggagggtggtgagataggttttattaggtgtcagttgggaagctgaagaacagcattgttttgcagggagataaatgaattaaaaccaagtcaggcagggaacatgtagatacaatagtcaacaaaggccaaggaggagtaaaaggaatagatgcactatatgtggccattatgctctcttctctatttccaaaatatttcagggaagttcatgcccctacaattttcttatcaataaagaagttaattacaagtcaaatgcatgcagagatgaatcagagaaaaatcccatcatagccttttatataaattaaaattaaaattaaattgaataaaagctaaaaaataagagtggcacatactattttttattagtcttctccctctatgcactttgtatttcatgttggacttttgactctcactgaatttttttttttttttttttttgagaaagagttttgctcttattgcctaggctggagtgcagtggtgcaatcttggctcactgcagcctccgcctcccgggttcaagtgattctcctgcctcagtctcccaagtagctgggattataggcacttgccgccatgtctggctactttttgtatttttagtagagagggggttttaccatgttggccagtctggtctccaactcctgaacgcaggtgatccagccaccttggcctcttaaagtgctgggattacacgcatgagccacagcgcccagcctctcactgaactttttttttctttttgagagggagtctcactctgtcacccaggctggagtgcagtggcgccctctgggctcactgcaagctctgcctccccggttcacaccattctcctgcctcagcctcccgagtagctgggactacaggcacccgccaccatgcccagctaatttctttggtatttttagtagagacggagtttcacgatgttagccaggatggtcttgatctcctgactttgtgggccacccgccttggcctcccaaaatgctgggattacaggcgtgagctaccgtgcccggctgcctctcactgaacttttaaaaactgaagcatgggccaggcgcgatggctcatgcctgtaatcccagcactttgggaggctgaggtgggtggatcacgaggtcaggagatctagaccatcccggctaacacggtgaaaccccgtctctactaaaaatacaaaaacttagccgggcgcggtggtgggcgcctgtagtcccagctacttgggaggctgaggcaggagaatggcgtgaacccagaaggcagaggttgcagtgagccgagatcgcgccactgcactccagcctgagcaacagagcgagactccgtctcaaacaaaccaaacaaaacaaacaaacaaacaaaaaaacaaaactgaagcatgtgtgtaatatgtcttttgggaaaagcaaaataaatgtcacccactagaaaatggggtgtgacataaccatggactttttaaaaacatactgcattggtttatataagatgaaatgttgttacatgggagtaactatctttgctctcctaaatggt

SEQ ID NO: 70957 - DNA, 1063 bp, Homo sapiens
ttttaaatgagtttcccttttgaaataattttttatgcttggagaagaaaggtgaaggaatacagaagtaggaacaaggaatactcaaagtgtgttgtgtgccatcactgagaagttattaaaatttttttattattattttttaaccctgggctagtactacagttagcttgtcaagggtcccttacatactgcactttctttctcttttacataccccttaaatctcttattccaattatctgtaggaatgatgtgtaaattttataaatgcctccttggtattatgataactttttgtgtgtgtgtaaacaaggaatatacttgtaacttcaacttttccttcaaactaaatctcagatatgggctatctggaaagagctctttttttaaaaaaaaaaatgggagttggtatcctcttcattttacttagctcatctaattaatgaaataagttaagttttgcttatatgaattctattaagtagtttaattggttagtcaatgtgtgctctcgctctctttctctctctctctctctctgtgtgtgtgtgtgtgtgtgtgtgtgtgtgtgtgtgtgtgtgtgtgtggcatggggtgatggttttccaggtaagtaaaatagccaaatgttgagtaggcaaaaactttgaaacccaactttatatcttagtaccttgaatgattactctaaattcccacccagcatctagtattcttttaaaattacctatttaatacagtttgtcttgctcagcctattttgttgttgttgttttttcctttttagggacatagttctcaaactacttcagtatgaggcatcaacaaatgtagcagacaacaaagggtattttcctattcacctggctgcctggaaaggagatgtggaaattgtgaagattcttattcatcatggaccatcacattccagggtcaatgaacaggtgcacttgccaaatgtttgctcatgatgtaatttttctagttttacaaggcaaagccatattgaaaatgtgatttttttatctttaccttgcccaaaggcctttccattgctgaa

SEQ ID NO: 70958 - DNA, 1032 bp, Homo sapiens
caggactgctgtgtttcgagtctttttgcaccatctgactatgtgcatgtattactttgataaaactaattaagaaaaaaagctcagaagtaaaagaactcatactttttatacttatacttttccaaacatacagtgttctttgcacagtttctttcctctctctctctttttttttttttgtgagaagcagtgtcactctgtcgcccagtctggaatgtagtggcatgatcttggcttactgcaacctctgcctcccgggttcaagcaattctcctgcctcagcctcccgagtagctgggactacaggcacgccaccactcccggctaatttttttgtatatatattttttagtagagacgagatttcaccatattggccaggctggttttgaactcctgacctcaaatgatacgcctgcctcggcctcccaaagtgctaggattacaggcgtgagccactgcgcctggcctctttcttctttcttgaattctcttctttttatgttcctgggaaaatcctactcattttatatgatttggctgatgtaaagccaccattgtcttcctaagcagagagggtcttgcttttgggtgctgcacaactttgtgcaatttttctgttacatcatttatcttttggggattgtttattttcatacttatctctcttccaggaccatgttagggagaggtgtttttaatttttaccttttctgcagcacttagcacagtgcctaatcatagtaaatatcacgtaaaagttgaatgaaggaatggatgtttgatatagagttaggacacctgtgtccaggtctggctttgcttttccttttgccccctacctcaatcgaagcagtttacatattgctgtcttggattcctcttggaaaaactggactgatgaacttcaaagtccctaagaaattgaaaatgtatgattcttttatgttacaccttaaaatccgtgtataatgcgactgcttcctacatcttgatacttcctagcccttattattttctgttttcaca

SEQ ID NO: 70959 - DNA, 1085 bp, Homo sapiens
gtatatttctaagaagatatatctatttttttaactcgtgatttttatctagaaaaatttagtgattttgtgtgttagctgtttatcagcttatcagctcaaagacaatttgcttttctagaggataattatacttgttgaggggacagcctcattcttcagaaacaaaaagtatagttacagagaaaaaattatataatggcaaaatgctggtctgaaatttagaaattcagcatttctttctgatgaaatgtgatttgctcatgcattgcatacgttcatttgtcaaacattaactgaacattcttttatataagaaataaagatcaagtagagtagcaagtatataggactcacgagtcagaagaccaaggttctaatcctggctctgcctcttggtgactgtgattttggctgagacaagtatccattatgaatcatagttcttccttaactttaatgtggggataatgtaatcttccctgcttgcttctcaggattagggtaagaattgaaagagttctggaaattatagctctttgaataaatgctaaatatttttgtcactattgtgtgcaaggagctacttcacatagtttttttttttttttttttttttgagatggagtctcactctgtcgcccaggctggagtgcagtggcactatcttggctcactgcaacctccgcctcccgggttcaagtgattctcctgcctcagcctcctgagtagctgggactacaggcacctgcaaccatacctggctaatttttgtatttttagtagagacagggttttgccatggtagccaggctgttctcgaacacctgaccttgtgatccacctgcctcggcctcccaaagtgctgggattacaggcgtgagccacagcacatggccatatagaagatttttagatcactgttatgccaggagtggtggctcatgcctattatcccagcactttgggaggccaaggcaggtggatcacctgaggtcaggagtttgagaccagcctggtcaacatggtgcaaccccatctctactaaaagtacaaaaattagccgggcatgatggcaggtgcct

SEQ ID NO: 70960 - DNA, 1188 bp, Homo sapiens
aagttaataaatcattatgtgttatattgctaatgggtgatatcgaactttataagtaaatgttaattatgctttcagtttccagttatacttaatatttttacaacctaataatagtcgtaaactcatagggcagaaaataaagaaagcatttcttctggcaagtttattttggactgaagactcagatttttaagtaagtttttcttggacaaatggacttttaagctgataggaccttgaaaaatttctattccaatttccatgtttgtagatgagaggattggaatttggctggcctggttagtttgtatcatgactcagactgcggtctgggtttcagcttttggttctgggatttttcctactctgttagatgcctgtctgcaaaagtaatgtaagattcttttagctcactgagactcaattgcccttacagagggatagctcaagtggcagcagagtgcagtgaccggagtttaaatcattgctctgccaactactagctgtaaaaccgagaatgatttatttcaccaccctaaatctcagttttctcataaattgagaaaaactgtagttcttgttgtgaggattataaaaaataatatgttaaaatggttagtaacagactctattatttggtgactttgtaaggttttaataagattacgtatttttagcacaatagctggcacatagtatgaactaaatgagtacttgatattattattgctgtcattattgttattattaccattctcatacaatcaaggaagtaagaaattttgaattttaaaatttcagtggataaactgcaggctgataattcagaactctctgtaaatgagtatgtatatatatgcatatattatgggtgtgtacacatagactgttgcgttagatacatgtttttaaacagctttattgagatataattctcataatgttcacctatttaaagtttttaattggatggtttttaatatattaacagagttgtgaaaccactaccacagtctaattttagaatatgttcatcgctctaaaaagaagccactgtacttattagcagtcacttcccattcctcccatctccccagtgtagacaattactaatctactttctgtttcaatagatttgcctattctgtacaattcatataagtggaatcatacaatgtgtggcct

SEQ ID NO: 70961 - DNA, 1142 bp, Homo sapiens
gctgagccttttggccatcagcttgatggaatgctagtggttcatcagcttgatggagtgctagaatggccataaaaggtgagactggtggatcctatgctagtaaatatgacctggcagaggcaaaaaaggcaaaagcatgtttgaataaccatcaggcccattgaggatgaattgctgtgccttccaaggtggaaaggaatttgatgtaatcaacctgccacaaatgtctgattggcttttttgagggatggttctgtattgaggggccactttgggccagtacttattggtcagacattcagcactgtcaatagctagattacccttggtgagagggagtatatgcttttatgcccatgcatagcctccatccctgacattatggctagtcagtttccatgtccactgtgcaaccattgtgatggctgaggacaaagattggctgacattcattggatgggtcatcttttccatctggttgttcaatgctgcctctactatagatgctttgttaggtattcacacctatagggtcatccacatgcctccttctcagacctccttgtatctgatcatgaagtattgcttcttccaggcatctgatcaattagcagaaccactagcccctgcccaacaattgatattgttctcacctcaaaccacttctttcttcatgtaaagttatgaagctctgcctgatggatttcctttcaccactgtcctttagaacagtgctactcaaactgatcatgtgaaggaactatatatgggtttgttttcagttcaacatgagtgatctttttgtaaaatataaaactacagttattacagcaatgtcaaattgctctaatgtttccaaatatgtactctcacttttaataattattttgtcgacttacaaaaataaatttatgaattggcactagtctatggattacactttgagtaacattgcagtagttcatccttgccttgggctatagtgtgacagtagttttcctcttgcaccaacgtatttagctgactcatccatgagccgtatggtttttttgcaggaagcattctgagggtggcacaaattgttattccacctggccaaaatattctttctgatttattatttgggccagggacagagc

SEQ ID NO: 70962 - DNA, 1122 bp, Homo sapiens
aatgagatattttatatattttttcatgccaagtttttgaaatccaggtttttttttttttttaactctgcagcacatttcaatttgggctagctatatttcaagtgctcaatttgccacctgtggctagaggctaccatgttagtacagtgcaaaattatagcagtggatatccatgtctacccctatggggtgaccaaaacagttctgatggtatcctggagatattgctgagtagtatttaagttttctttcctatggctgggtctacctgctttctaatctattattgttatttcctcttcttgtgaatctgtgttttaatctgtttatgcaagcttccaatttatttccatctaaacttataagacccttaggattttctacattatttattgtttattttagttgcaagtaattatgtaaacatgaattaattaataatacctatgaagaaggaaactattacttattaagtagctgctggatgctagatggtacactaggcactttgcatacttcaatctttttttcttccacattctatatattggaaaactgaagatccaaaagttaaataacttgtcctaggccacatagcaggtaagttgcaaaactgggattgtctgactccagaattcatactctttctatcatatcacttttaggaaattgcccattgtaaactttaaaataattgtgatttgaatactagttcccagggcttcattctgatgcctcaagcatagggccagctgaaggacaggtgatgctaaatgataaggattagctagtacaaaggagtttatgtttatttttgaaaactcctagcctggttgatttacctacttcctagggatgaaaatcactggcaactgttaccttgaacttatcctgttaactgttgttcaaaaatgcataacttgtgaaaatttgttataaagacatctttttttgtgtgtgtgtttaggtatgtttttaaggagcgtgtttatagatacatgctaaatgaagacagagctagacattgttactgtctgattacattgaaacctgtattaaaataataaaaaactatattaaataatacttgttcagatttaattgaactttattttaatt

SEQ ID NO: 70963 - DNA, 1052 bp, Homo sapiens
cctgtaatttgcaacaacatggatggaattggaagacgttatgtcaagtgaaataagccaggcacagaaagagaaactttgcatgttctcactcatttgctgaagctaaaaatgaaaacaattgaactcatgaatataagagagtaggatgatggttaccagaggctgggaaggggagtagggcagtggggatggttaatgggtacaaaaatataattagagggaatgaataagacctagcatttgatagcacaacagggtgactacagtcaacattaatttattatatattttaaaataactagagtataattggaatgtttgtaacacaaagaaataaatgcttgaggtgatggataccctgtttaccctgatgtgattattacacactgtatttctgtatcaaaatttctcatgtaccccataaatacatacactatgtacccataaaaataaaacattcttttccacaaacctttcattgatgttgcttatattaactctaattttattttgatagacacattaattaaaatgttctccttaatatagactcaaaactttttagaatatttcactgtttagaatgaatgcttctatatagcagaaaatatcaaagtttcataattacaagacatatttcctgggttagaactgcgtagaggaatatttgtgaattggatattactatcagcatgtgtaccctttctgttttggtaatccctctgtcattctctttttttttaaattttattattattatactttaagttttagggtacatgtgcacaacgtgcaggtttgttacatatgtatacatgtgccacgttggtgtgctgcaaccattaactcatcatttagcattaggtatatctcctaatgctatccctcccctctcccccgaccccacaacagtccctggtgtgtgatgttccccttcctgtgtccgtgtgttctcattgttcaattccacctatgagtgagaacatgcagtgttcggttttttgtccttgtgatagtttgctgagaatgatggtttccagtttcatcca

SEQ ID NO: 70964 - DNA, 2106 bp, Homo sapiens
cacctgtagtcctagatactcaggggctgaggcagaagaattccttgagcccagtaggtcgaggctgcagtgagttatgattgtgccactgcactccagtctaggtgacagagcaagaccctgtctcaaaagaaattttttaaaaaagaaccttcagatgatatataagcctactctggtttgtttgtaatgaatgcaggcccccaaataagctattgtttaagaaaaggtggttattatatctgaaagaaaataggaggcatatatttttacttttttggattaagtgggaatgacagttttcttctacaccttaagcttgccctctctaccagcgtctgcggggccgcttgatccttcaaatttctcatttttacctaacaggcctgatggctcattctgagcatttagtcgggaaatggaaggtccttactctctgagaatgtacaaggcaggaattagcagctgatctttagtttttgatctgttaattgggcagccatactggctattttggcaatattggtggcaaattgccgcttgaatcttacaaaagggtctggctgtgtgaccaactctggttttctctagcatgtgggctggggatttcatgtcaccagtggtgactggatgttcagaatacttgagtttacctcttatgatatgttagcaacttgaataatataagaagaaagatgtgttagtcatctattgttgtataacaatattatcataaacttagtggcttaaagcaatgtgtacttgttgtctcatagtttttggggccaggagtcagggcacagctgacttgaatcctctgctcaaggtctcacaaagcttcaatcaacatatttgccagtacttagttctcaactggggctcaattagggaaggagatgttttcaagctcatttcagctgttggcagaatttaattcctgtggttgtaggactgagggtttcaatttcttgctggctatcagtccagagccagcttcagcaactagaatcgtcctgcagttcctggccatatggccacttgcttccttaaagccggtaaaagacagagactccaacaaaatgggtatgacaagtttgtgtaacataatcacatagtcatgtacatgtatcccatctgtcgtgtcacctttgcttattcttttgactagaaacaagccacaggtcctgcccatactcaaggggagggatcacaatggtgcatggaaactaggaaatggggattatgaggattgtgttcagagcccacctgacatcagaagagaaaggaaaattgggtcgattctgctcccaggattttcttttcacttattatatataacttgagggcaggattcatgactgatttatcatgtatcttctctttgctaccatcacccacctactagacaatgtgttacacttagtagaaactcagttggtacttgcaggcttaactgttatgctataaatctagtatcaaagaaagaaaataaataccccttttctcagaagaaggtatcctagtgctctacatgtatttaatttgggagaatacagatcaccttgttaaatcagtgtagcaatatgatagctgtttgaagatttggaaccatatgccacgttgtcaggaaagactagcaactgtatcaggaggccttcttttcatagtgttctacttctttgtctatcagcattgcctcccaatcagcaggcaaaattatcaagggcttttgatttttgtctgtgagaagaatataagctgccagatcaaaggagaagtgggtatttctaactctgagacttgttttcctaaataatcatattcaacattgtagaaatattaattatgtgtatacttattgaccatgtagctgtagaattgacattttgcttacaccaaagctatgctgtttgtttttcttctttcttgggtagttaagatggaggttactttccaactttggcctggcagaatggcccctgcagagaagggtgggaagaagaagggctctcctgctgtcaatgaggtggtgacacaagaatacaccatcaacactcagaagcacatccatgagtgggcttcaagaagcatgcccctggggcactc

SEQ ID NO: 70965 - DNA, 1053 bp, Homo sapiens
tgccatctcagcttttcaaaactgtgtatatctttccaagttttacctgaaataactgcttccctaagaaactgttcctggtttctctccaccagcctccaaactcccatccaactagccaaccagaggtgatttgcctcttctttgggagagactgagtttggagtcagtcttgaatttgaatctgtaccctacaatatacttggtatatgatcttgaaaaatatttttgatctgcctgaggctttttctcatgtataaatatttcatatggctcttaagagggttaaaagtggtttaatttgttttcttatcttcatttggctttccacaattaatatagctcaacctcacagtatagtcatttgtgtgcttctcctatcccccaacacttagcagctgggctcagattgtgtcttccccatcttaaatatcctgaagccatgatcggaaagtattgatctgattgaatgcaattgaattaagaatgacatatttacagtgctgatccttagctgaagcattctgattttatggtaaaattagagaaattttgtattctccagtttgcctgtttcctaatctctgttacatcgtctatttttattagttcatatctgttttctcctacattgcaaaggaggtgcgatgttggggaggagaatagagtgacttgatttttcctttgatgggaactaagccatatgtttatattgagtcagctactccagcctctgaattctcaatcagatggtcagcagtgtttaattgaattcccaatatgtgcaaggctacgctaggtgctgtcactccagggagatgtaaccatctggaggaactttttcaaagagcctagaatatgtttctttgtatctaaattaaaatgatactaattttggcaaagtaaatagttggcataaaaggtgtcttttgcctctgcctttttttttctttttttttttaattctttcttcaaatctccaataaaaggcatccttctttttttttgctatggccaggatggcatactttttccttgatttctttccttcct

SEQ ID NO: 70966 - DNA, 1179 bp, Homo sapiens
tatgtcctcaacatcctcatcttcctgtgtttctcagcagcatttgatatcattgattgtctttttttctcttgaaacctttttctcccttgacctttgtgacttagtactaacccacttactcttctatttttatcattcctccttctttgagctctttgatagtttctttttcctagcttaggcatttctaaatattgtatcattggatattttgtctttattttatattttgtttatttcctttgatagttgtagaaaccatttctgtataagcagttctccaatttacatctctaattctgacctttatcttgagcttcacctgtgttttcaatcattggatatctgctttattattgtggtgttacttggaattcactgtgtccaaaagcaaatggagagagtgtctatagaccatgtaaactcctcttctttccttcctcaaatctcactgaaatggcagtagaagactttaaaaggtattaacttataaggataaagaaattgggatagcagaagagagatcttaacaaaattttggaagatgaaaaataaaggaagaatgctacctgcagagagttacctttaattttctgaagtccctatagaaaagacattgatgagatgcaaaccctttagagactcacatttggaaactcccggcaccacaaaaactgggagtaaaacacagagcagaacatggatcttggttgaaagtacaagagcctttagatcacccagatacctttctctgctgtgggaagttgggtgaaacttcccttcacctgctgagggaagcagaggcaattcaagaagaatacttccaaaaactcttactaatttcattagagtaataagagaagatattgtacttttaaaacaagaacggatgctatgaaacaggtaaaattagataacaagaaagtagtttggaaatttaaaatttattatgaactaacataaaaaattttagaagtttcaggataacattgaagaaatctcatagaaagtggatcatcaacaacagcagcagcaacaaagaaaaaaaataaacctaagagatggaacataggaaagaaaagaaaattagaggatcaattcagcatttccaagatctgaccaataggggttccatgcatgaattcatgtatccaagccttttgcaggtgccctcca

SEQ ID NO: 70967 - DNA, 1121 bp, Homo sapiens
acatcacttgaggccttttgtggtttggctccctcctaactgccccattttttcaccagttctttgtagcagcactctccaacccgactcaattcctgtacttggtgttttcagcaggcatcatggactttccactgttgcctgcccctgtctctcccagaatgtccgtctttcccttgtgtgctcagtgaatccctgctcatcctcccagactcaactctggcatagtcatctcttcaaggaagctttgcctgatctctctctatggtgcttccctggcaccttgtacatgcatctatttttagcacttagtatactgccgtgtaattatttgtttacatgtttgccttcccactagacaatgagttcctttaagtctgaaactttggtttagttatctttgaaagtgctgtacaaatgtctttattttatgcctagaacatatacagcattcaggagatgattagttgagtgaataaatacagaacagggcacatgctaatgggacatgatttggattgtatctttgagactaattgttgactgagaaggtagtcttggttagcaatgccagtgctgagaacaattaaatatgatatatttgagcacctattatgtgctaggcattgtgcccattgccatacatgttctagtttttgggacagtgagagccacagaaatttaataagtcaaccaggtaagtaattcgactacataagcaacagaattggatttggaatccaagattgcttgactcaaaagccaatgctcttaatgctggaaaattatcagagatgaggagggaaaagccactttaaaacaaaggcaaaacaatgtgtttagggtaaaggcaaatttggaatcatagtttctacttttcactatggattccagagatttgtaggagatattttgggagaggcagtggtaagctcgtgctcttagtaacttttgataaatgaaaaagtaaattgccgataaggtggagggacttaaagaaaattaagcaaagagaaaagaaaaagttgtggtggaaggtgaaggggagcaggcatcacatggtgaaaggaaggaagggaaagaacttgatcaatatgtttgtatcagatttggctaaaagg

SEQ ID NO: 70968 - DNA, 2107 bp, Homo sapiens
atttgcagctttgaacgcagccttttttgtctagttaaatgaaattggcagagaatctcttgcgtgcatgcaattaccctgcaaaagccacagccttcggtggctcctaccttctcttgcagaaggcgtttgctgtgccgtgggttatgatcccacaaaatgaagtgagtgaaccttctttctggtgagatgtcttcagcacagggtgtgtataaaacttgatggggcaggttaggcagccccagcaatactttcagttacctggacatagctgagtgaaacttggttgttatagctcaggatgaaggatgccaggttggtattgggatactgtatatggagtacggtagaggccttttaacgtgaagatgtcgtaggtgagactggtattgcttggagaatctttctaagatgacatttaaaaaaaatgtcaaggtcttcattcagcagtaccttggaaatagcggggttgatttccatacttgagaaactattaaaagttgtattgatggacaaatgaaatcaactgggagggaggaagcctggagagtattcactagatacaattcaagggaagctctttagtttctaaaatcgtggctatccaatttatcctgggtatttttggagtcatcaattgtcattcatatcttcgccttaaaacatctcttggataacccaactatagttgtaaaaattttagaaagcccaagtgatttccctggttttttaaaaactgttccatgctacccttgacaagtgcttaatagaaacttttgggtgatgacattgcgttctttacacaagttctcataggttgtggtggtcagacagtgcaattaattatagggctagctaaaagggaaaatggaaagtttctattacagtgaaataaattgagttgaaaaatagtcgatgggattttaaaaagccccatatgttattctatatactcgttgacagtgacattttattggaatgatagttcatgtcagaagaatgaatatttatgggacattttttcaataggtcatagagatgacttgtgtgtactcccttgttaaataatcttctctttcaaacacaggtagacaatgtgtgcatatttcagattgcagctctaataattgcctgtagtcacatgtagtttatgtgaaagcaatttatctctttacagttttaagttacacgtaaaataacaacgtttgctgtggatccatcagttataaaaatgattatgtctaaaaactggtatgctgaaagaattttctcaaaataaacaatttcttcgggaaaacatgaggaattatttgagaacagtgagaatttcacttaattttattgtgataaatcgtattttaaaaacactccttgtgacaaaactcaaaagcaaacatcctttaaatactcctttcccagctgtgatttttttttttttttttaaagaatagatgtcaagttttagggataaaacaccaagtatttaatgttagtggacactaaagtatcaaaatagtgacccacagtgtatatcttgagtgagaggttttctcttttgctggtgtagtagtagtagtagtagctctacaacaaagattgcacatagaaaacaaaagtaaacaacatgtgtttattagagtacttcgaaccaagttgtaaaaatcacaaacaaaaccaataacctttaaacttgcttttatccatcttatactgaatagtgtctgaagaaaatgagagttgaaattgtattctttgggcaatcatttgcataaaatgacattcctaagaaggcacattttatttagttgtcactttatttcaaaaatgattgtcatcagaaatttattggcaggataatggaaaatgtgtcccccgtcaaacataatgacactttgaaatttcttaatgttttagaaggaactgtagaatatgtttggcactttttccccgcttgctttattacctgggttgtgtaataatggtgtcagaccctatgctaagtgcttacacgtgtcatctcattcaattcttgtgtcagccttaggaggtccattgtcatttcacagatgaaggaataaaaagataagattaaggacttgcccatggt

SEQ ID NO: 70969 - DNA, 1467 bp, Homo sapiens
gtctgtgtccagatttcccttttatagggacatgagtcatattggattagggtccaacctaatgacctcatcttaacttacattaactcaaattagagttcttggtgcccttctcccatatcctttccccagctgcaacctgttaatcttttggtccttacctttttagtaagtggcactaccacccacacagccaaaagcttggcttcttttgattctaccatttccctcaactcatcctcatacatctgcaatccttcagcttgtcttattgcatatctctacatgtatttccaatttatcaatatcttttcgttttcacactcctgctcagtatgaacaacataatttctcaccttcagtagcttcctaacttccacccttgccttgctctcatcagtctttttaaagagaaaccaaatttctacacacactggaagatgggggtcctctttccttgcttaatgcagccatgacttgtgatcccaagaagcatctgaagtgggtagcagctccaaagcattggatgctggataagttgaccagtgtgtttgatcctcgtccatccaccggtcccacaagttgagagtgtgtctctccctcatcatcttcctaaggaacagacttaagtatgccctgacaggagatgaagtaaagaagatttgcattcagcagttcattaagatcgatggcaaggtccaaactgatataacctaccctgctgggttcatggatgtcatcagcattgacaagacgggagagaatttccatctgatctgtgacaccaagggtcgctttgctgtacatcatattacacctgaggaggccaagtacaagttgtgcaaagtgagaaaaatctttgtgggcacaaaaggaatctctcgtcttgtgactcatgatgctcgcaccatccactatcctgatccccttatcaaggtgaatgatatcattcagattgatttggagactggcaagattactgatttcaccaagtttgacactggtaacctgtgtatggtgactggaagtgctaacctgggaagaattggtgtgatcaccacagagagaggcaccgtggatcttttgacgtggttcacatgaaagatgccaacagcaacaggtttgccactcgtctttccaacatttttgttattggcaagggcaacaaactgtgaatttctttttcctgaggaaagggtacccacctcaccattgttgaagagagagacaaaagactggcggccaaacagagcagtgggtgaaatggtccctgggcgacatgttagatctttgtatgtaattaaaaataatgtggcatgattaaaaaaaaagagaaagaaaccagtatgatcttcttaaaatagaatgagatatgtgactactatacttaaaacactagcaatgttcagtctgcttaaaataaaattccaaatccctaacatggcacacaaggctcggtgtgatctg

SEQ ID NO: 70970 - DNA, 2037 bp, Homo sapiens
tataattttcaacaaaaagatggtacaaatgtaaaagtaaaaagcacaaactatacaaaagcaaaatctatggccaagtgatttaaaagcattacttgtacattcctttaaacatttgttgttagaagcaaaagagtaatttatcctgctaaatttggcaccatttgtaattataaaaattttgattaatactatttatattaatttctttaccttcattttttctccttaaggagttgattgtttttggaaatgtttttttccttgcacataagacagtttcataccattcttatagaatcatattaggtgggtgtttgcacatactaaatttataaagctagttttgattaaagctctatgtgagatatatatacatacacaagtcttctataataagagtcgttggtgaattttgaattctattttgttaggaattaaggttgaaatcaacatgaaagaatctcaatcatgcattataaaataaaagtacatgggtgttaagaaacaagagacttttaaagatttaaaatatatttctgatagaatttaactaagtggtgtgtattttaaaattcacattcttaaacataaatctatccaagatagaaaatgaaatagctggactactctttctttaagatacttgaaaattttaaaccacattgcaacactttatggtgctttgcgtgtttggcatgacatacacagtggtcctggtatataagtgcttgggggaaaatacatattttgtttacattaaattttgaagtgatttaggctttattgaaaacaatactggccttccctccccttctctaacatccattttcatttacgttatttaaaatatacaggcactgttttgggtacagaggatatagccaagagcaaattgatagtagtttacctcagagtattaaaaaaatcataataagtcatgttaatctaaaactatataatagccttagattaaatgtgcagatgtctaattaaagatttaaaatgtatagcgtatgtccttagaacatttgatttttaggtatacattcggcaaaaacagtctgttatggaaaagaaggattgatgggacattaacttcttccgagctaacattgtttctgaagattgacctattctatataaatttaaatttttctatgtttttctttttttttttgcgatgaggtttcgctcttgttgcccaggctggagtacaatggtgtgatcttagctcaccgcaacctccgcctcgtgggttcaaatgattctcctgtctcagcctcctgagtaactggggttacaagcgcccaccactacgcccagctaatttttggtatttttagtagacacagggtttcaccatgttggccaggctggtcttcaactcctaaccccaggtgatccgcccacctcggcctcccaaagtgctgggattacaggcgtgagccaccgtacccggcctctatcgtatattataattgcttattgttatagaagctgaatgttttacttactacttttaaatttatttggtcttcccaaggaaatcatacaaacggtagagattatgataatctgagcattctgtgtgcttagtttgatttttttatttataagcagtactatttttatagatgtttaaaattcataaaacactgtattctgagaggtaggtattattcaaatgttagaaattttttttaaaaaaatgccctgaggcttagaaaggacaaatgactgaaatcacaattagtaatctggtctttagacttaaagcctagttatatgcttttattatagcttagtcattaattcacacattttcccttatcttttttatcttttaaaggtgaccataaaactttaaattgtgtgtgtacgtctatgtatgaggtatatgttaccctgtttgtgttattcaaactacctaaaagataggatgatttttgtttaagtgaatcccaaactagcagtctgagaaatacaggaaagcctgataattgacttaccagagttggctttttttttttaagt

SEQ ID NO: 70971 - DNA, 1087 bp, Homo sapiens
atgaggaaggtgcaaaacctcaggcttttgttacttcttgagaaatggcttaagagtcactttaaatgtctgacttatttctgcttcacagccaacatttgaatgtatagttaggtacacaatcaaacacacactaagtatctgaggcatgtatcacaccttagttctatcataatgtgtttttcttgttatcaaaaaaacagaaaatacagaaaaatcaacattattgtagtagaaagttgccataaaatattgaaattagtgtgtgtacgtatattgtatatgtactatagagtatcatttaaactagggggaaatagtaaaactagtattattttaatgtactacatggcacataattgtaatattattgaataatgctacaaacatttttgtatgttcattttccttaggttccgatcagaaagctgtaattcattccaaatcctctcctgagatttctctgagatttgaaagtgggcctggtgctgtaatacactctttacttgcagaaaaaaatggatttctgcagtgccacatagaaaacttcagcactgagtttcttacatcttctcttatgaatattcaacattttttggaagatgaaactgttgcaacagtaatgccaatgaagatacaagtttctaacacgaaaataaatttaaaagtatgttaataaataattttatattttcatgttccttttccttatctggactttcattcatgtctaagaatgtgccttctctataaaatatattctatcagcatttattaaaatgattttgtcttttttggtaaatgatgtagagatcttttttggaaattaggaaatatataacaggcaaaatataacaggcagttttctcgctatatcagctgaaacatataaagatacatgtgttatctttaactcattaaaaatatgaccgaatgaagtaacatgtcaatgttatttttctttcctgtaggatgatagtccccggagtagtacagtatcccttgaaccagctcctgtaactgtacatattgatcatcttgtggtagagagaagtgacgatggctcttttcatatcagaggtatata

SEQ ID NO: 70972 - DNA, 1022 bp, Homo sapiens
aaatgcctccccccaatcgtttttcctttgattttacttttctaaatttgttttattcatattgaggagtggaggctctttcttttttctgtattgctttttgtatttttatttttatttttttagagacagggtctcactctgttgcccaggctggagtgcagagatgtatccatagcccactgcagccttgaactcctgggcttaagtgatcttcctgtcccagcctccctagtagctgggactataggtgcacaccaccacacctggctgttttaaatttttttgtagatatggggtctcactgtgttgcccaagctaatggtttcttttaagccctcctgatgcagtgaaatacttctgggagacttgaaaaatatattatgtctagcttttaatgaaaaacattttacaatccttgtgacctaattttttttttaagtaaatgaaaggttttcactataatgtaacaaccgtgttctgtaggtcacaagtatacttttggtctggtaggtcacaattgtatttttagagggtaatggtagtttcctatattatttcttaaattttgttttgaactgcttggcatactaatattatttatgcaatcattaatagatgtccgttgtggtatttaaaattactggtgttaatggggaaattgacatccgaggggaagatacagaaatctgtcttcaagtgaaccaggtgacaccagaccaattaggcaatatcagccttcggcattacctttgtaatcgtccagttggtaagtttttttttttaattatttttcatatacaatggtttaatatgttttaacttttatatatgtctcaccagcaatcctatcttggctataattgaattcaaggaaaattacatttacttattattagtagttagtggttttttctatagtgtgtggagcttcaataggaagacatagcttaatggttccatggtataaggggtagtagagaggagtgattttgatgaagaaaatttttgttttgttttat

SEQ ID NO: 70973 - DNA, 1118 bp, Homo sapiens
gagaagattcgaatatactttcatttgatagtgatggtaatcaaaacatactttcaagtactttaactagtaaaggaaatgaaaccatagagtccatctttaaagctgaagatttgcttccagaagcagcttcactctctgaaaacctggatatcagtaaagaagagacccccccagttagaacacttaaatcacagtcatctttaaggtaacaacattttattggcctttttaaaaattaatttattttgtggagcgtgtgtgcctatgagtgtattttgttttgaggcagaaaagctcatgacaaaatatggcattgttaacatgtagaagagtagatgtttcaaaatatgaaaacactttgagcttatacgtttaaatataatttcagctatggatgctatatacatattttaattctcttagaagtattttttagatagaattcttttctctatatgtaataattttctaataattttgttaacagtggaaagcctaaggaacgttgcccacccaacctggctcctctctgtgtttcttataagaatatgaaaagaagctcttcacaaatgtcattggataccatttcacttgacagcatgatattggaagaacagttattagaaagtgatggaagtgatagccatatgtttttggaaaaaggtaaagttatgatacggcttaagaattcatattacgtacatacaccttaggagaaaagggatgcttttagttatattcagtaattgttaactgtacccatgctttttaaagttactgaacataactaaaaataactgaatatttctacttatatttagtaattgttaattattaataatatttagttatttttagatatattctaattgttcattatagccccccaaaaagacttatttatacatacagggactatgcaagagtacctaactttcctctaatggttgttccattgtttcttttaaccagatactcctgcctctctatggctgagatccagcaattatatgtatgcagtcatttagaccataaagcaggcgacattaaggctaccagcctctattacagagactcctatatttggaaatttgattaggtgggcttaatttgca

SEQ ID NO: 70974 - DNA, 1362 bp, Homo sapiens
gtggatgaaagaagcattctatggttaaatcaatttctgttggatttaaaacagagtcttaatcagttcatggctgtgtacaagttgaatgacaattcaaaatctgacgagcatgttgatgttcgagttgatggcttaatgctaaaggtatcatacaaacaagtagtagtaatgatttaattttgttctttttattttatgatttgtgcgtatatgtatgttacattgattattaattcatgttatgttttttaaaaagattctcttcttagtggtcatgtaagtcccctttactcaatttaataagatttgaggggaagagttagtgttttacgtcttaataggaaagtagtattttgggggaaaggtcaagaaaaagaatttctgagctaagtcatgttcttttatcttcaagatgtatggatttgccagttggatgagattaatttttcttctcttctagtttgtcattccttctgaagtgaaatctgaatgtcatcaagatcagccacgtgcaatttctattcagagttctgaaatgattgccacaaatacaaggcactgtccaaactgtcgacattctgacctagaagctttgtttcaagactttaaagattgtgatttttttagtaaaacatataccagcttccccaaatcttgtgacaattttaatcttctacatccaattttccagagacatgctcatgaacaagataccaaaatgcatgaaatttataaaggaaatattactccccaattgaataaaaacactcttaaaacttctgctgccacggatgtttgggctgtgtacttttctcaattttggatagattatgaagggatgaaaagtggaaaaggacggccaataagttttgtagactcattccctctttccatttggatttgtcaaccaacaagatatgcagagtcacaaaaagagccgcagacttgtaatcaggtatctctaaatacatcacaaagtgaatctagtgatctggctggccgattgaagcggaagaagctcttgaaggagtattatagtacagagtctgagcctttgacaaatggtggtcagaagccttcttcatcagatacatttttcagattttccccttcctcgtcagaggcagatattcatctcctagttcatgttcataaacatgtcagtatgcagattaatcactaccagtatctgcttctacttttcctgcatgagtcacttatcctgctttcagagaacttaaggaaagatgtagaagctgtaactggcagtcctgctagtcagacatccatttgtattggaattttacttagaagtgcagaactggctcttttgctccatccagtggatcaagcaaatac

SEQ ID NO: 70975 - DNA, 1062 bp, Homo sapiens
agtctcgctctgtcatccaggctggagtgcagtggcgcgatctcggctcactgcaagctccacctcccaggttcacaccattctcctgcctcagccttcccagtagctgggactacaggcgcccgccaccacgcccggctaattttttgcatttttagtagagacggggtttcactgtgttagccaggatggtctcgatctcctgacctcgtgatccacccgcctcggcctcccaaagtgctgggattacaggcgtgagccaccgcgccggccctgcatatagatctttctactgcttagtgtcctgggttcctttttcagtcccacatctgctatcggggttctttctgtgctctagtcttgggcagcatttgctccctagtctactctgtgactaccatcatcaatcaatctacgttgagatattccctttacttcctttccttccagagtgtgatgcagtctctgcagcacccactttatttctattcccaaaaggcaggcacctccacttcacaattgcatgtctctgatagacttaaattgtaatttttctctgtttgtatatgtctcatgtaataaactacgaacttttaaggaaaaaggaccatgccctatttttttgttttctttgtgcttagggtaagacaatgtagttgacattcagtgaatcttaaaggaaagtgaatgaataaataaataacataagcaaataaaccatattcaggacattgttacagtgttccctctccactggtatctcacacctttgatttatttttcttaaatttagtctaaatgctctagatatgcataactttagcttttgtaggaataaatatgtctgaatttttagaataaaagatcttcaaggtgctctgaaaacaaaatgtcttttatggtagaaaaatatgtatatttcaggaagtgatataccctctaattgtaaatattagtttattttaggagagctatgaaagagtgaattcattttattattcaggagatacttggtttttacattactccaagcactattataggccttgattaaaagtgggg

SEQ ID NO: 70976 - DNA, 1038 bp, Homo sapiens
agtggcacggtctcagctcactgcagcctctgtctcccgggttcaagtgattctcctgcctcagcctcccaagtagctgggattacaggcatgcggcaccacgcccagctaattttttatatttttagtagaaatggggtttcagcatgttagcgaggctggtcttgaactcctgacctcagatgattcgcctgcctcggcctcccaaagtgttgtgattacaggcatgagcctagttttaccgtttttaaattttagttttattcttaggtaattcagaaaatattttagggaaaatatattattgatgaaaaataagatgtactatggttatttttcatgactttcgactgaaaatacttagatttttgtgtgaaatttccagtatttaaattggcagtgataaggcagtttcgaatctttttagagctctacagtagtcgcatctgcccagcaagtgaagacaacgcaaacttcaaatgctcctgatgtaaatgatgcaattgtgaaactattcaatgattttgatgttaaggaaacctcccatcatttagtgatttctcatctagatctacacatatgtgatgacattcatgctaaagaaaaaggtaaaataacttgcttatttcaaactattttggtttttctagaattgactacaaaactggattgtttattaaatctgttgtgtaggatgtcctgtaagataatttgtcataattgtgttcatatgaatatatagatgaaaggcacaactggaagcatatattggtatgaaattttattttgctttagcagtacttaagcttaattatttgttagctatcaatgctaacaataaaattagctttaaaaaaatcagactgaatagatgatcctctaggaggatgatgaaatattagactcgcctttgaattaactttttgataatgttgaaattgtctccaaattaaattttagtccatacttaattcataattatttgtagatgtgttttcagcattgcagtttttctacctattttgaatagaagcacaa

SEQ ID NO: 70977 - DNA, 1004 bp, Homo sapiens
attactttttttggggagggtgcggggagacagggtctcactctgttgctcaggctggagtgcagtggcgcaatcacggctcactgcagccttgacctccctgggctcaggtgatcctcccacctcagcatcttgagtagctgggactaacagcatgtactactgcgcctgcctaatttttgtatttttggtagagacagggttttgccatgttgcccaggctggtctcatactcctgggctcaagctatccacctgccttgtcctcccatagtgctctgagattacaggcctgaaccattgcacccagctctctgtattactcttaatcattcatttataaaatgtgcacattttaatgtctttactctagtaaatctttccatttaaagccctattttaacttctcagctactcagaattgaatttttaaattccccaaactaaaatatgttgtttgtttcttggtaacgtgatttcatgcatttgagctttacattaactgaattacttagattaaaagtattaacagctttacatatgatgaatatgaatatgaagaggtgtaattgaatttgatggaataatgcaatttacaaaaataaaaacatggtgaatatatctaaaatgtcatgtgaaaattaactgagaatatacatttgctttgtttttaaaaatctacatttttctcattctgttttgcatgagtaagtgaagttaatctctgtgttctccttaggttttgacttttaaagaaataaattggcagatgataagaatagaggcagatgccacccaaagttcacatcttgaaattatgtgtgctcctgttcgattaataaccaaccaatcaaaaatcagagtcacacttaaaagaagggtgagtcaacaagattacatttttgattcatgtgttaactgttggatttgactttttgatttgtgtgttaactattagttaactataggaaattttaaacaatgtcttaggtgaaatattggcat

SEQ ID NO: 70978 - DNA, 1056 bp, Homo sapiens
ttgctttccacaggttgtattttgatagatgaaaatcagatgctaatacagcagaagtatggggatcatttcataaagtctttttgaaaagttagaagttattaaatttttaaaaatatgttgtctgcttttttgcactcagtgaaatttaaatctagaactatacatgatttttctacaacaggatttctgcattatttttgcgttcacattaattgttgacatagatttttaatgtgattaatgcctcctcatattgcgtaaaatagcagctctgaacatgtatagtattctaggtgttatgtaaaacaattgataaaacttttcttgaggatgaatgcattcgtgtgtgtacacagacacacactcacttactcctgttttacaaaggttgagccacctttatgttagtgcatgccatgagaatacctacagtgcatgccatgggaatctaatggtgattcgttccacttctaagagttgactaaaggccaggtttatcagatgtgcagtttatatttggactacagatattagtgactgggaaaagagctttcatgttaacttctttgtaatgtagcatcatcctgcaacttcagattttacaggttagattatgatttcagttttcatagaatagttgttggcctttaggttggctagagtcggaaagaactaaaatgaatcattttgtccttgtgtgcttagtatagttgatagtgttcttcctaattcttgtttttatagtatcataagctttataattttggctttctaatcatgtgatgatttaaactatttaaatcatcctcatattttgacatatggcagtatggttaatctatttcagcattttttcagacttgcctgattgtaacagtcatttagagtgcttattaaatctacaaagtctctgaagctccttttcttgaatttctgattcagtaggtctggaatggatatcaataaaatgaatacattcattgagtggtgttcagagtaaaaaaaaaaaaaaatagaatgtgaatatgtatttttgggtctcactctgttgcc

SEQ ID NO: 70979 - DNA, 1024 bp, Homo sapiens
agaaaaatattaccctgagaaagaaccttttccattatgggagtgtttattttttttcacatttcctgcttatttcatatttcccatagttttgtgtctcatagctcagatcttagattgtgataagctttttggggtagttcagtcctacttattaatatataatttcatcaatgaatatatctgggagtagagattctgttttcatgaaatctgatgattttagtagttaatggctatgtcttaattccccaccccccaacacctgtaatacacatagcttttccaccagataataaatgccttgagaactgattgagtgctttgtgttcttttttggcatttgtctttttagacctgtagagaggcacttaaatgactctgctcactttttactttcttcctaaagaaaaatgaaagagaaaataatcttaaataatactttaataatatacgtagaataaataatctaattgtttatattttaacgtttttattagtccctggataaagtaataatggaaatgagtacatgtgaagaaccaagaagccctaatggcccatcaccaattgcaactgcttcaggacaaaggtaagctacttccattaatctgcatgactgccaataacaggacattaaaaaaaaaaaaaaaaaaagccttaacctcaaatggcctctatttcagtcagctctcccatcaaacattttacaattttagttatatacattgcaaagttgcagatttgacttttaactttctttattcatcttgctttccttgctattattaaataatagtgattaactaatggcagagcagcaacagaaaatggaagcagaagaatttaggcattatataaatcagatagcctctgatcagtttctctgcatatcattttctgtgcatcagtggaacttttatgactcttaagagttaagttgggaggctgggagcggtggctcatgcctgtaatcctagcactttgggaggccgaggcgggtggattccctggactcaggtgt

SEQ ID NO: 70980 - DNA, 1026 bp, Homo sapiens
tgaggccaggagttagagaccagtctagccaccatatcaaaacactgtctctactaaaaatacaaaaattagccgggcgtggtggcacttgattgtaatctcagctactgggaggctgaggcacgagaattgcttgaacccaggaggtggaggttgcagtgagccgatatcgtgccactgcactccagtctgggcaacagaaagagactctgtctcaaaaaaaaaaaaaaaaaagaaaaaaagaacttacaatttctattcaaaagatgtctgaggagatatagctagtaataatttcttaaataaaatgggtacatctggtttcaaaagtatgagtgagttgcttagtttattttgtagtttaagaaaagtgattttatataatttggtgtgtctgtcctatattaatataacacctgtattgattactgtttacattattttcttcttaatgattgatcttaaattaaaaatttttcatttgtagatcccatggacaaaactgaaaacacatcccatctgtttggtgagttctgaaaccactttagaaataaacatttatatatatacattatctagctactctgttcatagtaatcttttgtttcatggaaatatagtctggatttttcaccagttaggtttcattttattttgataggactcaggtttttcatcctttaaatgagaagctttaaccttaaagtaggagcatctttaaagtttttcaggtctagaatactgtgttctaaattggtatagtattttattgcatcatttaactctttgttgatgtactatgggattattctttcagtaacatttgatccagactgtctttgtttctccttttagtgatctagtaaattatgaaatatgttctttaatatactttgctttttaaggaaagttgaagaaaattgatcatttgttcgttcatttaaaaaatacaatgatcaagaacatgaataaaacaagacagtttcagataataataaatgctatatatgaaatagagaatgaaga

SEQ ID NO: 70981 - DNA, 1590 bp, Homo sapiens
cagaaacagatagtaagtacataaataggtgaaatactgtgtaagtacagtatatcagtgtgttaaatgctactgaaaaagtaacatagggaaaggggatgagaagtacaataaattggggatggagtttgcaattttaaatctggtgattgggaaggcttaattgacaaagcaatatttgaggccgggtgtggtgtctcacctgtaatcccagcactttgggaggctgaggcgggcagatcacttcaggccaggagtttgagaccagcctggccaacatggtgaaatcctgtctgtactaaaaataccaaaattggccgagcgtggtggtgcgcacctgtagtctcagctactagagaggctgagatgggagaattgcttgagcccaggaggcagaggttgcagtgaactgtgatagcaccactacactccagcctgcagagtgagaccctgtctcaaaaaaaaaagaaagaaagaaaaaaaagaaagcaatatttgagaagagacctgagagagatagtgggaacaaatgcaaagggtccagaactgggaacttgtttgatattttgaaaacatacgaagaccaccaatataggtggagagagtaaagtgagaagaggaagatgcgatcaaagagaaaacaagggccagatcatgtgggaccttgtagtgactttgacttttactctgagattggaagccactggaatgccttgagccaaggatcactctggcagccatgtgggaattaaataatagaagcacaagggcagaaacaggaacccaattaagagatgttaactatttaggtgagagagaaattggattgaacgaaggcagatgcagtggagttgttgagatagtgatagtcaggttctaggtgtattttgaaggtaaaggcaggattgaccgacaggtaagatgtggattgatagagaagagaggagagcagtaatgggtgaccatccagagtttttgacataagcaacataagcaatggaaaaggtggaattgctattaactaaatcggaaaattggagaagactgcaggaggagcaggcttatgggagaagatcaggagtttgttttggatatgttaagttggatgaaagttcgatttttttttttttttgagacagagtctcgttctgttgcccaggctggagtgcagtggcacaatctcagctcactgcaacccctgccttctgggttcaagtgattctcctgcctcagcctcccgagtggctggaattacaggcagccgccaccatgtttggctaatttttttttacattttttatttttagtagagatgaggttttatcatgttggccaggctggtctcaaactcctgacctcaagtgatccacctgcctcagcttcccaaagtgcttgggattacaggcctgagccactgcgcccagcccaaatgttagatatttaattggagatgtcttctcttttatttgtgatctaatttagactatacatgttttagtctgacaacaatggaagtatgtttgtggttatcctttggcttatgcaataaacaattactgggaagcgaattgtgagttgaattttcagggg

SEQ ID NO: 70982 - DNA, 1074 bp, Homo sapiens
gtctcctcaaatctgactgatcattggaatctcttggggcacttgaaaacaaaacaaaacctgtatccgtgttctcagttcctcttcctagaattgcctgtttcataagtttgaaaacttaaaacctcttccagatgattggatagtcaactaggaaatctttctttttagaaaaactctccttccctgcaaattacaacctatttgtttattggacattttcttctaaactctgccagtttcttccttgccaaatcataagccgtgttttctcaagtgagtaccttatgcaataagccagtagaggtgtggttattctcccagttgaccattactttactcatctttagaaaaggcagaagccatataaggttttttattggcttttgaccttgtgaacacaatctggttatggactgtgtgggcttcatttactcaggatacactctgttgctgattctcatatataatgtgtattttaatagcagatgagtggacaaagtcagttggaactgggcttttggcagatgatacagtgttaccgcaaatgtttattgtagaaagaatggtttaatctttgtcaatttcgttaaaatgtacaccttattcagagtctgtgttaaatcatcttaataattttttaaagatttagaaacagttgtattttatatattggaattttttatattgttttgattttaatacttgattaaaataaatatttatttgagagcctttattcctagggttttgttaacacttgaattttgatagtttcaagaatatttttaagtagctgggggaagttacatacttgattttctagcactaatggtagtaacaatagcaataaaaataggcctgtaatatcattacagataacaaccaatagaaattccagttttctttcttatcagaaagaggaagcctactaatgtataatgaattcgactgacctaaattgagaaaatcgtcctcatcatggattaccactttctgcagagccagtataacatacactgatcatttctttaattgtactggaactaactttttgtttggtttgagacggag

SEQ ID NO: 70983 - DNA, 1049 bp, Homo sapiens
ttgagcatggaattcccaaatgatcaaaatctaaccatttatatccaggttatgagtggtagtatcatggaaggaatattttgtatgtgctttggattatgatatgaatgaccttgaacaagtaatgtagccttgcagagcccaattgcatcattaatttaaaaggaaaatatgcccgtgttacagggttatatgagagttcagtgggataatgtatgtaatatgtttaatgaatgacatgttgctgtcttgcttactattattcaagaattcatggagtatctactgtgtgccaggtacttttttatgatagttagtggatatgtgatggtgaacaatataagctatgaaggataatatagggtgatagagaatagtgaaggatctttttatttgggaagcagagaaaacctctcaggaagctgaaatctgaatagagagtagatggctgattatattaagggacctatccttttatgggaggacaactgcatttataagtcaaatgaaatgaatgtctttacctgaatctaggaaagctgatggttgtaaaattgagagggaccattattttaatgatttagaatattgtggaaggagattatttttgcagccccctcagcactacagctcacagattgggtgggttagcagaaaataaataacaagaaaatatgagtcatggttgtttaaagtttgttatacataggcctcatataaagttagcattataaggtaagttcaaggataaggaccatggacttgcttacatcatttggaaactaattttgaatagagattgaatacatattaaagaaatgtagagatgtaggctctttccagaagggaaagggggaatcctaatagaatagagccacatatccagtaaacacctaaattaggggagtgaaagtagacagtactagaaacacaagacatagtaaatgttttttatttagaatgtgttctttgttccctagaaactagaatcattgtaccattataggtatattatgaagttctctcttgtctctcctcctttttttctt

SEQ ID NO: 70984 - DNA, 1117 bp, Homo sapiens
tcagaactaactagtattggttggatatatatcatgagtgggtcagacactgctaggtcaaacttccacacatttgtttaatcgttactacaatcttttgaactttttaactaaatcacatagctaattagtgaaagaacaaattgcaaacaacagtctctatctgagctcatacaacttttgaagcctgtgtatcataaaacatgagccagaccttcacatgttcatattacatattacagtgataatttgtcttccggaagagactccagtaatctcagttgtaacggttcttatttctcattttgttgcatggacttttttacatttgggaatttgggaattttgggattgaaggcgtgatggcatttttacttgcatgaccgagtagaaatttaaagatagattactactgcttgatagttgtttggttgaatttgaagtaacccatgtaattccttttcttactacagcctaaatttccttgtaaagaatgggacccaaatttaccttcattgtgtcttccaaatcctgaatatttggctcctgaatacatactttctgtgagctgtgaaacagccagtgatatgtattctttaggaactgttatgtatgctgtatttaataaagggaaacctatatttgaagtcaacaagcaagatatttacaagagtttcagtaggcagttggatcaggtatttgcctataaataatttgcttgcattaaaaaatttattaaatgtgtctttgatttttttccaaaatgtgttcaggaaattctttaaatgacatgagtatctcattttaagtttgcataagatcagcttaataatttattatatttttattttaacaaatttataagtaacgcagactaggccaggtgctctggctcacgcctgtaatcccagcacttggggagacccaaggcgggtggatcacttgagtccaggagttcgagaccagcctgggtaacatggccaaaccacttctccacaaaaaaaaaaatacaaaaagttagctgggcttggtggcacatgcctgtagtcccagctacttggaaggccgatcagggtgggaggatcacttgagcctgggagtttggggctgcagtgag

SEQ ID NO: 70985 - DNA, 1060 bp, Homo sapiens
ctttatgtaccatatatatactttgtagaaagttacaggtttaggaaaataaatacttgtttttctcttgcactttgaagtatttgaagtatttttgattattttgttatttaagtctttaatatgtaggtgctttgtgccagttgtttctctccattttattgctaataactacttccactagaataggaaaatgcttacagcaccatgggaataatgtgtatatgtattgtaagtgaaaaaagtaatcagtctctcatgtatataatatatatttgctagattgaaggtaatgttggatttaagagcagtagagtcacacacctgggttgaattggggcttctttatctccttacttgaagtatgacttgtgtcgttgccatcttaaagcttctatttcctcatttctaaaatgaaaaggattgttgagattaaatgaaattttctggcacatagcaggtattattacatgtttgtagcattgtataggaatagcttattagttatatatcaactatctaatttaatggttttatgattctttgtagtccttcccttgaaaggaggggaacagaaggaagtatgtggtggtaaggtgagaatttctgtgaattagggaaagaacaagtgagggagctgtagcctgtgaagcagggttcccccaaatggtcaaggtgtcatgagggaaagttggtggagccactgttccctaagctatgcatcagtcaagatagtaccctaaggatcctataatctgaattcttatttgcctccattcttttttctcttagttgtccagttaaaaataccttttgggccaggtgcagtggctcacgcttgtaatcccagttctttgtcgtgtcaaagcaggcagattgcttgagcccaggagttcaagaccagcctgggcaacatggtgaaaccctgtctcttcaaacaaatacaaaaataagccaggtgcctgcctgtggtcccagctactcaggaggctgaggtgggaggatcacctgagccctgggaggtcgaggctgcggtaagctatgatcgcgccactgcgct

SEQ ID NO: 70986 - DNA, 1145 bp, Homo sapiens
ctccagcctgggtgacagagcaaggtcctgtctcaagaaaaaaaaaaaaaaaaaaattaaacactcctttcggtatgttgttttaaaaaactgttgtatgttatcatatggatatatgtaacagctaagagaattacttgagaggagtatttttacatgatttcatacttgattttcccttcttctgagagatagcaaaacttatgtgttgttatttaaagataaacgaggacttgtgttatcaaagaaagagattaggaatgagatcagggagtttggatgtcatacactagttattatgacctagtatgactttgagtaatgtcttctgagctttttttctcatctgtaagactgaaaagtgattataaccattcatttttcaaagagttgttgaaaggaccaaataatatatatgaaaatttgtttcaaactatatgacagtttagccatgcaaatgcaaaactttgtaatatcagagagaaaagatgagtctttccctaatattgattcagtttattttctttataggagctctgtctaaacatcattccaacctttgcaaatcttatagactacccatccatgaaaaacgctttgataccaagaattaaaaatgcttgtctacaaacatcttcccttgcggtaagtaattgcatattaatttttgtttttcttttcacttgtcagtgctttaaatcattttcttattgtttaataacccttttatagattgttgatgtatttcatcttggctgtagataacttgtatatagtactataaaaatgagctgtagttttctttgatacataatttataatattgcattcctaaccttacttgctgtccctttactttgagtgcttcagtaaaaaagttgggtgattatttttttcttaatccttttctgctttaactgaatttattttgttgttagtttaaaaatattatgagagtttaacttggtatctaagcgtaaaaacttgttgaaaagtttccttttataaatagcctttatttttagttattggtctctaaatgtcttatttctcactgacttgcccacttcttaaaaaagtagagtacaagaaagcaataaattaatgtgaatacaagtaggataaatagttgtgctaaaaaatgt

SEQ ID NO: 70987 - DNA, 1102 bp, Homo sapiens
gaggtcttaataactgtatatttggaaatagaaaacacatatatggataccttcacatgttaaaatatttagtttaaaaatgaattgaacccaagttagagtaaaatactggaatgtgggtgaaaatgatcacttggtgcaaagaatgtagtcctttttattattcaaatgtccccaaaggagtgttcttatgatagtaacacataatgtagtaaaagtttctcaaattctaatcactttaaaatgctacaagattgtagtcattccttgactttagctcactagtgacctggtgaagcaatcataaattctttgtgaaacaagccaggaaaattagtaaataagtgaatttcctatgttgataaaggatgagagcttctaaatctacatttattcttgagactttaacatatttatatgaagattaagtttacacttaaatattttgttctagattttgaaaacttttaatgactaatgcaatttacctcttttaataggttcgtgtaaattcattagtgtgcttaggaaagattttggaatacttggataagtggtttgtacttgatgatatcctacccttcttacaacaaattccatccaaggaacctgcggtcctcatgggaattttaggtagctgaaaatttaatgtcatttgatgctattttatcatgcaaataaattttccaatctataaaacaattatactctcctttcgtgtatatagcatttcataattgaagaatgatgtgataaataccataatataacttttctctttaagtttagcaaaagcagtagaatcttgacatttataaaggaataagatatttaagaattctagctttacgaatatcatgatagcatgtagttttccccataaaatggtacaaagtgagagaggcaaacaaagctactggaaatgctgatactggtcttagtagtaatatctgaggtttatttgatactcaatttgtaagaggcaaagtattttctctgcgttatgttattttattcttccccaaattcaattaaataggtactattgtttctattttataaggaaactgaggctcagagaggtaaaataagtgattcaaga

SEQ ID NO: 70988 - DNA, 1050 bp, Homo sapiens
agtattgaaaacaatcttaatcttaatcaggtaggagtatttttgtgctttattcattttattcagcttacttttttcttggcattagatatataaatatattacaaagattggttaaaaaaaaaagggtgaggggagaatatgccacagaactaaatgaagaaagtttgtgggtggaaggatagattgttaaagacgtcattggtaaatagtaaatgagcaggatgttgagaaatatgtaggatttgggactactttaaatttggggctgggaaattgacatgaatgaagaacaaagttatagaatgtgtttggggagtatattcattatttattgattgctacagaacaaatcaccacaaacttaagggtttaaagcaacacacatttattatctcacagcttctgtgggtcaggccagaacatggcttagctggattccctgctcagggtttctcacagtgctgtagtaaaggacttggggctcgttcaaggcccagctatggagtgatctacttctaagcgcacttacgtggttgttggcaagattcagttgcttttgggctgttgtacttagggcctccattcttagctattagctggatgccactgtcagttcctagccacatgggactttccaacatggcaacttgtttcatcaaagcctgcaaaagagagtctgctagcaagactgaaattatagtcccttgtaatcaaggaagtgataccccatcacctgtgccatagtctgttgctttagaaacaagtcacaggttcagcccacactcaaagataggggattccacaagggcatgaatggcaggaggaggagataattgggaaccattttaagagtctatatatcactgggaaggaataattcaatttgattggcagatatatataatacagtaggagaataatgggagaaagataaattgagactagaataggtagactttaaatgcctgtctggtttaggtatttgaactttcaaggtgtggtaaatgtttgagtaaaggaataatgtgtccaaagattattatggaa

SEQ ID NO: 70989 - DNA, 1069 bp, Homo sapiens
tgaatgaagtaccatagggatgaatgatcagcagttgaccaaaattaaccaaagcttaaactatgttaagacatagtgctaggtatgctttatgaaatctaattatttgaaagttggattatgtacatttaatttttcaactgtcagaaaacaggatttattttagccagatatgtcattgcaatctgaataagcaggaattttctatgcctattaaatggattatttctagaaggcacaaattcagatggttaattttgaattatcccaagaagatcaatatataactgctaagggtgaatttatacaaggcccctgaataatagctattaaacaactccgggagtaaaactcattattgagacatgttttctggaacttaaaagcctcatcaactatcatatcatcaccaaagatattataaaagcttgctatgatatgccgaatttaaatgtatcattcttattgaatatcagcgctgtgactggatcctattctactggtaaaaatggagaatattatgattaatttactgaattatcttaattgattacatttgctgctaacttgaaacattgtaaccatatcaatttctcattataccagttcaattctttcatttccgtcataaaagaaatgcttaatagattggagtctgaacataagactaaactggagcaacttcatataatgcaagaacagcagaagtaagtaggttgcacatgaattatatgtggtccgggagtgaaattatagttgtcttatgattgattttctggaatatggaatagaaaacttgctggatttaaatttgaccacatgtaaaacatttcaaaatttaccatcatgttaataagttgaactgaattaaaatagaatgtggttgaaaaatctagtgtcacttctgagtacaaaagtgtaatatggtataattttagcattttatctacataaagaaaattctgtttctgaaaaatttcttgtcagcagtagccactagcattgtaaactcaggttgctgaaaactaaaagcaccaattaggaaaattttttaaatttatgaacttct

SEQ ID NO: 70990 - DNA, 1189 bp, Homo sapiens
ttaaaatgcattataggtagaaataaatttttaataacaagtatttatatttgagttggcaaatgaacccttcctttttcttcctcctatctaaatcttacctatttctcaggacatagatctggctcacataacagtgattatagcattcattgttagtatcacagactcagaacttaatcacattgaattccccatattatatcttgtctttgagtgagatgttaagctctttgacaagagaaccatgcttgactggttttatgacaccttgaataaattctccagtaaatccccaatgttgagtttaagaaatggacttacatacaaatgttatttttggggcaagcagacattaacagtagaaaataatggaaaagatgactcttcttaaagagtttaattggggtctaataaattccatgtgaataaataatttttggcatgagtatttaaaaatatgcatttctttttattgttttatcataattcaactctcctacagatctttggatataggaaatcaaatgaatgtttctgaggagatgaaagttacaaatattgggaatcaggtaagaagcagcttaatttttgcagaaagtatgcttcatctggagggcttttaatctttaagcagcaaaatcacatttttattgaacttatttaaattattgacatttttctatttcagcaaattgacaaagtttttaacaacattggagcagaccttctgactggcagtgagtccgaaaataaagaggacgggttacagaataaacataaaagagtgagtttccttactgttctttcagccctcttattttatgctgtaggacttcctgtaaaccacagatttttgttgggaaatactgttcagcagcttaacaagaaacatttgtaattatctttctgaaattcctttatcagttaaacatgaccctaacccattttgagaataaacatacttaagatttttagcttccattattacttgacttgccacaaggtaatatttatagactccttgactcctttgtcctttctcttgtactttgccagtcacaccccttggtgaatcccactgtctctctttgcttctgctcctgtgttgatggattctactatagatttgtgctgtccagctatcctaggctgtctctgattgttgctcttcagtattttaatttct

SEQ ID NO: 70991 - DNA, 1973 bp, Homo sapiens
aagacaagacatcaaatttgctgtagacatcagcagtgaaagaactgctaatgttgtttcattcattctttgctttttgtgagttcctaaaatattcttggggtgagatagattagagtttaaatagatttcccaattttcaagaatgaaatcactaaatcttattgtcattgtctggaaaaaagtgattctaatgaatggttttaaaataattattattttcatgctggaaatacttttgcacagatcctgtgagtttttatctaaagttaaattatatagtaatttgaaatacagcttactgtgacaatcaccaagacaagagtagtttgcttttcagtgaagtagtaagatgtactttacccgaagagattatcttttgttttacaaatggacttaataaattgccggttgattttttgctttattttgttttaaggcatcacttacacttgaagaaaaacaaaaattagcaaaagaacaagagcaggcacagaagctgaaaagccagcagcctcttaaaccccaagtgcacacacctgttgctactgttaaacaggtcagagttcatttcttttgtgtaatttccagaatacgactgttaaggagtaaggtggtatagaacttagtctactagtatttgtataaaaatatatctcaaataataccttaatatgtggtttctaagaagtatgggcataaatgattttccaactcagctataacctgcctaatgtataatgttttgtgacaatgcttgttaccagtaaaaaagaagctagaagaataggaagggttcttaaaagagattaggactcatagtactcattcaactctgttcactctgaaatgatcagaatattatattcatgctcttaacatatttttgagctgaagttattttctgtgtttgacttttcaattatagttagatttgtaacttgatttaagatgtacctacatgacctggctagtatttgttttctcctgtgttccaggcactgttccaggtattggtgctatggcagtgaataagggccctgcttgtagagagtttacactgttactggtttcagagatagctttatcttaaaagctttctttaaactatttttttgttacctcttaatcactaacattttctctgagaaaaacctttgtgggccaagaggcaaaactgagaatattttgtaggtacttttttaagaatagaggaaacaaattcctataaagttttgatgaaattcaaactatacaaataatagtaaaaaattactgtattttttgtaatatagaataagaagaatgcgattctttttttgacaagataatattttgcttaattggagtttacagttagtgttccctatcatcaaatcgattgcaaatattcatctgtaaaaactatataaaaataggtggcaggctgtatttgaccggcaggctatagtttgctaatttggtgtagaccattgagcttaattctaacttgtcctttataatttaatctgtcaaatgtttactaattataaagtaatttatatttcttagagataaagtaattctctcatatttttcagactaaggacttgacagacacactgatggataatatgtcatccttgaccagcctttctgttagtacccctaaatcttctgcttcaagtactttcacttctgttccttccatgggcattggtatgatgttttctacaccaactgataatacaaagagaaatttgacaaatggcctaaatgccaatatgggctttcagacttcaggattcaacatgcccgttaatacaaaccagaacttctacagtagtccaagcacagttggagtgaccaagatgactctgggaacacctcccactttgccaaacttcaatgctttgagtgttcctcctgctggtgcaaagcagacccaacaaagacccacagatatgtctgcccttaataatctctttggccct

SEQ ID NO: 70992 - DNA, 1144 bp, Homo sapiens
accaactcctcttcaggtttttaaagacccagcccttcccaatctcaaagagaaaaaggaaactgagttatcttgaataacataactttttaatcaaatgtttattttggcttgtggatcttggtgttatttaaaaaattgaggtgatggtcattgcaagctcatctattaagtactatatggtacacagtctatgagtcattagtcttcattttaatatgtaaaaaatcttgatgctgtattgatttgtttgcatttaagatgacagtgagaaaatgataagcataaagagaagtatcaggttatttgctttttccaaacttttcagatgaactattgtttagtacagagactgagcaaatactacaaaattcaacttaaccttcatttcattggtttaaatgcgttattaaccatcttaagtgcaaactaatcattgtaaattatattttagcatggtctgcctcaaatagtaatgtatttttctgcattcacttggatatatttagaatcacttttttcctcctgtatcaaggaagaggtatgtgctgatttgtttggatatttgacaaggcactctgatgtgacttccctgactactaccttcatatttcatttcaaattcaaacttctgaggttgcagcatatatgaattgcattttcaaaagaagatttgtaagaattaaactatatttatgagtaaacttttgaggtttctgctgtattgtttcaaatgtaataaactttacttctgtaaaaattgagcagttgtatcttctgaccaccaacagattttcagcttgccatgatagtctgacctcattaattactgctactgaagttcaatttttttctaggaattttaggaaccttttgtttaaatattttaatttctattagccatttttaggaaggaaagaatcaattctcttaacaggaaacatgctttatttttcaaaacctttctctgatatttttctttaatttgctgattattcaaccacagagccttatgctataaatgtcatttgtattttaaaaaataatattccactcataaaactttaaaaccatctttcaacgaactatatatgtattatagttgctgccatagagttgatggtttttaattatctggaaccag

SEQ ID NO: 70993 - DNA, 1213 bp, Homo sapiens
ttcagaaatgatgttcctaatttatattttgataaatagaaatgatgtttggagaattggctgtttcaaaagtagtatctcctcatttatattttctcatttaattttcatttattcactatgtttttactaagctactcttcctttttttttcctatcaatttaagtttggagataataggaaaggttcagttatttggatagattactaaagagcttgctgttgatgatgaggaaagtaagagattaaacttaatatgtattcttatgttttactttcttacagtaacgtgtgtattttacttcttattattggttttcatactttgatattagatataccagtacatatctaatgagtcatgcaatggacatagaatgatattagatatacctttacagatctaatgagtcatgcaatggacatagaatctgagaaaataggaaacttgagtctgttggccaatttgtctcacattgagtttcttgatttttaattagagtttagttgtcacagagaaatgcttcagaagtaatgtttatgagatacagaccataattataactgtatttctttaatgtttctcctaaaaactcagaaagtgttttcatttgattacattgttacagagtaggtagggtgttttggttaacagaaagccaccatgtatttcataagggtgttacaaatttccaaagaactagaatgtaataaaatgtagcagcctactaaatgtgatgtcatctttgcctctgtaagcatcctagagtttatagtattatgaccatcagtcatgtgctggatattgctgaagtggtgactcatagagacttccgcctactgtcatacaacataaacgtttctctaagaaagtataatattagctatggtgaagggctcactttatatagatagttagctgttgaaaaaaagtttgatgttcagcatgtcttctttgttacacacacagagaatttagaaaagcactgtgatcccagtaacattacatatactgttctacaggttgcttttgttcacttaacaaaatagacatattttcatatcagtgcatatagctctgtgttattctttgaagtggttaaatgagtctactgtatgaatgtcccattagttatttgagcagttccctgttaatggatagttagatattgttcttatattttttatgttagtgtttatatatgtccccat

SEQ ID NO: 70994 - DNA, 1026 bp, Homo sapiens
gccatttgaatgataaagagttaatgcatttctggtccttaacggcaggaagcatctagttcaacattccacatatagcaggtgctcaaaatgtgctggtaactgatggactatcttactcaaggaacctgttaattttatgttaacacctactgagtgaacctaataaatgtttaaaggcatgacttagatttctaataaatgtatataaacatgacttaaaatagttcatatagttgttgtacttccctgaagaaaacttgtaaacatctagtgagtgtctaactaatggcataacattaaaaactggccaaaaaaatgcccagaaaatgtttggcccttcagcacccaaagctctcaaaatataatgttaaaacatctctgctacagggatttcagtagtctgaaaaatttaatacctgaatggtttaaatgttctcttctaaattttaaataagtgcaaggtttctacactcaggaattgcctaagtttttatctttcctcaaaagaaaacattgaatgatatagaagtagcataacttactaaattaacttataaaaaactaataaaaaacacaagcccccaaaaagcaggttattttccatagtcttaatacaactattacaaatgtttaaaatcttacaatgtaggctctcttctacctggttttagatatcttaatattctcaccccctcttttactgtgagaacatttatgagtccaggcaccccttggcccagtggcatctattccagtatcaatgataagaatctggagtcatccatctcaagaaaatgaggaagaggaagttgaaaacagccaacaaagcaaagatgtagcctgttactggtccactgtgagaaataagtctgtccagttgtttgtccattggcaacacagattccactgatacttggtcatacgctttttcagttctctccacaacattccttcaggtgtggaaagtctttactatgttacggatattttctggagccagcaatgcccctgacttcagttgga

SEQ ID NO: 70995 - DNA, 1035 bp, Homo sapiens
ttttgaccaaatcatttttctaggaatcattttctggaatatactttaaagcagcagtccccagtctttttggcaccaggtaccagtttcatggaagacagtttttccacagatttgggcgggggtggttttgggatgtaactactccacctcagatcatcagccattagattctcataaggagcacgcaacctagatctcttgcatgcacagttcacaatagggttcaagctcctgtgagaatctgatgccatcgctgatctgacaggcagagctcaggtggtaatgcttgcttacccactactcacctcctgctgtgtggcctgattgctaacaggccacagaccggtaccagtctgtggcccaggggttggggacctctgctttaaagtaaaataaaatagttttcaaaactatcttttttctctaaaattgtgtactttttggttacaggtgatggattgaacatttatttagcaatatcaaaatgaatgtttaatgaaagtatccttgatacatttttgaaattattcttttgtcttttccagaattttccaatgagaaaagtgccctgtaagaaagatgctgcatcaggttcattctttgctcgggacaataccgcaaacttccttcactggtgtagggacattggggttgatgaaacttacctctttgaatctgaaggtttaggtaagtgatgttcttgtcattcttgtttttaatgcttactaggatgttttaatatccttcacctctaatttttctttccaaataaggactcaaatgcctcatctcattttcctagaaaaatgtatactttgaatatatgtagaattattggagaatcagatactaaatcaaatatattaaccttttcacttaaagattttatgtgtctagaatgtcctaaaattctgaattcctaaatgagttggctacaggaaggttctggactaatgctttagtaattgatattttcattaagaattactccaccaagcctaaaaagtagtaacttccctttaaccggataat

SEQ ID NO: 70996 - DNA, 1026 bp, Homo sapiens
ataaaatcagaagaaatcatttcttacctacagctcttatttcttttaggctcatgccttgttctgattgtgggttagtgctgatttgtactgctcaatataagtgagattcgggtatcttaaataaggaaaagatacgacttgttatatctgcattcttgttatgaaaactaaaaagaaacatttctctaaatatatgtgtgctatatgaatacattcattgtctacctgtgaatatgtgatctacagatatcttggaaaataaggaacaattattttctgattcacgatttagggtcctgttacaaaatatacaacagcaattctatatacttaggaaatttttacagacagaaagtggtgactaaaagatatatctcctttcagattactttggttaactaatgtatcagcatggttctaataactgtaagccctttcccagagttcagtttatttttcaccattttatgcacatggtgtgtatgtttgtatcaacatagatgcagatgtgcacgtgtgcatgtgaacaagataaacttgattgggtgacttatgaaaatcagttctatttgtttatacgcacgttattttgttaaataaatgatataggaaaataagttctggacctttcctttcaggccctagtgaatccacaggtgttcatttgatttaggtagatatttaagacaatcatataaatttctattggtgctcagctaaattaggcctatctaaagagactctctttaatatcatgcctaagtttagttatatgaattcgttttgataaattttgtgtggcaataattgagaaaaacattcatgaccttcctttttcaaaaatgtaattttaggaaaagccaaatattttccacagtggctgatgtgtgacttttttcagtcataggtatttcaacaaatatctttacttaatatatttccatttccatgttttaaatatagaattcttaaatttgtttttatatttactgcagttctaccattaaaaaatatttataataa

SEQ ID NO: 70997 - DNA, 1090 bp, Homo sapiens
aaagccacacagaaatcaaaagataagaatatagtttcagctaccaaaaagcagcctcagaataaaagtgcatttcagaagacaggacccagctccttgaagtctcctggccgtaccccactgtccatcgtgagcctaccccagtcttctaccaaaacacaaactgcaccgaagtcagcacagactgtcgctaagagccagcattcaactaaagggcctcccagaagtggcaaaaccccagcttcaatcaggaaaccaccctcatctgttaaggatgcagatagtggagataaaaaacctactgcaaagaaaaaggaagatgatgaccattattttgtcatgactggaagtaagaaacctagaaaataaatacatactcattataaaaaaagagaaaaggaagaatgaatgtgttagcttcacatcttaaaagtttctcctatttgtgtctgtctaaataggtgcagacactaaggatagtgaggatggaggctgggatgaggaaagggttcatcagaattcacatatctgaattcactggaaagagcccttctgaagcaaacagttgtaaaatcactgcaaggtttttattaataatagacatgtatatgattttcagtctatagcatctttgttaacatctgccttttgcaggaaatgtaaaagttatttaacactacaagaattttaacaatagttgctctatttttgaatatgtattaaatatggagttcatatacctgctaatatcaacggtggtgctcttactattagttaattgcattttggttaaaaaaaaaaaagcaacagtttggcacttgtcctacaaaaggcacctaatttaattttctgatcaggattgcctgatccaacagtgctaagtcatggctgctgctgactagcttggcattattctgtgttaggtagaattcttattatttatttttttaagctttccaaattggaaggaactgattgtttcatgtggcttatatttacattggtaatattttgtcaccaatatttttggttaaaaaaaatccaacaaattaacttactgaaatataaacaaattttgtaaacaattttt

SEQ ID NO: 70998 - DNA, 1449 bp, Homo sapiens
ccaggcccagctaatttttttgtattttcagtagagatgggggtttcaccatgtcggccaggctgatctcaaactcctgacctcaggtgatccacctgcctcagcctcccaaagcgctgggattacaggcatgagccatcacacccagcgaaaagttttgtttgaataaacaatatccgaaagacaattagtttcttcagatgtattttgaaattctcctaaagagctagtgtttctattcattttcacaatttaaaaacagctcttaacattgctgaagttgggagaactttccatctcttcttaataacagtgcaagattttgtaaattcttttttgtgtttaatgtttaataaaacgagtattaagcttaaattactgaagtacctgggagaagtaatgatgtgtactttcaaaaaaatggaaaatgcttttattttattttctataatttgttaacatgatatgtaaaattaaacttcggagcacaatgaaatgccgattatttttaccttgtttgggcttaaagtaggtatttaaggtttatgtgttcaaaatgccttggtaaattggatgacctctaactttactgtccatatggagtttgtcattctttatggataagagaacttaaggaaaagttactgtttttcttcagtctttttatatctatctgatttaaaatctgttactttattaaaaggcttcaacaacaggttgttaggatgtagtcttacatccaggttcacataataaccccatttgaatccaaatttgtgtatattttcttatgccagcagtatttgtatccaattttaacttaggtttgttttcttgagtattaaaatttaaacatatataccaaggtctcagtttgcttttttggtgtattctgaatacagtctgatcacttaattcatgttggaaattgcatataggaagaattcataatttgagaagagtgctgtttaaaatgctttctttatatttgtggaatttatttcactgcacccaggagattataaggccttgtcattaatcaacagtatttgttcctcaagttgctgtatatgctggatgtttttccagaaagaccagactcacatttaataatgtttgaaataatagagataatttgttggttatcaaggtagaattctataggtcatacaagcattgtgttcaccaaagatgactgatatcaggaatttccaattttcaattcctgtaatcctgttttaatttcacactttgatacagttagtatattcttgcatactcatctttttcctatattcatgaccagagcaattataaaaagcagttaattccatatatatttcctgtgacatttccaaaaaaggaaacaaaaacaacgtagacaaaattttaattgtattttcctaaccctttgtgaatgtaaaattttataacctaaaattcatttta

SEQ ID NO: 70999 - DNA, 1037 bp, Homo sapiens
gatgtttaatttgtgatcactttcttctggttaaccaaagacaaattcaactgtctatcagagcttcttatcagcatgagataatcagtactacaaatgggttgatataattccagtcaaaaggaaataactggtttctgtttgtgtgcagcttgatcagaggcaaatacataatttttgtgagtctcattggcaatctggaaactgttcatcagcttttcatcacttcctttgtggacatcagattcagaaccacaacttaatcttatcattagtctgtcttctctcctttctcaaaagctgggtcatcccttctcagtatctcctggggacctttcttattcattgcctttacttcctacatctctgatctccactcttcactatttctgtgacccatatgcatctcacatctttccgatgttaaagaaactcatgcctgactttgtttctccctcttacaatcatctaatctctatccttccaatgaccatacaagtttttgaatgtggcccatagaaagaacctattctttctctccttacgttttacttctgtacttccttcctacttggccctatctaaggtcacctgattatggttaaaaaccatggattcctcttggcatttcctagtctgctctcattattttgggtctacttatttggcttctgcatcattgcatttatctgcctctcttctttcccctctgccagtccttagtcactttctctaccttctttttttcatggaggcataatgaagagcataggttttagagtcaggcagacatagggttgaatctctgctttttcgtcaccagttgtgtgaccttgggcaatgctgaactttgcccagcttcagtttccttatctggaacatggggataataataccttacttgtaagttgctgtaaggattaaaagaacaatcagtgtgtagatatggtaactgatattttatagacttccttccctttgtagtttgtaatactaagggtattatccaaagtgtactgaggctttctctttcccac

SEQ ID NO: 71000 - DNA, 1049 bp, Homo sapiens
tatatagcattttgtgtctggctactttcacttcagttaatgctgttgagattcatttatgctgttgcctgtgtcagtagctggtttctttttagtacagagtagtattccagagcctggctatgtcataatttgttcgtctacttaccagttaatgaatatttgggttcagtatggtttttaactactataaataaacctagaaactattggctcttctagttttttgtttttgtaaattttcataaaagcctttgtagccattcatcttggatgaataattaaaagtggcattgctggatcatgtgataagtgaatgcctaacttagtaagaaattgtttcccaaagtggccatatcgttttgtagtcaatatcagcatgatatgagaattccaggtgttccacattctcacaagcacttggaattgtcagtctttataattttagtcattttagtgggtatatggtattatcccattgcagttttaatttgcatttccctaatgagtagcgatgttgaacatcttttcatgagcttatttgcaatctgcacatcttacttggtgaagtgtttgctcagatcatttgtccatttgttattgggttgtctgtcttatttttaagttaaaagagtacttttatatattctaggtagaaatgcttcatcttacaggtgtttgcaaatttttttccctgtctgagtcttgcatttttattttttaatggtgccttttgaaaaccaagagttttttctttttatatagtctaatttaaattttcttctgcactcattttttgttttatttatgaaatctttgccaaactcaaagtttctaagattttcgtctatattgtcttctaaaaagcttatcgttttagctcatatgtttaggtttatgacttatttcaagttggtttttgtatatggcataacgtaaggggcagatttatttctttccatgtagatatccagttttcctagtaccatttgtcaaaaacgccgttcttttcctttttgaattttcttggtacattttggttgaaatca

SEQ ID NO: 71001 - DNA, 1036 bp, Homo sapiens
ggctggcggtgagtgattcccagctaagggcaaatatacagcgctttctctgtttgccccttgatagattgtttccaggtcttccttaggatacaatcataggtctgtatatgtttaaaaacacttttattgcagcgactttgctaggtccccatgcttatgggagggtatgaaacctaatagatctagcgagactaattgccagcatccacctaggctcaccagtctggcaatggaaattttatttgaaatgacatagctgagagaaattatgcaaacatagaagtattcattatctttgaacagtgatgcagtaaatttgtttacggccgtatgtttttcagtttatttttccacttatcctttgtgattagagatgcctacatgcagcattcaaatagatattaaagatctgataaattttaattaattatgtatcttaaatatactttcccttccagtttcttacatttgctgaacgactggggaatgttaatattgatattattcaccggattgatagaactgcaagctatgaggaggtaagagaatgtgatactagtcaatcttcaagtgttcatggtgttttagtttcttctgttagtagaagtgaattgtttttcaaggtattcctttttggacatgaaatgctttagacctgtgctgtttcatacagtagccacatatgacaaattggatttaaagtaaattaaaaatttgggtgcccaaatgtggctagttgctaacatattgaataaatatagaattggaacattttcatctttgcagaaagttctgttgggtgaagctctattagacaattgacttgactttcagctgtctttgtgattctagcctctccctttcccttatgcattccaagcactgctgcagatccatattcctgaagctataactttaaagtgattttgaggaagcccttttcccggggcttaattttctcctttataaaaataaaggggctagactacataatattttccagttttaaccatactctgactctgtcatccct

SEQ ID NO: 71002 - DNA, 1028 bp, Homo sapiens
ctccgtctccaggttggagtgcagtggcgtgatcttggctcactgcaatctccacctcccaggtttaagcgattctcctgcctcagcctcccgagtagctgggattacaggtacgtgccaccacacccagctaatttttgcatttttagtagagacggggttttgacatgttggccaggatggtctcaatctcctgacctcgtgatctgctcgccttggcctccgaaagtgctgggattacaggtgtgagccaccacgcccggccttgtcatccttttatgcagaagtctttttctgcatcatgtcgttattcctcctagcattttaaggtcgtacgtaacatgcctataccttggcgatccaatctcagttcgtaatattcttctttactataatcagactccactcgctgggtctttgaatgcattatctccactgtgtaaattcaatgtgttaaatgatgtcgtctaggtgagcacattgtgctttgagaactcatagtaaagggaacctaacctacattctttaggggtgtcaaaaaaacggtgatctagacgaggtgacacctgaattttgtttatataggttttagcatggtaaagaggacaggaaagcctgttccaggctgagggagaagcctatataaaggaacagaagctagagaatgcatgtcacattcaagaaactgcaaagcagtccagtgtggttataggtgtgtatagggtgttttttttttgtattcatggtgactgggatggggcaagggggcaactggtgagataaagctggagaaataggcaaggatcataaaggacttcatatgtgaagctaagttggggttttatcctgaagctgtagggacttagagttctaggactgtaagcaggggaatgaatgacatgatcaggtttaaattttcaatctctctggctttagtgtggagaaaagagcaggactgcagttcttcatcatgtcatgattcctctgctagccttttaaggtcctgtgtaacatgcctttaacttgga

SEQ ID NO: 71003 - DNA, 1022 bp, Homo sapiens
tgttaacaagttaagtaacatagtggtaaacttacgaaaagcccattatctcactcctcccacccctaattcccaaggaagccaacactgacagttcagtatagttgtattcttccatactgtcctctcatgttcgtatgtacaaacatttatagagggttttttatttttgttttttaaggaaaattgaatcctgccataccctctcactgcataacttttatcattttgggggcatatcttcagtgtagttctagttcaatagagatatagctctttttagtagccacataatataccttagtatatatagaccatgggctattccaaccattttcctattgtcggatattttagcctgtttaatgtttccccacactgtagttaagctgaataaacatcttttacttaaaggcttgcaaactttataagaactacctgggtcaaagagcgtaactattttgaattttaacaggaatgccatattacttctttataaggttgtagtaattcatatttctaaaagcagaatgaaggaactgtaaagaaccaacaccttattctttgcctaaaattataaaaaaacacagaaaataattttcccttagtggacaatatatataggccccagaaaattatttgctgaaaccaaatcaacaaaacagcattttataagtggcctattgataacttctgattgctttttagtgtgttacttaatggcctgttttaaaaaactaaaaggagttcttaaactcttcagtatcattgtcttaagatattaatatatcattattctatttaccttgatcattgctttcttagagttatttgattaatggactgctttaatcttgacaggaggttgaaacctacttttttgagggtctgctgaaatggagagaattaaacctcacagaacacttcggtattttctatttcgtttctattttattcacccatagtttgcactttatatgttccatacagctgaatagtggtgtgatagaaaagaacatatt

SEQ ID NO: 71004 - DNA, 1052 bp, Homo sapiens
tttgcctgaattttaagaaagattgtgtttcaaagctacatataccgcagatcaggtgctcataatttagaaacaaggaggattttccttttctgttaggaataagtgcattaccataaagtggaatcttggggtataatttcgcatttgttatatactaagataatctcatttttctttgacactataggaacagttggctacaacttatgatggaatgtaacttcttgcctgatttctttgctgagatcttaagatttaaagaattttataatttttcagacttgatttagaagtatttttatttaattaatcctatgatcataggccacctactatcgttaagtagatttgtagccttttaaaaaaatccacatgatcagttgcttctttttttaatccagtttggttgtacagttggcacgagatctgcagatggatttctacccacactttccagagttttttttgactatcacctcgatcctggagactcaggacacagagttgttagaatgggctttcacctcgttatcatatctttataagtacctgtggagactgatggtgaaggacatgtccagtatatacaggtaacccctttctctctctagtatgttttttaattgcctgcttctttttccctggcttctttatgactccaaaccactttgccagctcagtgcctaattgtttccatgtacaaagttgattctccagccaaagtggtccacaatctagtctgccagtctgagttgccatgaccatctctcctctccagctactggaagtatacccacccaagaaggcctgactcggtccctacagcctccacaaacaggcacctttgccagaagtattaataaaattttgtactctctatcctcttggcattttttaaccacctatgtcacacaacttttaccagaattgtttggttataatgtattgctgtcctctctacacctggtataagggaggtttaagacaggttaagagccctgttttaaacactgacatttccccagccactaatacttactaaggtgaaa

SEQ ID NO: 71005 - DNA, 1010 bp, Homo sapiens
cattcagccaacatttattagtacctgctgtcagcaaggaactattaggtactggggttatgagaaaattggagagatatattccatacccttctatcattagggagaccaaatttaacaatgtgattatatataagtaattatttagttatagatgcatggctgcttgaccttgagcaagttgcttatgctttctgcctcactttcattatctgtagaatgggaggattataatagtacccatcccatagagttattgtgctgattaaatggcgtaacacagagtaagtgcttatacagatgtaagctagacctgtctacctgaccaactttatccatagctgctctcctctactgtatcatctttcctcttttagatggaccagcctccttgtcatgaccatgatcatttccacctgcctcatctttgctcttgcttttataccaataatatggactgcagtccccacctaattcttctttcattcagagctcattacaaatttcaacttttcctggagtcttgtttgtaaaaccagtaccaccagtcctaggactcttcatgtctgtggtcaagtcttcctttcaacatgtgggtgtctccataaatgaatgagattttaaatttgtttgatacctgctgtgtattccttgcatacccagcacattgttgcccatattgttgacatgtagtatgtatttattacaattatatgattaatgaaatgtatcttatttttttcatgtatagcatgtacagcacactcctggctcataaaaaactacatataagaaattttgctgctgaaagttttacttttttgatgagaaaggttagtctggtattttatctgtttgttgctaatcatcaagaatctgatgaataggccaggcgtggtggctcatgcctgtaatcccaacaccttgggaggccgaggcaggtggatcacctgaggtcaggaattggagaccagcctgaccaacatggcaaaaccccgtctctactaaaa

SEQ ID NO: 71006 - DNA, 2172 bp, Homo sapiens
tgaggagtgttgggtgttcagtaacaatgcttacccaatgtaggccttggacagtgagatgttacttacagagccattgatgtcttctttattttggatgctagggggtaagataaattgattaatgggcaagggcaggtggggagggaacagttgtaatgataaaattcccatcctagtttagaagttccttttgggacacgttattaaccatcaaagttgccatatccttgactattccagacctgatttttaaggtagctaatgtaatcagagtggtgactcccagagcaatacttgaaaataagagtttatatattaatgttaatgacttgtattcccacaggcagtgaagctaattttgcgaaagctaggaccagtcactgaaacagaaactcaactaccatggatgttaattggagaaacactcaaaaacatggtcaaatccactgtatcctacatctccaaggaacattttggtacattttttgaatgtttgcaagtgagttctaatctttaaggatgggtttttgataaggagtctaagaatttactgtttctgctctcagttttgcaaatcactcctagaagttatattttataattgttttatttatacttctgtacacatattaaaattttccttccctctgcccccctgtgctattttttatttgatatgttatcttgagatgcagtagaaggctctggagccagactgcctgtttgaatcttgacccttccacttactgctagtgtaacctgggaaaattatttgaaatctcgattccccagtctcttcagataataaatgggggtagtaatattctctccctcagggttgctgtgaggatgatgagtgaatacttgtaaaaaacttagaatgggccgggcacagtggctcacacctgtaatcccagcactttgggaggccgaggtgggtggatcacctgaggttgggagttcgagaccagcctgaacaacatggagaaacgctgtctctactaaaaatacaaaatggcgcatgcctgcaatcccagctacttgggagggtgaggcaggagaatcgcttgaacctgggaggcagaggttgcggtgagcaaagattgcgccattgcactccagcctgggcaataagagtgaaactccatctcaaaaaaaaaaaaaaaaaaaaaagacttagaacaatgcactcagccaatgttagctgttatcgttagtgagtcctggtaaatgtatctttttcttccaaagcaagagaatgggaaaagttgaactgtcccacagtttttattgttggattaacagttgagtttgatactttatattctctctgttaaattctttgtttgcaggaatcgctcttggatctacacacaaaagtaacaaaaactaactgttgtgaaagttctgaacagattaaaaggttgttggaaacataccttatacttgtaaaacatggaagtgggacaaagatacccacgcctgctgatgtctgtaaggtgagttcccaacttaatatgctcgagagtctggtttttaaaagctgattgctgagtatgcattgttttttctttttgcaggtgttatctcaaacactgcaagtagccagtctctccacatcttgctgggagaccctcttggatgtaatttctgctttgatcctgggtgaaaatgtttccttgccggagaccctcatcaaagaaaccatagaaaaagtaatttacttcaacaaatattaattgagcagttaataatatgtttagcattgagtaaccttctgaggaatacaagtgaagtgtgacaaaggctctgccctcaaggaatttataatcttgttaaggaaatgggaattgcatgcagtaatgtaaataaacaaaataaagtgtgataaaagcttaatttatatagcaaataagcaaaataaagtgtggcaaaagctaaatctatacatattctgcaatatatgtaagcacatattgcagtaagcagtagagcttactgtgtgctgggtatgagctggctattccagggtaaacagtgatgcctgcaggttttgatagttgttggagaaatggagcctggaaccgagtagttatagtctagcgaatttgtctgttggagatatattgaattataactattaattctgcctggggttgaggaacagag

SEQ ID NO: 71007 - DNA, 2908 bp, Homo sapiens
ctttcataattcactgtagctgggcaagagttgagcagcctttaggcagagccctgtgtaatcagcagaagccctttgcatctgtggaagcacctttggagaaggccgggcaactggacagagcactgagtgaagtgtccctgccattcccttctatagctgcttgctggggggatggggaaaatactctctgtgtacttacattaatattttttaccttggtcacagatatttgagagcagatttgaaaaacgtttaattttcagtttttctgaagtcatgtttgccatgaagcagtttgagcaggtaagcaagttactaagttcggagtatttttaaaaacaaatctgtcaggaaaaaacgatcaaatttgaaatcctgttatttctgtttgttttttgagaggaacaggataagtgcttgatgttttagtcaatatgttttttaaagaaattatattcaattctagattacttgtttttttaataatcctttaggtagttacagaaccgtgtggtaaaattgaaaaaacagtttaagaaacttttatgtgaatttgaagcatagaaaatagtttgtgaaacaatttgcactggtggaagtttgcaaattgatttcattgctccaaaataaggtaactgagtgagggagaaaatgttcttatctaatcctgaatttattttatttttttctcttccttctcatcaaacacttggccctcctcctaactagtaaccctacagtatacatcatggaaacatatctctgtatctgtcctctcaatattcttccttttagcctttaatactatatattctcatttgcctaaaaagaacacttttgtacctgtccaagatctgtttctttctgccccaggaagactcttcatcttgctctgtttaacaactgcatttttcctttctcccgtgttccctttggtctttttatttttttttaatcttatttttatccaaatactgcttacacgtctgtagtttaggaagacaaaccaggttaaatggcagtcatttgttttctgctcccatcttattagcagccatcgggtctaatgatttttagctattttttttcttttctttcttctttttttttagagacggagtctcactctgtcgcccaggctggagtgcagtggcatgatctcggctcactgcaacctctgcctcccaggttcatgccattctcctgcctcagcctcccaagtagctgggactacaggcacccaccaccacgcctggctgattttttgtatttttagtggagatggggtttcaccatgttagccaggatggtcttgatctcctgaccttgtgatctgcctgcctcggccagctatttttttcttatatttactttatacttttaaatcatctgaatatactgctttaccttggtttgctagttttggttctcatgtgtagacttcctcctatggcagatggactttagttcctttatacctctcatgctcccaatagaattatattagaaattttggttgaatccatattcaccacatacttatataaacaaggagtattttatgattatatgacctttttgtatacattctcgtttttcttttttttttttttttgtcgagacatagtctcactctgtcacccaggctggagtgtagtggtgccatctctgcttactgcaacctccaccctccgggttcaagtgattctcctgcttcaggctcctgagtagctgggattacagtcatgtgcccccacgcctggctaatttttgtatttttagtagagacggggttttaccatgttggccaggctggtctcttaactcctgacctcagatgatctgcctgcctcggcctcccaaagtgttgggattacaggcatgagccaccacacctggcctcatttttcttagagtttataattgcctcgttctttaaaaactggaaattgttttctttgaatggctggccaaagagtctgtcttccagcagctttataaatgtccttcacatgacaaaactgtcagataatttagcagctcaatttttctttttcttctttcttggagacatttctcctggagcaagtccagtctaaatgcattgctttctctgcccagtgcacaaatgttgtactgggacttccttttgcttctctcttgtttcctgggttccgtgttctcttcttcttatagtttagtctctaattttggtggaatttatttttcataatttcctgggggtagggagggttcatggagataaaatattgagatttaatacatctgaaaatgtctttattctctcctgacactgcattattagtagacagggtatagaattctagattctaagtcatccttcctcagagttttaagacatggctgcacagtctttagtttccattgttcctatgtagaggtctaatgccattgtgattcttgatcctttgtttttggtctagttttttgaattgttagcatcttctctttattatatctgttaataagtgtgattttttttttcttaactttagctttttctaccaagctttctgtcatatattgtgaattgcttcttaattgatgatgctgtagtcaaagatgaagctctggccattctggccaagctcattctgaacaaagcagcacctcccactgctggctcgatggcaattgaaaagtaccctctggttttctcaccgcagatggtggggtgagttctaactttttattcctgtaatgatgataagtttacccatttaaatgtaatgtatcaagaatactgtaaaaaaatgatctatatgtaacaggaaagatgtccatgataagttgtgtgaaaaaagcaagttgtagagctacacacatagtacgtatagtatgatctcattttgcaaggtaaagc

SEQ ID NO: 71008 - DNA, 1112 bp, Homo sapiens
ctatgttgcccaggctggtctcaaactcctggactcaagtgatcttcctaccttggcctctcaaagtgttggggttacaggttgagccactgtgtttagcaaactcatcttaacacctacttatatcttctgtataccttacaaattgcttctctattaaaatatgccaacagaatcttgttggtttttaaatgtattgaattctgattcctgaggaatgggtagtgagtaactccaatagaattattcctttgaaacttttcccttgatttgtcaacacccaagcccatctccaacaggcagattccttgcacatgccaaaactgagttctgtgcagggagagtgaagctgctttgttgtttggcttccatgaggtgaagctaagggactgactgagactgggcgtcagaccttcttaccccatcatctcagccatctcagatcctcccaggagggtgacgtgttaaataaataaatttcgatgtgctaactcatggcaagttcttccacttctgtgtttctttctctgcaaaaacacccctctgccacccccaacggagatatggtatgtgtgaatggtcacctttgttttgattccttctatgaagattttaaaatcatagtttgaatattactagtaacactctatctacccatctcaccagtttgctgtgagaaaaaataaagataataaatgtgaaaagactctttaggagataaacttactgtcgtttgacaactacttacggtatcaggcactggatactggggtgcaacaaagaataagaaaaaagttccttcttttggggaaaggaatgtggtgaggcgggtaagcaaataagcgagatgatttcagatcctgatcgtgataaaagaagacaaagcagtgttgagagggagactgaatggagaggggtcactttccagagagggaacgtttggtccaattttaagctgggaaggatccagccttgcaaagatctcagtgagagactctccagacagaaggaaaagttaactgcaaagactctgggacaggaataagctcagcatgtttgaagtacagaaagaaaacctctgtgggtaaagagcaaggaggagattggggtga

SEQ ID NO: 71009 - DNA, 1090 bp, Homo sapiens
tgtcacccaggctggagggcagtggcacgatcatggcttactgcatgcagccttgacatcccaggctgaagcaatcctcccatctcagcctcctgagtagttgggactacaggtgtgaaccaccatgcccagctaatttttaatcttttatagagatgaagtctcactgtgtggcccaggctagtgttgaactcctggcctcaagtggtcctcccacctcagcacccccaaagtgctgggattacaggtatgagccaccatgaccagcctgtatttttcttaagaaaggtaaaatataggacttggaaacttctcttttctgtttctttctgttatatttggatgtttgacagacaattctttggaaggcataaattcactttaagaacttcccataagtagcaagtattcaataaataaggtgtttgatagttaataatgtcaaagaaataagtaatgtggtttctcctgtttttctgcccttaggaaacttatttgttctttgtcaagctgtaaatactctactaagtttggaagaatcttctgaacttcttcatttggttcctgtggaacgtgtgaagaatttagtattgtaagtaaacatcttccagttggtttagtaatgaataaaatataaaagcctctattgttgtgaaatcttggacacaaagaaaatccctttgatctattttatacctgagttgtattcacgtagtgaaatttaatattgatttagatcctccagttaaaataagtacatttgacacagtctttaaatacagattcatctttgtaaagggtgttttattgcgtgtgtagattaatgtcgtaaagtttgaagggtttgtaatgctgatcattcccaactgtaacgtggcatgatgttgaccttttataacttctttagtggttccaacatgcacattcccactcttgttcggcctcaacttgaggtgatcagcatttcagaaaacttccctgtggtctttttactacacactgaaacaatccagtttctttttttttgttggtttggtttctttgtttgctttttaagtatagtttagccagcctttgattttgatagcag

SEQ ID NO: 71010 - DNA, 1188 bp, Homo sapiens
ttgccctgctgcttctaagtataggacagatcatgccactcctttgctcatcaccctctaatacagtgcttctcaactgggagcaaacctggagactttccagctgtcacagcatggggaaagagcactgttactggcatctagtgggtggaggccagggatgctgctgagccccctgcagtgggcagcactgccctccaccacaaagagttctctggcccaaaatgtcagtagtgctactgtagagaaaccttgctcgagaggtatcccatctcactctataaaatccagcatcctcatcatgttcctcggggctccgtatgagctaactcctggctagttctgacatcttcaggcactctttgttagttccagctgagatggcctcctcgatgttcctgcagacaagcacacctcagactggcattgcagttccctctgcctagaatgcttttctttcagatacccttttagctgactttttcacttcctttggtctccgttttttaggagcacccctgtatcaaatggtgcttctcttcacctccacaccgtctccccacaactccctgcatgtcaatctctttgtcaagcctttttcccctggttttctggagaaaaccagggttttctccagaacctggtttctccaaacctggtttcatggagcctttctccatgacgctcatcactgtcatagtacttatttattggctactttcccctactagaatataagttccaggaaaaggaactttgtcttttgttaactgctatatctacagtatctagaaaagtcacagtacatagtaggtactcaatgaatatttgttgcataaggatggtaccaagaggttaagcaacttgcctgaggttacactgcttatgagtaatggtgccagattcaaccctgggctgccctaccccagagctcgtgtgtcagactactcctctctactatcctcattagctcggtgcctggcacatgacaaacacttaataaatattatatatgtatatattatattaaatattaaatttaatatttaatattatttaataaaatataaattaaataataaatattatatatatatatatataagtggctgtcatttacaactatgtggattgaagaggcaacattggagtctagcatattctgctcccacctctgcctgcaaccag

SEQ ID NO: 71011 - DNA, 1420 bp, Homo sapiens
agatggggtttcaccgtgttagccaggatggtcttgatctcctgacctcgtgatccgccctcctcggcgtcccaaagtgctgggattacaggcgtgagccactgcgcccggcccagccctctatgttttatatcagggttttcattccatgacccttgaagatacatcacagacctctttgggagtaaggccaaaaggaggcattctcccttcagtcagagcagttcttctcttacctgttttataaattaggtatataaatatacttctgtttcatttggaaaaaagactgcttctagaatatatacaaacaccccatccctaaataataataaaactaccagtctggatggtgcctccctagcacatgggaatgttagtaataatgacccttattccaaaaggtgaccgggaaactttagacccttttactgaacttgcaaagcctcagtcattcacagcatgtttccttgcgttcttcggcatgtgtgcatttctgactgctgttgaagttttgtcttaatctggtgacagcaacatttgttagaagggagtttaatcattagtcaaatctgttcatttaaatgaatgaatacctggagtgaatttgaatactatgtttgctgtagcgattcttctattttaaatagtgagtgacattttggggagaagaggaaaattagtatacattgaattttggattggtgcctgcaactttttttcttatcgcacaggcttctttccaaacctcaggttgtccaacttgggatgtttgcatttcagtacttctgttctatactgtatttcattacccaatactaaactagtcttttgtaattgcaggtgccgcttcgttatttgttaggcatgctatatattaatttcagtgcactctgggatcctgttattgaactcataaggtaaacatgggttaaatgggatgaaactattatactttaactactgcagaatgatggggcccagattattctccttctgggtgtgatttaaatgaatgggtgtatatggtatttacagtactttaaatcctttgtgagacaaggtaaattaaaaataaacatgaattattctctctgatgccacatcttcagtagttccaatattatacgtgtgtctctttgtgtgttgaaataactttgaaggagtttctctttttgctttttatgatacttttgtgttattaaaatttgttacagcaaggaagtataataattgcataattttatttctatattttgagtcattgagccatactttaaaaataaagactttttcaaaaccttgctgtctagcatccaaaatccctttagccccaaaatgtcttcagtggtcacatagaaaatacatgttataggccgggcacggtgactcatgcctgtaatcccagcactttgggcgg

SEQ ID NO: 71012 - DNA, 2136 bp, Homo sapiens
gggcaacaagagtgaaactctgtctcccaaaaaaaaaaaaaaaaaaaaatacatgttatggctcatgtgtagaaatctgtcttcagacatttgtcttcagataatacacactcactttttttatcagattatcagattggaaatatgtcgtgtgaggcctttcaaaaccccaacgattagttattagttcttacttgacagaataagagagttaacatttatagacagatccctttacaatttgaaactaatttgtctacctttactacccttgtctaccttttactacaatttgtctaccttttactacctttcaaagccatcaaaaccagtgtgccaaaagcaagattctcccaacatcagcttcattattttgtttattacactttcagaagagagaatttgacatacatattaccagtagcacactatcaacagtgttggttctttaattactgaatgccatgaggcattctccctagtggctgggctgtcttcctgttgggtacctctttctgtttggaaggatagaaacaacaacatacctgttggtttgttttctgagtagagtcagttcccaacatatataatacatgtcatgtgtaaagtttatgcatattcttagaaaattagtgatagaatatttgagagtattgttgctaggatatcaaactacataagcactttatgtgatccatctaatgtctccttttaagttctgaaaagttgtttcatgtagttagtgaatgtttattttgtctttgtgttaataagtatatttaaatttggtggagggaaactaattatttttaagttagttttgaacaaactgacttttctctccagagggccccttcttctcttaatggatcttattcatgccccatgccccagtttcatcagtgtgcctttaaaaatgattttctcttaaggatctacttatatttttaaaaatactctttagtgctttatgactataaaaatgatttgtgctcagtgcaggcattttgaaaaatatagaaaagtgcaaaaggtgtttacgactccacattgagggataacctaattgacattttagttatatcctttcactcttttttttttttctatgagcaatcttaaaatggccataccacactttttattttgtgattttttttttcccttagttctcatgcacacgaaatggaaaataagcaattttggaaagtctactatgagcatctagaaaaagcagctacgcatgctggtatgtaaaggggttgtgaggaagctgcgaagaaaagtggttgtttaactgttttgtttttattgcttaattactcacgaaattggaaaacagagatgaaacatatattatcatgataacttttgggagtgacattctttccttacattatagagaaagaaatgccctctcttgagaaaacacttaagataaatgttgatatttgtctggtggttatgacaactttctttcttgcagagaaggaactacagaatgatatgacagatgagaagtccgttggagatgaaagttgggagcagacccaggaaggagatgttggagctctttatcatgagcagttagcattgaaaactgactgtcaggaaagacttgaccacaccaacttcagattcctgctctggagagctctgaccaaattcccagaaagagtagagccacggtccagggagctttccccgcttttcttgagatttatcaagtaagtttcctcttctaagaatatgtccctggtggggcatgaagaagagaatgtgagaagtattaacctcccaaagtggctgagttctttgttttttgccttctttctttctgcttccaatcatccattaggctgaggtattttttgtttgtttgtttttgtttttgttttgttttgttttgtttttagacagagttttgctcttgttgcccaggggtgcagtggtgcgatctcggctcactgcaaccttcacctcccagattcaagcgattctcctgcctcagtctcccagagtagctgggcacaggcatgcgccatcacgcctggctaattttgtatttttagtacagacggggtttctccatgttggtcaggctgttcttgaactcctgacctcaggtgatccacc

SEQ ID NO: 71013 - DNA, 1079 bp, Homo sapiens
tgtagtcccagctactcaggaggctgaggcagaagaatcgcttgaacccaggaggcagaggttgcaatgagctgagattgtgccactgcactccagcctgggtgacagagcgagattccgtctaaaaaaaaaaaaggctagaaccatgtcttcaaataggtaagaggagatggatacagtacataaattcaaaggtttgcatggataattcattctggcaaggcacaagcaaagatatagcaggtcagtagatatagtggcagaaaagcaatgattttctctttttcaaataattctttgggcataaatttatagaataagaatgatgtttagctttttttgctttgttttgagggttatataaaataacacttatcagttttttgaactgcaagggctgtacatatgccagctggcatttatggtgttagtagcatataaacttcataccatgttaattttccaagtttttccctaaagaattagtttaccccacggcttaaggataagatcttagtctaatggtacaagatgctgtggggtagaggtagaaacaggagcctgtaacagggagtgggtctctgagtttagaaagatttagagactaaagatacacaattctaaggaacgtttaatactggttggcatggattacctataaataatacatttatagatgatccgaactaatggaaaacccaaatgtcacctttaattctgactttgaagtatattacaggctttttattttttggctagcaatttatatttctaaatatgtttcaattaatttggtattagaactaatttgtgaatcccttgtaaacattctctgagacgaaccaaaccaggaacaagaacgaatgactaacaatggcaacagcatcccaataaaaggtgacatttagtgagtactcactgtgtgctggacactcttatggatgctttgtgtgaattgttttatttaataaatgaatgagtgaacatgctgttcacggagataaaggttacagtatgtaatgtgtggttaattgaatgttgtaagtataataggtatgatattaagtggatgatggtgc

SEQ ID NO: 71014 - DNA, 1423 bp, Homo sapiens
agtgccctgcattcaatagacaacaaaaggttaattgtttgggtgagtgaatgaaagtgacataaactaatgcattaaatgacagacttcaagataatattcattaattgcaacattggactaaaaataaaggatgaaatttaataagaacaaagtgaatactgtattaagcttagctgcacaagcttagtttagagagataaaacataaagactcactgattttcattacatggacattcagtttcaatctttgtcatgttgtggctgctcaaaaaagttctggagatggtagttccatctgtcttatcaatccatacctggaggactaaattttgtggtggtactatattttcaagagaactttggcaaagtagaatgtatctgatggaaagtgaccagcacagtcctaatgctatactttaatcatttaatatcatccatccctaacccctcatcccccagtggtggttccagagacagggaggctgatttccacttagtccaaaatagacatttcaaatattttcaacagtataacagtggaatgggctatcttctacagttagtgaatcgcttgtcaaatagcatactaaagaaggaccaagttaggaaagagtaatattgtggaagcttgcctaaggtaccactatgtctcttcagtgtgtgattctgtgaactgtggacatctctcatgaacagaatcagcacctttcagattggtgtgcgttcttcatcagtatcctgtgactttctttccacggtagcaatgagtattacccagcagatctgcaagttgctccaacccaggatctacggagaaaaggcaaagggatggtggcagaggaaatcgaagaggaacctgccgcaggagatgatgaagagttggaggaagaggcagtgccccaagatgaatcctcacagaagaaaaagacgaggagagctgcagcaaagtaagttcaccattgctgaaagatcacagatccacagttctgggaggaacaggaagaggtctcttacggctttatacaaaatcaactactcagataattatttacgtaagcgctacatcttcctgggattttctttaacagcctaaaactgtcaggcttccaagttttttggttgattacttattagttttttcttggttagctacataatgttagattgggggacttttgagagtcatctaattgtagctcctttttatagatgagaactttgggacctggagtgtttggatattcttttgacctttgtcgtgcactttcccagcgtgagggtattgtgtttgcatgctaggggaacatgtaatggaacatcctttttcttaaaaataagcatgttagcaatttttttttccttccacccaccttccccaccatcctgttagcacttttctctgccttttaacttgcctt

SEQ ID NO: 71015 - DNA, 1044 bp, Homo sapiens
gggacaggcctgcccaaaatatgggatttctggagaataatttcctaaatgtaaataactaagccttgtttatataatagtgaaactataggcggggtgtttgaagttctagtcagaataaaattgtagatgtcagtttaagaaaatgatctcaattctttaattctgtaacactctctgttttgtttttgtttaggcaattaattgctcatttgcaagttttctctaaattttcaaatccacgggccttatatctggaatccaaactatatgagttatatcttcaggtcagtaaaataaactcttggcattataattctttgtgaacttttctctatcattttctttgtcagagtagcttagattttcaataattgctgaatagggcccatgtctacattttaagtattaaagcctttttttttttaattaatagacatattttctgttatcttgagaaacagttttagcactaacttagctgattttgaaggcattttgggtgactaaacattgattggctgtgtcaacagtgagaatagcaaagcatgaattatatcatggaaattagcttttagaagggagtagggtttatacaaaaaaacaagtgactacttttcccttctagtttagtcagacttcatagaggactgggatttcaggatctattgtagtccattgcagtcataattacgtggccctgaatttcagataagcttgcagaaaaaaattaatatcagaaatgaagtaagcattggatgtaattctaagccatctggggaaacaaaattttcatttttcatttggatgtttcttctggcatcttattgactatcattaccttcataggataagagattttccttagtacatgaccagcctagttggcttaaatccagattcacatagagaatcggcctcaccaggctgcacacagtagctcacgcctgtaatcctagcactttgggaggccaaggcggacagatcacctgagctcaggagttcgagaccagcctgggtaacatggtgaaactgcgtctctac

SEQ ID NO: 71016 - DNA, 1065 bp, Homo sapiens
tagacttacctttgatttgcctactttttctcccataacaaaccaccttctggcctttgtccttcctgcttcccttagctttgttttttgttgtgttttgtttgaatttttgaatttttttatagagacgtggtctcactaagttgcccaggctggctttaaactcctgagctcaagtgatcctctggcctcagcccctcaggtagctgggactacaggcacgtagcactgcacccagctctcttagccttattttgttgttgacttttttcattgtctgtgttaaatatctaatttctattttcatgtttctgtgttttataatatatccatttaaatctattgagttgctcttctagccttttaggcaaataaaacaactcatattttagaattaatgtgcaaacaaataatgtgcttttgccttttcagaattttgtatgggcgaatgaagaataagactgggagtaaaactcaggggaaatctgcttcaggcacccgcatggccattgtcctgcggttcctggccgggacccaacctgaggagatccagatattcttagacctgctgtttgaacctgtgaggcatttcaagaatggtaactatcagctacctctcactctaatacctgttgtctgcggtggacttctcacatctcaggctacatttcccatgctcctgggcgtctttctaacagggttgttcctcccaatcttgatggcaatctttttgctgaagtgcaactcattttaaacttcaattaaattgcgtgaaactgactgttggccctgtggattatcggcacccttgtgttagagcccctgatgagaaatgtgtatttttattgcatatttaggccatttgaaaaatggttattacttacccatataatacaaagaataggtttcttctaagaaattcaaagcacactgcaaattaatcttaattgtttggcatttattcattccctgagtcattcatctattcggtaatgatttattgaatacctcctgtgccctggacactctgttaagttaaaaatagaaaagtacaatctctgccct

SEQ ID NO: 71017 - DNA, 1506 bp, Homo sapiens
ctacatttatgtgcttgagctcagttatatatttacttttttgtgtctttcctttagggcattgatcggtattgaaagatacttgaaaattgttggttttgaggtttttttgtacatttaagcaacagtgtaacttgtaaacatacacaaactcaatcatattgactgttcctctaggaattaaattctatgattgctcattttcaggatttttctctagtttattcaacaattattgagtaaattgggcagctggcactttagttacagaaatgaatagaacatgcagattgtacccaatgggaagggtggttggtgggaatgggagatggatggggagtgtctatttgatatcatgtttgcagttgtgagcttcatatttgctccatataatatgttttttcaaatatcagggataatttttatctttcactaaacttgatgcagctgatgaaaatattgctagtagaattgaagcagagcagaatgacttgtaactacatcaccttgtgcttgcttacctgtcatttcctttgtaacttgtataagataataagctgaaagtagaacatatgtgagataccatgattcctgaggcttgctcagcaaactaatgacatccttgttcatatttacttgaatttaaaatgtgctgtatcagattcaaatacctctgtctgtcagattatcagattttcatgataagtaattttcctattagttttcttcatgttatcttggccataagacttgatattcactatatgagagcatttgtgttgtctttataaattgcaaggtggcttttaggttttaatgtaggtaattaaggtgatatataaaaataaattatcacttgtatgtctagagcccacagtttactaatcaagtgggaaaacaattaggggttgaatcttctcccatttgtttttttttttttttaacattctgtgctagggaaaaatccctttgaggcccttgtctttcctctgcttggcctaaagctcttcattctttaatacccagtagaaatctgcctattccatgaagctctatcctgaaatttgtagtaattcctcctactgaaatatctttgggctgggtgtggtggctcacacctgcaatcccagcactttgggagtccgaggcgggcagatcacctgagatggggagttcgagaccagcctgaccaacatggagaaaccccgtctctactgaaaatacaaaatgaacggggcgtggtggtgcatgcctgtaatcccagctactcgggaggctgaggcaggagaatcacttgaacccaggaggtggaggttgcggtgagcccagattgtgccattgcactccaacctgggcaacaagagcgaagctccatctcaaaaagaaaaaaaagaaatgtctttcgcattttcagtctctcacatacattcaataaatttgcctttaataagattttcagttgaattgaggtcaggacctcaattcatactaatggcatgccactgg

SEQ ID NO: 71018 - DNA, 1031 bp, Homo sapiens
attaagtatggaaataaatagaaaaatggcttttatttgaaatgaagatttaatttttttccccctaatataaggcattatgttgggaaaaaaattttaaaaaaaagttttgctttgtttagaatgttctgttcatgggaagaaatcaggattttacttgaatgaaaaagtaaaacaatacagaatacaaaacaactattccagttgtaatattttttcttaaggataactagtgtgactactaggcagtgatattgttttaagactctgctttcttttcttgttcaatgagaaaagtaagacagtttgcttggttggtgttcccatgtaaatcaagtcaacagatttagtaacaggatttccagtttgattcttagccacctgagcaagagtgcctctctgaggaatcagggataaaaatgatacatatgtattttttgaacagaagatctttgttttacagatacagctgagatttattaatccattgaaaaatttaagacgtcttggaatcaaaatggtaactgatatctttttggactgggaatcatatcagtttagaacagaagaaattgatgctgtgtttcatggtgcagtttggccccaggtaaacctcaatttctacatctgcctatgtacgttctgctttttcctttattactaactcaccaacatagctaccacccagacatgaatgcttacctgggtctttccttttacatcgagcccttctttctggaagtttttagaacacttttctttgccttcactaccacctaaaactcaagagttagtttctgctgtaccatggcatttacacttaaggctcagttgaatatgaatgtgtctcttaagcaactgtaacataactgtttttttgagatagagtcttgcttactgcaacctctgcctcctggattcaagaaagagattctcctgcctcagcctcccaagtagctgggattacagccatgcaccacaatgtccagctaatttttgtatttttagtagagatggagtttcgccatgtt

SEQ ID NO: 71019 - DNA, 1064 bp, Homo sapiens
actcgagagcatatgctcagaagtttcttttccctgggaactaatactaatttatataaactgaattttctttgtagttataagaatagattatttactctccaagaagtctcaactctgctgcaggaaattatgaaaatgatttctactgtcatgtctctacattcttcttaccatattatcccaaataattcccttactattaccaaaaaatggtttaaataaagcctcaggggtctcttaaataagttcttgatttagctagtaatatagctattttgaataagaagaaagttgtttatttagaatttagaatttatttagaattgaaatttaacttaaatgttcatagtggttgagtgcttttcttatcatcatgaagattttgtacaattatgccttaagagagtttattaaaatcaaatcaaatcactatctatttcagagtctatcacaataggaggaagattaattctacctcatgtacctgcaattcttcagtatctcagcaaaaccacaataagcgcagaaaaggtgaaaaagaaaaagaatagagcacaagtcagtaaagagcttggcattctttcaaagtaagtgatatgttgatacttaaaagataacattaccatccttggttttaactttttaaaaaattattatcttggccaggcgtggtggctcacacctgtaatcccagcactttgggaggctgaggtgggtggatcacctgaggtcaggggttcaagaccagcctgaccaacatggcaaaaccccgtctctactaaaaatacaaaagttagctgggcgtggtggtggacacctgtaatctcagctactcaggagactgaggcaggagaatggcttgaacccaggaggcggaggttgcagtgagccgagatcgcgccactgcactccagcctgggcgacagagtgagactccatctcaaaaataaaataaaataaaataaatttaaaaaaaattattatcttgtttttcaggtgttggaatctggcaataagaagctaaaaagttttttagtatttttgaatgccctttactttta

SEQ ID NO: 71020 - DNA, 1072 bp, Homo sapiens
atacagaggttgatattctggtgacagtacaaaacttgttaaagcattgtgtggaccctacaagcttcctcaagcctatagcaaaacttttctcagttattaagaacaaattgtcaagaaaattgctttgtacggtttttgaggtctgtactattcatttttactccaaatcacccttttaaaaaaatgtaattatgacttgtaaaccatattaggggctttcttcatgccagggtgatgtttttatatgaatttgaatggggacaggtagctgaggggaggagggcagaaaagttaaagttttattcactgataaatacactgttttctttcctttcagactctttctgattttgagagtgggttaaaatatattactgatgttgtcaaggtaagaaagaagggtttctctttggcttcaaaagtattatcatttttgtttactgaagatttatatgccttcttttatataacttcaatggcatttcttatagcttaacgccttcgatcaaagacatcttgatgatatcaacttcgacgttcgctttgagactttccagaccatcacctcttacattaaagaaatgcaaattgtggatgttaactacctaattccagttatgcataattgtttctataatctagaggtaggttattatagcaaaatttttaaattattttttattgttttggtaatacggctgcctaatacagtgacctgatctttaaatttgttttttgaggggggacaaaggtttttaggattaaatttcttttagatgaagaatcttatgtctggcaaaacagttattctcatgatttaaaaggcaaatattgtgaataaaataatacatatgaaagcattttgaaaaaaatcaagaagttatgtattagaatagggaaatccatagagatgaagtacattaggtcactaaaggctgcagaaagggaggaatggggcgtgatttctaatgggtatagggtttcttttgggagtgatgaaaatgttctggaattagtggtgatgatcacacaacctcgtgaatatacttaaaaccactgaattgtaaat

SEQ ID NO: 71021 - DNA, 1117 bp, Homo sapiens
ggtagatcatttcagcctataccagctatttcagatgattggaaaagaggaattcccactaacttgtaaaattgtaatcgcataccagaaactgacaaagactctgggcagttggctgtcattaggattttcatgctcatgaagggaggtgctttatttggttaagatgttcctgccccccaagcctcccagtgtgttccccaattaccctgtacctgcagttctgtgttcttttataatcggcagtttatttgtctctctttaaactctaaactgtgagaaagcaaaacccatggccctctcatttactgctctttcctcagcacttaccttgcctgcccacagttgctgattagatattttttatcggaagttggacgttggtgggaaaaactgcttaccacaactgtgtggtttcattatttgctttaaggtgacttttgttgtttattaaacatagacgcaattgaagcaattgagttaccagagcctgaggccatggaattagagcgtgtggatgaggaagagaaggaatatacatgcaagagtttgtcagacaacggacaaccgggaacccctgatccagctgactctggaggaacatcagctaaagaatccgagtgtatcacaaagcctgtctctttccttcctcaaaacaaggaagaaatagagagaacaattaaaaatatccaaggaaccataaccggggatattctccccaggctacataaatgccttgcatctacggtaataaatttattcggggtccagcaggtctgtgtgaattctggtgttggtggagccctgtcacactgaggctcttggtgattattgattgatttcagcttttagatttccttttatctcaacacttcacaattcacccctctactcttatctcttcaacttcaggcttatcctgctgcaactaagcagtaacgctccttctttatgattttgatagggtagataaatgcttttccatctccaaagtagttattaagagactcccatgtcccaaaaaggttattaaaaattagaatgtttccattttctactttctggtcagttctgcactattcaaaattcatctttcctagttaacagggataacatt

SEQ ID NO: 71022 - DNA, 1018 bp, Homo sapiens
aaggcaacaagaattgagtgcaggtgaatattatagctgggtcaagtcagcagctaagaacatgaagaaatccagaggcacacaagccgcatagtgcttatctttgaggttgaggttgtgagtaacatttccttatatgttatgtccatgtttgaaattttattaagaatttgttttaggccaagcatggtggctcacacctgtaattccagcaatttggaaagccaaggcgggaggaattgcttgagcccaggagtttgagaccagcctgggtaacatagcaagaccctgtctctatttaaaaatgtatatttacatttacaaagaaattcattttagttaggagtaaatatatattagaaagcctttggacaaattgccacttccaggttgccaagaggaagaaaactggcatttattgacatattatattctaagcactgctacattatctctcctaatctgcacaccctgtgagattgatggtacttccattttacaaataagaaaattcaggcttggaaaggtagaaaggaacatggttaaagagaaaagtcagggtatagggtttagttccagatctttctgatccaagttcacattcctaccatggtttcattctgcctcctgaagatcagggaatgtaatttacccaccttcctattgatttctgtgcctgttgcagaggtgaacatccagtaaatgttattaatttattagttttgtgtattaaaactagagcaaagagcactatctattgacatgaattacattaggtctaaatgttctggtgctagatgaactccataattactcctagaatgcatttagttttatgtgagccttatctaagaatgttagatgcattttcaggatgaaaaagagtcaacagagcacatatatccgtgatgtatattaaaaagtccctccaaggtattgagagttaataccatgtctcatgcaagataatagctctgaagcaccaagtatttcctgaggttgctgatcctggttccca

SEQ ID NO: 71023 - DNA, 1050 bp, Homo sapiens
acaggaggctgaggcaggagaatcacttgaacccgggaggcggaggttggagtgagccgagatcgcgccactgtactccaggctgggcaacagagcaagactgtctcaaaaaacaaaatcttatatattagtaaacttcattttggtcttgcttctatggtctaagagagactcgttggcatttattttcagaaatcaaacaagggagtatcctgctgttgatcctaatataaatatgttgtcctagtaaccttaatcaacagcctaataatctcttctgtatctcatggtttgggggtttggggaggggcaaaacccaagcaaatggcacattatttagtgctgggctctcgtcactttagaagggccactctaacttcttggaatgcagctgacagtgttctttaccctcttctcatgccacgtgattgacagaaatccagtagccccagcaccagatccacgtctaccaccccagagctgccttctgcttcccccaactccagttcgaggtggacagaaagctgttgtgagcaggaaaaccaacatgcacatatttattgagtccgggcttcgggtaagaattaaccttaaaatgagacttgctactttcagggagtctgcaccttttagtcttctgttgaatttctagtactgctcacttccattggaaatgccttactgtaaatacattttagattttttttttttacaggtgcattggtccatttactatttatctcttgcagcacttacattgaagatgtaactgtcccagaattaatgattctgctctaatatgtattaaggtcttactgatgctttgcccatgagtccctctgaactactttgaatttttttaagagatggtgagtggccagacatggtggctcacacccataatcccagcactttgggaggctaaggcaggaggatcacttgaggagaggagtctgaaaccagcctgggcaacatagcaagactctatctctacaaaaaaaaattttttttaattagccaggcatgatggcacgtacctgtagtcttagt

SEQ ID NO: 71024 - DNA, 1096 bp, Homo sapiens
ggggaattctgtacaaatacaggtattctgtttttatttatatgtttttcttcttagtaaaatgtacataacataaaactcaccattttaaaaaattcaccatttttacccatttgaagtgttatgtttaagggttgtgtgttctttgtgcttaagtgtctatcctttttcttttgaagatactttcttgtgtttgaaaatgtcctgtggttgctttagcgtcaaatctgcttccacgcatctgcagcaaaacacatgaaatgagtatgtcttttccttttgtatcttaggcaattttatcaagaaagctgttggtcccagaaatcgatgaggtcatgcggaaagtatccaagttggcagtctctgcacaaagcgaacctgccagggtccagtgtagacaggtttgtagagagcacttatccccatagcaagggctgggccctgccgcatctttgtggcagaggtgtcaacactggctgaattctgaagaccaccttgtgtcgtattgttgctttatgctgagacttgggcgtcctggtgcaggtggtcaggggaggctttttctggggactgacaggcaggccaaaatttgaaggaagaaaaaggcttagctttcaaggtgagggggcagtagaggcttgaggtgagtgagagcttagcttggttgaggagctcaacacaggtaagtgaattgaggggtggggagccaggttgggcaggaccttgtggtcttgttaaagatttggggctttgttcttttttttttttttttttttttttttgagacggagtctcactctgtcaccaggctggagtggtgcagtggcgcgatctcggctcactgccacctccacctcccaggttcaagtgattctcctgcctcagcctcctgagtagctgggactacaggcatgcaccaccacacccagctaatttttgtatttttagtagagatgaggtttcaccatgttggccaggatggtcttgatctcttgaccttgtgatccacccaccttggcctcccaaagtgctgggattacaggcgtgagccatggtgcctggtggggctttgttctaagaatagcaaggagctatt

SEQ ID NO: 71025 - DNA, 1029 bp, Homo sapiens
ttggaactttttaaaatgagcattatagccaggcatggtagcgcatgcctgtatttccaccttttcaggaggctgaggcaggaggaccgtgccactgtactccagcctggctaacagagcaagaccctgactcaaaaaaaaaatggggggttgggggattcaagttaaagtatcttcatggtatatgaagatcaaaggttctcaactcaggcgattttacccccccaggtgacatttggcaatgtctggaaacatttttgattgtcacaactggagggtggaggtgctactgggatctagagcatagaggagcagggatgctggtaacatcctacagtgcacatggcagcccccacaggaaaggatcatctggcccacaatgtcaggagtgccgagggaggttcagaaacgggtggattgatgtgctggagtaaaattgtccatcagatactttcagattgttgttttcattgatttacatccgtcttgtttttagatcatggaagaaactgaagaaaaagctgcagatcgccttctgtttagttttcttacactgataactaaacttatcaaggaatgtaatattattcagtttaccaaacccgctgagactttgagtaaaatctggagtaagtatttccttttttatttaaatcaaacacatttgttgtcatagaattactgaaagtagatttgagaaattcgaatatgaatacttcagaaagtatacaatgtcaggaaaagagtccatgagaaaaaacctaaaaggttctatcagattgaacacagtgaaaatgttcccttctgaaaaaaaaacgtatctatgatttcataagtaatacctttcaaagtcctgtttggtacttaataatttcagatatgtatctctttttttcctatttatttattttccctcaggtacaactgacaagtgaaaactgtatatatttatggtgtacaatgtattgttttgatgtatgtacttgtggtctatatttccatccagtctttctttttgttcagtaggca

SEQ ID NO: 71026 - DNA, 1053 bp, Homo sapiens
gtctgtgctgcctcctaagaactttgttgatggttaaatgagatcatgttcatgaaaatgttagggtctcagctgggcatggaggctcatgcctgtcatcccagcactttgggaggctgaggcttgcagattgcttaagctcaggagttcgagaccagcgtgggcaacatggtgaaaccccatctctataaaaaataacttcctgagtgtggtgtatggagaatggccacgtagccaaatgctgaagaattaagagtttgaaggtcagatcaagctagggcccaggactggctctgcctgttatagcttagcatgtcacacagcctttctggaacacttgtttcttcatctgtaagatggaaattataattccaacgtcacagaattgttatgaggtctaaatgagataatacatgtaacacaattagccctgtccctggcatatagaaaaccttcagtaagtaaatgatagctttacaggcagctacttggagccaccaattctactgattagaaacaagcctgtacctatatacatacttacattactcactttagaaaatgtaactgttggccaggcacagtggctcacacctgtaatcccagcactttggaaggctgaggcaagtggatcacttaaggagtttgagaccagcctgaccaacatgatgaaaccctgtctctactaaaaatacaaaaattagctgggtgtggtggtgagtacctgtagtaacagttactcaggaggctgaggcagggggattgcttgaacccaggaggcagaggttgtagtgagctgagagtacaccactgcactccagcctgggcaatgggaatgaaaccctgtcgcaaaaaaaaaagaaaaaaaagaaaatgtaactgttaatgtcaccttatctcccttgaatctgaaactagttcttatggaactggtctgtttgagggctgtttataccccattagagtcatttaaccactctaggagttggttttctagtcgtttccagtgcctctcccacctcacttctctctagctcctgtgagcttctaaga

SEQ ID NO: 71027 - DNA, 1049 bp, Homo sapiens
gttactgtgggcagagctaagcctctgtgacccatcatggattagagagggaatctcttacttttccccccatctgcaagagctcaacaggtaaacagaggtaattcaaaacgtttctgtcaaggtcccaagttactttaatgtcttcagggccaggtttccgctgggaagtgggcctcatgttctctgatttcttattgcatcctgggtgaggtggtggctggagtgctatgtctagcattgctggtttccccatcccaggaacatagaggctagttttatatcagtgtttaatgttgaagtaacagtgataatgctgcaagagttgaaattttgttttgttttatttggggtttcttgccagatcagtagctggatataaatgttgtacatattgttgattttgttgatgttcaaatgtgtcctttcctacctgtctctgatcattactctttgtgtgtgattagatcctttgctgaagaatctatcccaggaaatcatagaattactcaaaaagctggttgggcttgagagcttctcattagcctttgcctctgtacagaaacaggctaatgagaaaagggcactccggaaaaagaggaaggccctggaggtaagtttgctctttgaaaatatggcatgttcactggacttgataactactaagtgtgcatgtttgtgtcacacttacacttagggaggatcaagggtttgagcggttggggactttatagctgggacttcagattttctttaatgagcatgtgttttttacatttatttctgtatttgattcttattggtttaacatttactttaaaagtaatataaaatttctattctcttttccagtttgtaactaatcctgatattgctgccaagaaaaaaatgaagaaacacaaaaataaaagtgaagcaaagaagagaaagatagagttcctgcgtccaggatataaggccaagagacaaaaaagccatagcctgaaagatttagcaatggtggagtaatgtctccctgtgctgatacaagcatgaactttctggaatat

SEQ ID NO: 71028 - DNA, 5571 bp, Homo sapiens
cactcttgttgcccaggctggagtgcaatggcaccatctcagctcactggaacctctgccttcctggttgaagtgattttcctgcctcagcctcccgagtagctgggattacaggcacctgccaccatgtccagctaattttgtatttttagtagagatggggtttctccatgttggtcaggctggtctcgaactcccgacctcagttgatctgccctcctcagcctcctaaaatgctgggattacagatgtgagccaccgtgcccagccaatgtttatcaacattcttttgactccatcacatctgagggatatggtacatatatccaccagaaacagtgaatcattaaggcattgattctaacatgtgtgggacagaattggcaattgatatgtcagtttcttccttaaaacaataacaatatgttctccccttttaaattttctctaggccatactggagatgttactattcaaacacagatgcagtcatttatgtagtagacagttgtgaccgagaccgaattggcatttccaaatcagagttagttgccatgttggaggtaagaaaacgtaaccactttaaaatgtggggcagtcatttacatattattacattgaagaataattaaaaagaatgcaggggttgttccctccatccttttaaaattattttcttttatggaaatgattttctattccaaaaatacagttgaggagggttggagacaaaacaacaacaaaaattaacctcgtaacttcctcttcaagccagattgcttgattttccaggaggttcagaagagctcacttaaacaaaagcatctattctaagtcacttctttgatgtgacttttaaaatatgtctttttatttttagctgttttagaaggattcaagttcagagaaatatgtatttctgggttactggcacaatgctggcctcacgtttatcgttttttatccttcccagtgtttacagtgcttttgaccttctttctgttctttggacacgagcttgcacacctggctcagggccttttgcacttgctgatccgtctgcttggaatactattctccagcatctttgcatggctgccttcctgacgtgtttcttcccacatctcttccccagaaagaagtcttatttattctctaatcctttacccttctttattctttataccgatattgtttcttttttttctttttctttttcttttttttttctttttttttgtagagacggggtctacctatggtgcccaggctggtcccaaactcctgtcctcaagtgatcctcctgcctcggcctcctagtgttgggattacaggtgtgagccattgcaccccacttactgtttttttacattatttttaaatgtatttgttggctgggcgtggtggctcacgcctgtaatcccagcactttgggaggccgaggcgggcaggtcaccagagatcatcaggagtttgagaccagcctgtccaacatggtgaaacctcatctctactgaaaatacaagaaaattaaccgggcatggtggtgtgtgcctgtagtcccagctacttgggaggctaaggcaggagagtcacttgaacccaggaggcagaggttgcagtgagccgagatcgtgcccctgcactacagcctgggtgacaagagtgagactctgtctcaaaaaataaaaattaaaaaaaaatatatttgtttacttatgtatctctccctctaaaatgtaagttctttgagtttaccctgataggaggaacaatgtatagtacttaattaagaattcaatacatcttattcactgaagttaataagatcatatattggctaactgatcaaattcagaggatgcattaaataatccatttttaaaaaatgaaaaaataatcaaatgtactatgataataataaaattgcccttgctctggaaaattagatggataagtttctttctcttgtcaaaaactggattctgaattgtttaatcaagggatgtttaaatataagttctaggccagttgatacctaggtaaaagcatcctcagacgaggggactatgtacttttgaattcttttttttttttttttttttttttttttttagacagagtcttgctctgtcgcccaggctggagtgagtggcgtgatctccactcactacaattttcgcctcctgggttcaagcgattcttctgtttcagccttctgagtagctgggactataggcttctgccaccacacccggcttatttttgtatttgtagcagagatggggtttcaccatgttggccaggctggtctcgaactcctgacctcagcagtttgcccgcctcctgatctgccagccttggcctcccaaagtactgggattacaggcatgagccaccgcgctcagcccaggacttttgatttcttgaactactgacttaatggcttccaagttataaattgcagacttaatagttttaaacatttggttaatttttttttttttacatcatagcattatatttattataagagcttcttagaccaaatttaaatgtaaggataaggtttaattgccttgggtataataggttttttaaagaacagttttatttaggtataattcacatgatatagtgtatttttatcatataaagtattgcttaaaaggaatggattattgacttcagtttacaatttttgagttgtgcaggattgttgttacttgcagtgttaggatttgacttataaagtcttacagagaaagaagtaaaagttggattctttctttaggaagtcacttttaattcatcaataaatatcatgttatgttaagtatgggccaagtacgagtcaggactgttaatgttaaaacatatagacacaggccaggtgtggtggctcacgcctgtaatcccagcactttgggaggccgaggcaggtggatcacttcaggtcaggagtttgagaccagcctggccacccatatctactaaaaatacaaaaatgagccgggtgtagtagcgcacgcctgtaatcccagctacacgggaggctgaggcaggagagtcacttgaacccaggaggcggaggttgcagtgagctgagatagtgccactgcactccaacctgagtgatggagtgagactccatctcaaaacaaacaaacaaaaaatatatagtatagacacaaaagcagtttaggtttcaactttttttttttttttgagacggagtttcactattgttgcccaggctggagtgcagtggtgcaatctcggctcactgcagcctccacctgccaggttcaagcaattctcctgcctcagcctcctgagtagctgggattgcaagcgcacaccaccacacccggctaatttttgtaattttagtagagacggggtttcaccatgttggtcaggctggtcttgaactcctgacctggtgatccacccacctcagcctcccaaagtgctgggattacagatgtgagccaccgtgcctggcctttcaactttcctatacacaaaaatgaattctaaatgggtaaataattaaatgtaaaaaatgaaaattataagaacatataaggaattcaaaagatgagatttaattatattaatgtaaacaaaactcccccaaagctcagatatggcaaatataaacaagattaagataagaaaccaggcctaaccagaagccaatgactaaggattagtgatctgaatcatagcaagatcttttgcaaaatgagcaaaaggcaattcgtaggggaaaaacattgctaataacatttgcatttgtttttaaagagacagggtcagcagggcgcggtggcttatgcctgtaatcccagcactttgggaggccgaggcgggtggatcatgaggtcaggagttcgagaccagtctgagtgaccaacatggtgaaacctcatctctactaaaaatacaaaaattagctgggcgtggcagcgggcacctgtagtcccagctactcaggaggctgaggcaggagaatcacttgaacccaggatgcagaggctgcagtgagccaagattgcacgactgcaacttcagcctgagcaacagagcgagacactgtcttaaaaaaagaaaaaaaaaaaagagacagggtctccctctgtcccctaggctggagtgcagtggcacaaccaaagcttgttataaccttgagctcctctctctgcttccttttttgtttgttttttaaaaaaatttttgtagagacccctgtgttgctcaggctggtctccaactcctggacttaagcgatcctcctgcctcagcccatgtgcatttcgaataccctagtaatatataatgagatgctatgtttggaaaagtaaataattcccaactctacaaaggctgcattgaagatggagacttttatacactgttggtagggtaacctttctggaaagctgttcatgcatgtattcagtttatcaaagcctgaaaaaaactgttcatactttgactccatttttagaatattgtgttaaggaaacagatttaaacagaaatttttgtataaagaccctgtcacttgggtttatctaatagtctagtggaaagactctaataagagtcagatactagaaaatagttaacacagtttatggtgcatgcatccatagtgtagagcatatttagccatttttttattttgaaaaagttgttgtagtttggagaaacatgattttaatttttaggcagggtatggaactatatataaatgtgatcttaaatgtgtaaatgtatttactaaataaactctgaagtatctgcaaaacaaagtactagtagaaaacacctaaaatgttaacagtgatcatatttgggaggtaggattatgagtgaagcttcttttctttatacttctctatataatttctatataatttcataatgtgtaatatattaattataaaatacacgtttaaaatgtatttttggacattttctaaactcgagagagcacattagttaaaagaaattaaatattttcaatttcatttaggaagaagagctgagaaaagccattttagtggtgtttgcaaataaacaggacatggaacaggccatgacttcctcagagatggcaaattcacttgggttacctgccttgaaggaccgaaaatggcagatattcaaaacgtcagcaaccaaaggcaccggccttgatgaggcaatggaatggcaagtatcatgcttccagaagccatctgtgcatttgtgtgtgcttgcagctatgcacgtccacgtgtaatttttctcccgtgttgaggatgaaactttgatttacttagcagcttatttcataagttcctcaagcgttttctctcactggtcttcaggtgcatctgtcttctcaaccacacctacctgattacagttacttagataagcaaattctttgccaatttttagccttttccctgcctcacctcaccctccaattccttatccttcaggaattagcttaagactctcttctgaagagcttttcctaatgtatctctattcctactgcctaatcactca

SEQ ID NO: 71029 - DNA, 3979 bp, Homo sapiens
tgtgcgaggattacattgtcccactatcctccttactggccccttggtttttaggggtagtgaggggatcatgctaaaatattcctattctgctgattagaaaatgagattcccaaaggccgcggccatatttctcttattatttggtttatcttctgtgcctgcatgacacaatagtaacataactaaggacatagtaacataactaattacttgtttgatattgaataatatatttcattgggaggaaaaatatgcacctacgcatccaggaaattataatatttaatttggtatttagctctcaaaggacaaggttagatgttttgtatacctagttcacaaaatgacattgtgtatgttttttcttttattattttttaggtggctttttctcaagtatattttccagtctgtttggaactcgggaaatgagaattttaattttgggattagatggagcaggaaaaaccacaattttgtacagattacaagtgggagaagttgttactactatacctagtaagtgttggtatgatgagctaattgtagggactttctggtctccatccaacataactatttctttctttcttttttgtttgttttagtagagatcaggtatcatcactatgttgtccaagctggtcttagactcttggcctcaagtgatcctcctgccttggcctcccaaagtgctgggattacaggcatgagccactatgccaggcctatttctgaataaattaattcatataataaagtatttgataaagtttgtaaactgctagtatgaacataacattgataacactttttccatcaactaagaggcagcttagtgtaatttaaggacccttgttctggtttacggccgggttgggctgtttataggtttaagttactaaatcttactgagagccagtatctttactaataaaatacataagataacaaatacccactggttttcagggggaaataaacaaagtaggtaaaagtaccttttaaatctgtgtaaagaattatataaatgttaagtgatgttacatgtgaagtgcctttttttcctgtatttgttactattttaattaagattagtttatcttaggtaattatattgattacttttaaagatctgagttgcagagactgagtgttgaagtaatttggtaccttaaaaatatcaagagaaggccgggcacaggagctcacgcctgtaatggcagcactttgggaggccaaggcgggtggatcacctgaggtcgggagttggagaccagcccaaccaacatggagaaaccccatctctactaaaaatacaaaattagccaggcgtggtggtgcatgcctgtaatcccaactactcggaaggctgaggcaggagaatcgcttgaacctgggaggcagaggttgtggcaggccaagattgcaccattgcactccagcctgggcaacaagagcaaaactaggtctcaaaatatatatgtgtatatgtatatatttattaagagaagaaatacctcaattttaatcaattattactgtcttacaaaaatattctccaacagtcttactgactatatgagaatactgttgttatttatacttttttcatttgttgccttgaatttacttagagaagagtagtacatttaaattaaagagttcatacagtttgctcaagattttttaaattatgcctctaatgttagtctgtcactcagggtatttctatattgttactgtttaaatttatggactaaaacgaaagaggctagcctctaagaaagaagagcgttttgaaccctgtaatgtctgttattcctttttgctaccttcagtaaattttagtgcccttagtttttgcttctcaaaatcacccatctctgtctgggcatctcctgcagtgcacagagcagcacagtggatagtttggagtttcagtgagtgctgctttacaccacactctttgttgagacagtgtcttgcttttttgcccaggctggagtgcagtggcacattcatagctcactgcagcgtctacctctacctctacctcctgggctcaagcgatcttcccacctcagcctcccaaagtgttgggattacaggcatgagccactgcacccagtctacaccattctcttgtcttgcacatataaacgatgttttttactgttggtgaacattgtgattacactcctacctaattctaagggagacatcatgaacttgcattttagttttttgctcaaatttgtcatagtattgttattttttaattgtaatagacatacttgccaaatactcaaaggtatcacttaccactgcagacttaaatataaaacaaaagctaattgtccagttatacctggaagttattttttatttatttatttttttgagacagagtctcactctattgcccaggctgaagtgcagtggcaagatctcggctcactgcaacctgtgcctcccaggttcaagcgattctcatgcatcagcctccagagtggctgggattacaggcatgtgccaccacacccggctaatttttgtatttttagaagagatggggtttcacagtgttggctaggctggtctcgaactcctgacctcaggtgatccacccgccttggcctcccaaagtgctgggattacaggtgtgagccaccgcacccagccatggaagttattttttacctatttttcacctaagaaggatggcagagaaaagggatgggacacctgccctttgaccacccagccatgaccttattacaagtgagttctggaggatgtctgcagatgggctgtgagattgaaagctgcagccatggctgtgtccatgctgtagtttagaactgaagtttagctttttttcttttggtctgtttatttgctgccagccaaaattctgctttttatagtacatccacaactgtactttctaaatacagctttcgaacacttttaactactctattatgaggggagtttaatataataggatttccattgagctaaaaattatgttttcctttttatttcttttttaaattctttttttaatttatttgagctaaaattatatactttatttgcagaactgctggcttttaaaaaatatcctgaagatggtattgatcttgctaattgatgttttgtgcacacacctgcacatgtgtgggggagcagagcatactatttcgtcttaaatggtataaaatctcaaccaataatgtgattcaacaattaccatttctttttaactcgaatcctaagacaaattatatatatatatattttaaactctaataacagttaccattaattgctgtaactcaattagataggatattttgaaggtggaatgtattagtctacacataccactgatttgatttctcttccagccattggatttaatgtagagacggtgacgtacaaaaaccttaaattccaagtctgggatttaggaggacagacaagtatcaggtatggtacaaagaccaggttatttggtagtatttgacatttattgattcttttaagggttaaaatcagtaaacccgaatatgtgttctattgtaatttaaatggagccacctagtttaaaatgaggtaaaattgggaactatttccttagagcatccattgagttaaaacttaaggaagcccagttttccagatacctgtttaatgaaaatcttttcacgaaaatctcaagaccttattacttcagctattctcaattagaaaggaccctccatttagttcttgtcagtctctcctctctgaaacacattgttttggaattcattaaagtaccttgcaggcataccatttagggctaatataaaaataaatgccattggccgggcatggtagctcacgcctgtaatcccagcactttgggaggccgaggtgggcggatcatcaggtcaggagttggagaccagcctgaccaacatgg

SEQ ID NO: 71030 - DNA, 1031 bp, Homo sapiens
tcctgcaggccacagcgaagacaaaaacctctggttactggcctcaggtgcaaggctgctccgcattggcagcgcggtaccattcctattattattacgtagtcttgtttctttctgggagaaagcacctagggagagttgggctggccccgcagggcgctccgggacacgcgtcctctgcaacgccgcagcctgcgccagcgttcgaccgggacgactcatcgaggcccgactcgcattttcagttgtcagattcgccactttttggtgtcagaatttaaaacaaaaattccaatttctctatttcagaagctctttctgtccagaaaaacacaagcaggagagacttcaggtttttgaattattcgtctcttctggcctccacggtatctacatccagtgagcggggaccgtgagtcgaaagcgacgacgcggatgctcaggccaccgttcccggcgcgcagtcgcagctgaccctcgctcccgcccccgcctggagtccgacgtggaagttgctggctgactgggcttgcgaggaaaccgcctcggagctgcagccgaaggccaaggaatcactgaagatcggcgagggaggacagggggttcatcatgggtgaggggttcgagaagggcacctgggcgcgctcgagggagccgcggccgagggctggggtgcagaggaggagaggggccggccaggataccctagagtagccagctcctcagggggcgggtcgcggaggacttgactcactttggatcttcatctgtaggggtggatccggcctctcgcgttctcctccgtcctctctcggttccccttgattcctgcggggtccagggacccggacagcttggggacgtccgcagagcctgggttcgagttctttacccttatcatgaagttttccctcatccccagctccacttgctgggcagagttgttcttgcggaggctggcaacgcgtcagtcgcaggttcgccgaggtttcttggtgaaagatgagctgcggccccagagtggaagctta

SEQ ID NO: 71031 - DNA, 1028 bp, Homo sapiens
gtgcagccggcccctggggagtcaaggaccttgatcgccgataacaagttgccgttggcgggcgccgagggtgacccgcgagcgcggcacccgcctccccgcccctagcaggaccccctccgccccgcccccagccggacccctccccgaggccccgccccacccgcgagccgcagccgcggccccacagcttctggggctggggccccggcagccgggcaggccggcctgacctcgacctccgccgtgcgggcccgaccggtgagtccagcccggcagtcgcaggacccggccgccagcctctccctccacctctccctgcccccagcgccaggcgcgggctgcgctcggtggcggcggcggggccctcaggcggccatggcggcaggcgccggggccgggtccgcgccgcgctggctgagggcgctgagcgagccgctgagcgcggcgcagctgcggcgactggaggagcaccgctacagcgcggcgggcgtctcgctgctcgagccgccgctgcagctctactggacctggctgctccagtggatcccgctctggatggcccccaactccatcaccctgctggggctcgccgtcaacgtggtcaccacgctcgtgctcatctcctactgtcccacggccaccgaagaggtagggctggccgatcgcccgagccgggccccagatgcgctgcgggcgggtcgctggaggcgccgggggaagggcggacccacgcgcggctgagcctctcccgggccccggaggggcggactggccactgccccgggcggtgtccgccctgggccgcctggagactgtcacgccactatcccaatcccgtgaccatcccaagcctcccctgggcagcggaggggctgttaaggtcactgccccaggtcctatgtccgcgcagatcctccccacggccgcggacgggccggagggcgcctgcccagccgctatcccatgcggcgccaacctgtgagacggacccgcggtcgggtgctttgcacactggggactgaaca

SEQ ID NO: 71032 - DNA, 1026 bp, Homo sapiens
atattttcctgttcaaattatttccatgttatcctccatggtggtgttggcaagaatggatccactatagcagtaaggcaataatttcatcattcagtgtcaattttatgatacattttcttatcaccagttataaaaagattaaaatatgccaaagttcaagaatggggaaggaaactaagtatcttaaagaattcattttaggcacatagtacaaaagcattttaaaaacagtttaaactgatattttcctctttctacaagcttgctctgcatagacttttctgacatctagtttcattactgcacataattaagagttgccatttgttttcctgcattttgtgccttgaactaatagcagagaggagaaagggtagggaatgtatgagttcctgattgaaagcaggaaagtggccagaggtcaatggtttcacatatggggggatttattactcatcaagtaaattttattgaaatttcactgaaatatatttaaaagaactattctaatatttcaaaaggtaaaattttaactttaattcttaagtgggtatactttgtgcttgtgttctttacaccttgctcatgcaagtattaaatataatgcttttgtattttttcacatttgttttttaaaacttcagtacttttaagtgggcaagagttgggattcctgcaaactttttaaacaaatataacacctatgtttttaaaaagcctattgtcattttcaaggtagttgaacagaagaagacaagtacttattccagtgataccatcttataccaaaccattgttataatgcctttttcagggccgggcacagtggctcatgcttgtaatcctagcaattttggaggccgaggcaggtggatcacttgaggtcaagagttcgagaccagcctggccaacatggtgaaaccctgtcgctaccaaaaatacaaaaaaattagctgggcatggtggccatgcttttgtaaatccagctagctacttgggaggctgaggcaggacaattgcttg

SEQ ID NO: 71033 - DNA, 1026 bp, Homo sapiens
tagtggtaagaaatttttattattcatgatataaataatatacttagtcgtcaaacacaaagctggaaattatttcataaaatgtataggttttcttttgtagtgtaaaatcataataattagctatttgtgctccaagcaaaactgtgataagagttatattcagttaaattgtttagctgtagttatcatttacaactttctgatatcaagaaatttaaacactggaaactttaataagctacccagttgtgaatttgagaaggtgtagaaaagtattcttaaatgtgagattaaatggtctgttttaatactgaattaaagttataattaattctgtcgtaaaagctaacacatttaaaacttaatagtaaaattattttgtttaatttttttataggtagctcacatgaccaaaagtgaactatatcttcaagacactgtctttttggggccaggtcttttgtttttagaccagtactttaataactttatagacgaatatgttgttctatggatggcaatggtaagtatttttctccattttatttattttttaacaatgcttaagagctatttcagtgagctatcagtagcctcaagatctagtctaggccaggcgtggtgactcacgcctgtaatcccagcactttgggaggccaaggtggacggatcatttgaggtcaagagtttgagaccaacctggccaacatggtaaaactctgtctgtaccaaaaaatacaaaaaattagccaggcgtggtggtgcatccctgtaatcccagctactcaggaggctgaggcaggcaaatcacttgaacctgggaggcagaggttgcggtgagccgagatcatgccactgcactccagcctgggtgacacagcgagactgtgtctcaaaaaaaaaaaaaaaagatctagtctatacaatatatacaataaatgtttctgagtatttaaaattacttcttctaagctgtgaataatattatattgtgtgtagaaatggccacatatctataggcca

SEQ ID NO: 71034 - DNA, 1130 bp, Homo sapiens
taatgtacttagtggttgaataacttttacttattttatcccttatcacctcaaatgagtcagtgtgtacttaaagtaaacttttgtattctaaaaggaagattttttttaccaagtaagtttttctaagttactaattttcttacatgtcaactgactcttagctactgttttcatttttcatgaaagggaatatttaacatccacttttcagtgacagtgaaattttaactcaaaatatcaaggaacaagttaccttcagtataaagattcgtatgtttttctgaactggtacaacaaattccttttattaaatacaaattttatttaaaaaattcctgtagcccttttaaattctagtatactaaaagcaagtattttataacatactaatatgcctcttgaaaaatgattagtataaaaaatttcttagaacataacttgattcaataattacattataagccatgcacttaagcagtattgaatcacttttcagtttttagcagtcaaagtaagcaccctcaagatggctaaaatcctttatgttctgaatatttatgtaatcctttggcagtgaaaaccctgtgtctgataagtctcagagacaaactgctacttagaattacaggggttcactgttgtcctcaggattgacatttctttagtcttgtttctaattaatatgtagacaattctgagaacatctgtgataaaaaatgatgatacaatgggggcttcataactgaaataagacacaatgaaatctacagggtttatgttttatattcaaatataaccttattgatggtatactagcctcctgcacagggggatttccttcactcatagattcccctaacttcatctcctcttttccttgggctattagtcagtcaatatgcttgtgaacctgttcaggtgcttgatgacatgcagtcttgaatatatttagatgaaggtgtcttgaaatttgcaggcacaaagcactaaagtatatcaccatatcaaatgaagaaatcacctttagaagcaaaaaagaaaatataaaatcgattatgatctatcttttctcaagtagcactattctgtttctcccccaaatatcaaaccttaacctaaaattcttc

SEQ ID NO: 71035 - DNA, 1041 bp, Homo sapiens
tacttgagaaaagatagatcataatcgattttatattttcttttttgcttctaaaggtgatttcttcatttgatatggtgatatactttagtgctttgtgcctgcaaatttcaagacaccttcatctaaatatattcaagactgcatgtcatcaagcacctgaacaggttcacaagcatattgactgactaatagcccaaggaaaagaggagatgaagttaggggaatctatgagtgaaggaaatccccctgtgcaggaggctagtataccatcaataaggttatatttgaatataaaacataaaccctgtagatttcattgtgtcttatttcagttatgaagcccccattgtatcatcattttttatcacagatgttctcagaattgtctacatattaattagaaacaagactaaagaaatgtcaatcctgaggacaacagtgaacccctgtaattctaagtagcagtttgtctctgagacttatcagacacagggttttcactgccaaaggattacataaatattcagaacataaaggattttagccatcttgagggtgcttactttgactgctaaaaactgaaaagtgattcaatactgcttaagtgcatggcttataatgtaattattgaatcaagttatgttctaagaaattttttatactaatcatttttcaagaggcatattagtatgttataaaatacttgcttttagtatactagaatttaaaagggctacaggaattttttaaataaaatttgtatttaataaaaggaatttgttgtaccagttcagaaaaacatacgaatctttatactgaaggtaacttgttccttgatattttgagttaaaatttcactgtcactgaaaagtggatgttaaatattccctttcatgaaaaatgaaaacagtagctaagagtcagttgacatgtaagaaaattagtaacttagaaaaacttacttggtaaaaaaaatcttccttttagaatacaaaagtttactttaagtacacactgactcatttgaggtgataaggg

SEQ ID NO: 71036 - DNA, 1001 bp, Homo sapiens
acagcacttaatacacaccttttacatagtaggcaccagattaactgtttgttgaatgaataataaagacgtaagacataatttttatttttcataatgtgaaagaggttgtactatagattattttattccctctagtgaattcatggcacactattagtcataagtagattattgcttgatatttggaaagcttaatagaaatggtttttactgatgtgggacttccagtcttttttatcttgaccttaacagttcaggaaacccattgtgggcaaagtatactacattgtacttcctataacattttattcatgtcttatattttttcttttttagtaggtattttggtattcatgtattacttagaatatttttatttcaaatagatgagcatttgaatattcaaaaattactacttttgaaaattaattgtacaagtttagaacctgagatgaaaagtggtcctttgtaacttaacttgtcttttgtgtttttagagtatggaagagttggagaagaatcatgataatctacttactggtgcacaaaatgaatttaaaaaagaaatggctatgttgcaaaaaaaaattatgatggaaactgtaagtgatcatattgaaattgaaaaaataaggattaatataagcaatgaaatattttatttgctgaaataggtataacacttaaataaaaattaaacaaatgtttaatatctccttccatgaaacagcagcagcaagagatagcaagtgttcggaagtctcttcaatccatgttattctgatgactctttgaagaaagaacttgaacctaagtaatatgatacaattataacgttagctaagaagcatattgtaagtctttagaatagtttaattgtaacatctttaatcataaacctgtttcattgtaagacctccctttctgttaagtcaaatctaaatagttatgagttagttagcaactattcctaaagaatatgtattaagctttcagct

SEQ ID NO: 71037 - DNA, 1065 bp, Homo sapiens
gtttactcatctatgaaaggggaatgctgagtatctatctcttagaaagtttaccattactaatactgtgtagtggttagaattattagtaatgacaaaatctagggtgggagtatgtaagtcaatggctaaagtagggtagaggccaaaatcattgagaaacaggtcacgaaacggaaaaccattattattggaaggatcatctgtgtggacattgaaatcaccaagaattaagacatgacttgattattgttaaaatttcccattcagcaactggtagaattaatatattgttacatattagtggtgaacataaattatctaaatgtggtcataatagttgttaaaattttaaaagcattgatttttaacactttcttttaagtttaatgtagaattattttttctaaatttaaaattttacccaaattgttattacacagttttttttcttttatatttgtagaatatgtttcgacagcaacaaaagattcttcaacaatctagaattgttcagagccagagattgaaaacaattaaacagttatatgagcagttcataaaggtttgttgtatgtggtaacacaatacatcgttataaaacataatatatttatggaagtagaagataattctttctaagtttatgggaaaaaacattttagactttaactacttttccattttgaattcattgtttctgatttaagtgataaatatatttttacttgaggattcaaatggttttgttgggattattcaagacaggaaatggtaaattgggaattttacttagaaatatacttatcatgcataaaatccatactttaataacacttcagtcatagttctctgtttaagtgaaaatagactctataataatcatttttaggttgtattttacttgtttttttatccccagtgtttgttaaatagaaagtacccaaattattgaattctcttgttttcaaatgtattatagaagtattttatggcacatttgcttttagaattattacagtgaccaaaaatgaatttatatccaacataaaataacagatataa

SEQ ID NO: 71038 - DNA, 1031 bp, Homo sapiens
tatctgttattttatgttggatataaattcatttttggtcactgtaataattctaaaagcaaatgtgccataaaatacttctataatacatttgaaaacaagagaattcaataatttgggtactttctatttaacaaacactggggataaaaaaacaagtaaaatacaacctaaaaatgattattatagagtctattttcacttaaacagagaactatgactgaagtgttattaaagtatggattttatgcatgataagtatatttctaagtaaaattcccaatttaccatttcctgtcttgaataatcccaacaaaaccatttgaatcctcaagtaaaaatatatttatcacttaaatcagaaacaatgaattcaaaatggaaaagtagttaaagtctaaaatgttttttcccataaacttagaaagaattatcttctacttccataaatatattatgttttataacgatgtattgtgttaccacatacaacaaacctttatgaactgctcatataactgtttaattgttttcaatctctggctctgaacaattctagattgttgaagaatcttttgttgctgtcgaaacatattctacaaatataaaagaaaaaaaactgtgtaataacaatttgggtaaaattttaaatttagaaaaaataattctacattaaacttaaaagaaagtgttaaaaatcaatgcttttaaaattttaacaactattatgaccacatttagataatttatgttcaccactaatatgtaacaatatattaattctaccagttgctgaatgggaaattttaacaataatcaagtcatgtcttaattcttggtgatttcaatgtccacacagatgatccttccaataataatggttttccgtttcgtgacctgtttctcaatgattttggcctctaccctactttagccattgacttacatactcccaccctagattttgtcattactaataattctaaccactacacagtattagtaatggtaaactttctaagagatagata

SEQ ID NO: 71039 - DNA, 1005 bp, Homo sapiens
gcctcccgggttcaagcgattctcctgcctcagtctgccaagtagttgtgactacaggtgtgcgccaccacgcccagctaatttttgtatttttagtagagacaggctttcaccacgttggtcaggatggtctcgatcttttgaccttgtgatctgcctgcctcagactcccaaagtgctgggattacaggtgtgagccaccgcgtctggcctacatttagcctttattaacagtgttttctcatggggaaatttaaagtctgtccttgacacattgttttgtttattagctcttttttattgttcctaagttaaaaaattatctccagttaggaaaatcagaatttgggtgctagtagctgagagttttctcagaaaaaaaaagtaagcaaacaattctgcattttgaaattatgcctatttctaaatttaagtttaaatgtctttccaatattgttgaaccaaccttacccatatttacttgaatatgtgggaacaaaatacttttttcaacattaaattttaatgaatttttattttcaatctagttgacattaacaaggctcttcttgccaagagaaagagactagaaatgtataccaaggcttctctcaaaactagtaaccagaaaattgaacatgtttggaaaacacaacaagatcaaaggtaaggtggttgctttttttttagagccacatttcttagtatttactggtataaattacttatgaaaaatactattctaggatcggcacggtggctcatgccagtaatcccagcactttgggaggccaaggcaggcagatcacttgaggtcaggagttagagaccagcctggccaacatggtgaaactccatctctactaaaaatacaaaaattaaccaggcgtgctcgcttgaacctaggaggcagaggttacagtgagccaaggtcgtgacactgcactctagcctgggcaacagagtgagactctgtcaaaaaaaacaagaaaagaaaaatactat

SEQ ID NO: 71040 - DNA, 3331 bp, Homo sapiens
caaaccgtggtgtcttatgtttgggcaaagccctgcctcctcctacagatgaaggaataagccatcatatcaacccagagacagtgtcttatggctaaatagagccagtttccttcaatagaaagacttgacaaatggacatcttgaaaataaatatgctttggtaatagctgtgtaaaaatctgtagttgtaggtcttagaaaaatgaagcatgggccgaaataattttaatcctcttgggtctctttgtgggcacatatctaggcatactgtccctacaaagctaaacaaaactaatatttgtttttgttttggaagaggaatgatggagatttgtttgttgtctttttaatgtataagattgtggaaatgattaaggtcatatggctcttagaaagtttgatgcacttatattctttcatcaacgtgagaattaaaatgtattttctgtctttcatcatttagttaattgcacttaagcggaagatatttcccagaaggaggatacacaaagaagctagtcccaatcgaatcagagtatagaagatcttcatttgaaaaccatctacctcagcatttactgagcattttaaaactcagcttcacagagatgtctttgtgatgtgatgcttagcagtttggcccgaagaaggaaaatatccagtaccatgctgttttgtggcatgaatatagcccactgaccaggaattatttaaccaacccactgaaaacttgtgtgttgagcagctctgaactgattttacttttaaagaatttgctcatggacctgtcatcctttttataaaaaggctcactgacaagagacagctgttaatttcccacagcaatcattgcagactaactttattaggagaagcctatgccagctgggagtgattgctaagaggctccagtctttgcattccaaagccttttgctaaagttttgcactttttttttttcatttcccatttttaagtagttactaagttaactagttattcttgcttctgagtataacgaattgggatgtctaaacctatttttatagatgttatttaaataatgcagcaatatcacctcttattgacaatacctaaattatgagttttattaatatttaagactgtaaatggtcttaaaccactaactactgaagagctcaatgattgacatctgaaatgctttgtaattattgacttcagcccctaagaatgctatgatttcacgtgcaggtctaatttcaaagggctagagttagtactacttaccagatgtaattatgttttggaaatgtacatattcaaacagaagtgcctcattttagaaatgagtagtgctgatggcactggcacattacagtggtgtcttgtttaatactcattggtatattccagtagctatctctctcagttggtttttgatagaacagaggccagcaaactttctttgtaaaaggctggttagtaaattattgcaggccacctgtgtctttgtcatacattcttcttgctgttgtttagtttgttttttttcaaacaaccctctaaaaatgtaaaaaccatgtttagcttgcagctgtacaaaaactgcccaccagccagatgtgaccctcaggccatcatttgccaatcactgagaattagtttttgttgttgttgttgttgttgtttttgagacagagtctctctctgttgcccaggctggagtgcagtggcgcaatctcagctcactgcaacctccgcctcccgggttcaagcagttctgtctcagccttctgagtagctgggactacaggtgcatgccaccacaccctgctaatttttgtatttttagtagagacgggggttccaccatattggtcaggcttatcttgaactcctgacctcaggtgatccacctgcctctgcctcccaaagtgctgagattacaggcataagccagtgcacccagccgagaattagtatttttatgtatggttaaaccttggcgtctagccatattttatgtcataatacaatggatttgtgaagagcagattccatgagtaactctgacaggtattttagatcatgatctcaacaatattcttccaaaatggcatacatcttttgtacaaagaacttgaaatgtaaatactgtgtttgtgctgtaagagttgtgtatttcaaaaactgaaatctcataaaaagttaaatttttgtctgacactttgatttttaaatctttgaggattgagtttactgttactcagattcagcagtcacttgagtgcctttactgtgtatcaggttctgtgctgaacattactaaaattaagtggaaagtaaggaaagattagtattatacagaagaatgttgctttatggggggaaaatagtttctaaatggaatttatcatatggtaaaatttaggatatctgggtatcattataaaagctgagatttattctagaaaagttagagaaatgaacatttgtctgtaatgacgatttctgtggttagatgaatatagtccatacctaattaggagcttgataatgggatggataatacaatcataggctattcatagactcattctaatgattctgtgattcagtagaatcattagaacagaggaacctcagaagttgatgagcagtcagatggtcagaaccatttgttcaaatcctatagaaaaggtcactctgtgttttagtttttttgtgctgctgtaacaaaatacctcagactgggtaatttacaaagaacagaaattcattttcttacagttctggaggccgagagtccaagatcaaggggctagcaggtttagttgtctggtgagggctgctttctgcttttaagatggcttcttgaatgccgtgtcctcacagagcagaagggcaagaaggcacaaactgcctctgtcaagccctttaataaagacatctaattgaattgatgagggctctgttcccatgacttatcaccctctgaaagccccacctcataatacttttaaattgccagttaagtttcaacatgaattttggacagataaaaattctgtgatacaaaagaaggaaggctgcttctcctgcctgattctcaaggtgttccctccagctcccaggcccttcgggcagagtttcaaaacaactgtctggacgaacccttgctttttatcggcaaggacaccaaggccacggggatgacatgacttgctcaaggtcttacaaccagttagaggaagaggtagggtgggaacccgggttgtccctctttcctgtccccaccagcccatgctgcctccccaggactgtggcacatgtgggtgaagagcac

SEQ ID NO: 71041 - DNA, 1050 bp, Homo sapiens
ttgcttttgataatgcatatttctgtgtcttatgtgatggcaagtcatcagtcagcatgtcagcaacgcctcagttttctaaacacttaaaagcagggacttcatcttgttcatctctccatatacgcaggaagtatttatcaagaaactgagtgaataaataagtatgagtgaataaaaatgaatgaaagagtggttttgtttaagtgccagaagtaattttcttttgaagtcctctctcctgcctggataacttcactaattcaagtataatatttactatgacataataaaaaatctgaactcgtgttggaaatgtatattgtgtgagcattttagaattgcaagacaatgtttttgtgtttcccaacattgtttttatagaactagtatataaataatgcttaactaatggtagtgaaaccatatacagaagtacatagttgctttcttctctctgcacaggagggcttatcgagacaaattgaagttttggacccattgtgtactagcaacattgattatgtttactatattctcattttttgctgagcaggtaagttttatatattttatgtgggtattaaatggtatttcttggtatactagcatctgaatgttttagaaaatgatacacatttacaatcaaaattttaacttctcttattgtcttatagctcatatgtgaatatgttaaatatgtttcacaatattcaggcagcaaatataacagtcttttattcatttctcttctaaatccattaccagtattctttttatctggaactcaacagattaacttgtagatatcaggctaaaaccaagtagctctaagtatttataaccaaaaaaccatctagaatccttatctaatgttaattttctatgggtctccaattttcttcctctctttcacgcttccttgagtgagcacagtgtcttcagacatcccacggttccgttgtgttgtcccactcacaccagtagctcccatttatctttctttcaatcgctaggagttctccctcctctctcctccttcctcctctc

SEQ ID NO: 71042 - DNA, 1545 bp, Homo sapiens
agtccttgcgcttaaaactcaaggacttgcacatttgatatcacctgcagaaatagcttgatattgaaagtactatcaaatgtatatgtacataaattttctaaatgttgcattgaattagctttgacatctcacagtcagtgaccagtccttgaagaataccctccatatgtgactgttgttatgtagatctccatcgtacagctgttgttctcaaaccaacattggtgatacttgcactgaaatccagttgagtcctgctaagtccagtttagatccttaaagtgacccgttaacatgtatttcatttgctcctaatgaagagttcgtgactagttattaccacattatataaaatgtcttgtaacaaagtacacttgtgcactaaacataatgctgagttacatgtagaattctcttttcaggaagaagagtcattgaagacacaattggcatacttcactgatagcaaaaatactgggaggcaactaaaagatacatttgcagattccctcagatatgtaaataaaattctaaatagcaagtttggattcacatcgcggaaagtccctgctcacatgcctcacatgattgaccggattgttatgcaagaactgcaagatatgtaagtcttgctcgtgtttgagttgtttgcttgtgttcagaactaaggctacttgaaatgtgcatatttaccatgctaaatttatagctctaatatttgatgactaatatgttaaaggtattatctaagtgagaaagaaaaaagtccatctctgcaaatgttagatacggtacatactttgaatatccagagtttgtaatatgttatatttggacaggttccctgaagaatttgacaagacgtcatttcacaaagtgcgccattctgaggatatgcagtttgccttctcttatttttattatctcatgagtgcagtgcagccactgaatatatctcaagtctttgatgaagttgatacagatcaatctggtgtcttgtctgacagagaaatccgaacactggctaccagaattcacgaactgccgttaagtttgcaggtgttgtattgtcttattctaaactttttgatgttttaaatgagaatttaattctggtcaggcgcagtggctcacacctgtaatcccagcactttgggatgctgaggcagctgagctcaggagttcgagaccaacctgggcaacacggtgaaaccccgtctctactaaaaatacaaaaaattagccggatgtggtggcatgcgcctgtcattccagctacttgggaggctgagacaggagaaacgcttcaccctgggaggtggaggttgcagtgagccaagattgcgccactgcactccagcctgggcaacagagtgagactctgtctcaaaaaaaaaaaaaaaagaaaagaaaattttaattctgaccatgtctctttttcccctacgtattttaatttattgcaagtaaaaataattcttaatatttactgtgggtattcatagctagtctgttttagtgctagaattataaccaaatttg

SEQ ID NO: 71043 - DNA, 1004 bp, Homo sapiens
aaaccagactcactatattattccaaaaggtgaatgcctgccttatttcagctttgcagaagtagccaaaagaggagttgaaggtgcctatagtgacaatccaataattcgacatgcttctattgccaacaagtggaaaaccatccacctcataatgcacagtggaatgaatgccaccacaatacattttaatctcacgtttcaaaatacaaacgatgaagagttcaaaatgcagataacagtggaggtggacacaagggagggaccaaaactgaattctacagcccagaagggttacgaaaatttagttagtcccataacacttcttccagaggcggaaatcctttttgaggatattcccaaagaaaaacgcttcccgaagtttaagagacatgatgttaactcaacaaggagagcccaggaagaggtgaaaattcccctggtaaatatttcactccttccaaaagacgcccagttgagtctcaataccttggatttgcaactggaacatggagacatcactttgaaaggatacaatttgtccaagtcagccttgctgagatcatttctgatgaactcacagcatgctaaaataaaaaatcaagctataataacagatgaaacaaatgacagtttggtggctccacaggaaaaacaggttcataaaagcatcttgccaaacagcttaggagtgtctgaaagattgcagaggttgacttttcctgcagtgagtgtaaaagtgaatggtcatgaccagggtcagaatccacccctggacttggagaccacagcaagatttagagtggaaactcacacccaaaaaaccataggcggaaatgtgacaaaagaaaagcccccatctctgattgttccactggaaagccagatgacaaaagaaaagaaaatcacagggaaagaaaaagagaacagtagaatggaggaaaatgctgaaaatcacataggcgttactgaagtgttacttggaagaaagctgcagcattaca

SEQ ID NO: 71044 - DNA, 1022 bp, Homo sapiens
tgtcaagtgactcccttttacgtttattttcttcttaaggtatatgagatcttctactaaagaatgaggtgaaccttttctgactaaaacttacacatcaaccttgaaaacatcaatatgaaataaggaactgtctttttcgttttttgttttttgagacggagtttcactcttgttgcccaggctggagtgcagtggtgtaatcttggctcagtgcaacctccgcctcccgggttcaagcaattctcctgcctcagcctcccaagtagttgggattacaggcgcccaccaccacgcccagctaatttttgtgtttttagcagagatggggttttaccatgttggccaggctggtctcaaactcctgacctcaggtgatccagcctcctctgcctcccaaagtgttgagattacaggcgtcagccaccacacccagtccagaactgtctttcaaaattgtaattacagcaagaatccctcttcttcctccgatctacaggaaacagtggagggagtcgctatattgcaggaggtggaggtactgggagtattggagttggacagccctggcagtttggtggaggaataaacagtgtctcttactgtaatcagggatgtgcgaattcctggctcgctgataagttctgtgaccaagcatgcaatgtcttgtcctgtgggtttgatgctggcgactgtgggcaaggtatgtttactgccaaacaaataagaatgggagcataaaacatccttgacaggtagagagagttttgaatggcttttgttatttaaaataatgattctctgtgtatccctttaccagccttgcattcaaactagttatgaaagtaagagaacaacataaatcactgaagaggatcttttcctgttattgttgcagtctggtgttttgttttgttttgttttgtttggaccaagcagatttaccttagctgaaaatatgtggtgaagttttaatttggaaacaaaaaaggatatcaataattcattaaataaagatggtt

SEQ ID NO: 71045 - DNA, 1058 bp, Homo sapiens
ttgagacaagattatgcacaaatacactaatgagctactgatagttacagaaaagcagtgactgtgcatacttcccaccagctttgacatgctttggtacttgcagtcaagtctggcatggtgctactttatttcatagtagattatcaaagcatgttatgagagactaatccatgagttgaatccttgtctgctttccttgagtaatggaaaaaaagtaaatacgctcagtaagaacggtcaacgcagcaggatctaaacaatgactgtaggtacaggcaaacttaaagcacttgtgagtgtgaacgctgagccctttgaaaattttaatctttctagagacttaatttctttttataaagggaatcttaactcaagaataaaatgtatcagaagccagaagtcattttattttctctttggttttatcgtaggtttatttgacatggcctgtgccaaactgtgccgagggctgcccaggttcctggattaaggatggctattgtgacaaggcttgtaataattcagcctgcgattgggatggtggggattgctctggtaaggatgtgttaaactgtaattcgttcatttttatggaatattttcttcttaatcattattgaacatgtgctatagacttaaccaaacattctttatgtattaataaagaatcagtaatgctgggcatggtggctcatgcttataatccagtgctttgcaaagctgagctgggaggagtgcttgaggccaggagttcaagaccagcttgggcaacatagtaagaccccatctctatcaaaaaaaattagccaagtgtggtggtgcaaacctgtagtcctagctacttgggaggctaaggcaagaggatcatttgagcctaggagttagaggctgctgtgagctgtgattgcaccattgtactctaacctgggcggcagagtgacagcctctctcaaaacaaacaaatcagtaatcaatggactctttggaggtggtaattagtgccctcatgtggcccagtttattcattgttgagggcattgaacaagagaaaatac

SEQ ID NO: 71046 - DNA, 1956 bp, Homo sapiens
atttgggaaatgcatctggtctgtgtaggtctttttgttgtgttttgatattgtcttaccatttcaagattaaagatcaggccagttgcagtggctcacgcctgtaatcccagcactttgggaggccaaggcaggtggatcacctgaggtcaggagttggagaccagcgtggccaacatggtgaaaccctgtctctactaaaagtacaaaagtttgccgggcgtgatgatgcagtcctgtagtcccagctactcaggaggctgaggcaggagaatcgcttgaacccgggaggcggaggttgaggtgagcagagatcgtgccactgcgctccagcctggcgacagagcgagactgtgtctcaaaaaaaaaaaaaaaaggaaagattaaagagcagagtgggaatttaaaggtgcttcatccttgagattcagtcttttcatgtgtaatcctcttgttatttgatagttgcagttgtattcagaggccagtgtagcgcttctaaaactgaataaccccaaggattttcaagaattgaataagcaaactaagaagaacatgaccattgatggaaaagaactgaccataagtcctgcatatttattatgggatctgagcgccatcagccaggtaagggatgcacagaagcttttacagcccaaatcaaaggttaagatgttaaaaatgtgtaagttactatattagaagagggaaggggacttacagagaggtgagttgattggaatttttctaatttttcagtcactgccattggtttggtattaactgaagtcacctagaatcagatccaagaaccttcttcataaagtgtgttatagaaatgctgtctctttgaattttgggtttaaaaatatatatactgaatcttttgcattttttgtaatgtttaaaattaggactccatctttaaaagtctgccagagcaccttgagagcagacgggcagaaggaaaggacaaagaggaggaggtatgacttaaggggtatttcacatcttcatatgccaagtgtttttctcagtctaagcaggatgaagacatctctgccagtcgttttgaagataacgaagaactgaggtactcattgcgatctatcgagaggcatgcaccatgggttcggaatattttcattgtcaccaacgggcagattccatcctggctgaaccttgacaatcctcgagtgacaatagtaacacaccaggtacaggactttctaaaaattacaagactgtgatttctaattctgctcttttagtgtggtacagggatttccataatttcattccctttacccttctacctccatttcttcctttctctagctcttcattgccttcccttccttcctttcaaaaactaaaccaaacccaaacagctctcattcactctctttttttgtttgttgttgttaaaaggatgtttttcgaaatttgagccacttgcctacctttagttcacctgctattgaaagtcacattcatcgcatcgaagggctgtcccagaagtttatttacctaaatgatgatgtcatgtttgggaaggatgtctggccagatgatttttacagtcactccaaaggccagaaggtgagtgcctaagaggaggggggttgtctagcgtggaagtcacttagcaaatcagaaaatgagtgcacatactactgtagtcaaatatcaggccagacatggtggctcacacctgtaatcccagtactttgggaggcggaggtgggtggatcacttgaccacctaggggtttgagaccagcttgggaagcatagtgagacccctgtctttacaaaaagtaaaataattatctgggcccggtggaatactcatgtagtcccagctgcttgggtgttggggggccgtggggggagtagggggtcactggccaagatgggaagattgctttagcctgaatgttgaggctgcagtgag

SEQ ID NO: 71047 - DNA, 1007 bp, Homo sapiens
cagtcccgagtcatggttgacaattcagcaaactatttttgggtggcatgtgtggtataagcaggtcgaggtggagtggggtagcaatttgaattgaacaaggaaaaccagcaggctccaggtgtggtgagactcctttccacagttcagtctcccagtcagagatttatttggattttcagagttgtctttgtggaggccaacacctctcagagcatcaagctaatcacacataatgttctttgaaggttgttttcataattccaacacctgtgatcaacttcagggactaggacttaagatttttagagactagagagaaaatgagaaagaggaagaacagacgcagtgtcagcatttgagtccaggcctcgagtgacttgctttccttaggctttgcttcctgattacattatgagtactctgagaatgaagtttcctatcactgcgttcccaaccaaacaaaacaccttttgtgtgtatgatgagctccaaataagagtttatacagagtgccatgagaacatctgggctttaggtgtacttggggtcaaggcaggctttgcataatagaagcattttagctgggccctaaacagagcagccattctcccagcagagaagggagcagaagagaccattctatgtagagggaacagcctgagcaagagggctggaggcctgaacataaatggtgttttcagggaaccaaggcaatggtttctagcacaggcagggattttggtgaggatgagattgtaaagacaggttgaggccaggttgagaaacgtctctgttaagaatactagattttttcctgtaggccgtggaaggacacagtctgatctgcttctaaggaacatactagggaaaggtgtggtaggaaaaccagttcagctgctgctgccatagcccagtaagacgttcccatgcaaaagttgcttggcagtgggatgccaacgatggaaatggttccagaagcatctgagagaaacactcaacatcac

SEQ ID NO: 71048 - DNA, 1063 bp, Homo sapiens
gcttgtttcctggatagagaaggactcatttgtttaacagatgagctcctacaatgtctcccatccaagtagtaaccaggcccaaccctgcttagcttccgagatcagacaagatcgggtgcgttcagggtggtatggccgtagacgagctcctacaatgtcttaggtgacattacagctgctggggatgcagcagtggacaaaacagacaaaggcccggatggaacttagggtgtgaacaatggaagcatgggaggaggagatgaggggaagtcataaatgtcatcaatgcacacagcctgttgtttacccaaagctttcactcataaaggtagtgtgcttcagatacatggaacatctgctaatgagaaccattcattagtaactaattgagggacaaatgtatttaaaatttatacttattagctcttcaggcttgaccattgatgccacttgttaaggtggactctggaggctggcctgggacgtgccttttccttaacatgtattgttttcagatcctttatctgattgacttaggacatagtccatgtgggtgttctctctatttgaccttacgtcaagatgcctgctattctgtcagaggtgtttcaggttgtaaatcgtgaatgtcccatctcttagagtagagagcataaagtccttgtctcagaatttgtgaggctctagttttcctgattttataaagaaatgttctttgagttctgccactgggtttagcttacctgattcttacttcctcctgttgtatgtcatttaacaattttgagggtgaaaggatgaagatggagtagtggtgggggagctgtgattagaggtgactagagagcagtttttacttagttcctgtcttaaccatgtttttatatgcaccccccaaccaaattccttttaacttgtttctccctaccccagaccaagtgttttactgttttatgatacattgtattatccttgtaatacaatggtaatgtgaataaccacttatgaattttttacttttttcatatttttcttcatagctttttttttttggagagag

SEQ ID NO: 71049 - DNA, 1519 bp, Homo sapiens
cttcctaatctgtccaataatgggctttattggaattatgaataatctttaaaaaatgatagtaatgaagtgcttaatttcatgtgcattttggaattagtaaatattggtggggatcttattaatgggagtttgaaagctctatctttggagttgggtttaacaattttatatcatacttgctaacttaatttttgtatccatgagataaaagtcttcatttgttaaaatattatcattttttatgggctataaaaaaatctgaaaaatttagtagtatgacaagcttctcattgctgattaaatttcaagaatgtaattgtaagcatgttggtgtttctttccagtgagaagcagttagagtgtttgctaacacactgcattaaggtgccaatgcttgtcctggacccagccctgccagccaacatcaccctgaaggacctgccatctctttatccttcttttcattctgccagtgacattttcaatgttgcaaaaccaaaaaacccttctaccaatgtctcagttgttgtttttgacagtactaaggatggtaagatctttttatggatattttaaaatcatgttatcattggatgtttgaataacaaaattctgagtggaatagaaatgattcattcttaaatgtctgataaacttttctaaaaatgcacaaagagaagcaaaacagctgctattgtattttggccttaacctcaaaaagggattgctgcatatattttactctgtgtaatacacatacctttctgtgctgtgatgaggactttcaatctgatatcacaattaccttgttctcttggctctgaattattctagaggcaatttttctactatataactcctctactaggtagcgttctgcagtttgggcagaacatacctggagtattgattctttacattctgaaatatatgaactgaatgtgtttcctccaaaatttgtatgttgaaatcataacacccagcatgatggtattgggaggtggagcctttgatgggattagtacccttataaaagagatcccaggctgggcatagtggctcatgcctgtaatcctagcaattttgggagactaagaaggattgcttgagcctaaggagttcaagaccagcctgggcaacatagtgggaacctgtctctaccaaaaaacaacaacagcaaccaaaaaaacacacagctggacatggtggtatgtgcctgtagtcctagctacttgggaggctaaggcaggaggatcacttgagcccaggaattcaaggctgagcagtactccagcctggacagtagaacgaggccttgcctcaaaataataaataatagcaaaagagactccagagagctccctctgctctccaccatgtgacgttatgagaagatgccatctgcaacctagaagagtaccctcaccaaaacccaagcgtgctggcactctgatctcagactttggccaccagaactgtgaaaaacagatttctgttatttataagacaacagatg

SEQ ID NO: 71050 - DNA, 1097 bp, Homo sapiens
attgggttgatcttaactgacatcctttcaaatttatttcaagtaaaggtaaattttttgctctgatgtagcgtttatagttcccttttatttctcaaatgtgattgatctgatataacttgaacattttcatgctctgagagtcattcctgctctggtaactttctctaaaaatctgagacctgttgttagactgtacagtggaagatgctgtcgtcagaatatacagtggaaaatgctgtcagagatacaaataattatagctcatgcctttggctattgtttagttgagatgaggccaagatgtatgtatgaggactgaataacaacacaggggaataagcaattgaatgcctgagttagtacacaacaattgcttagaaagtcagaagacagaagaatgttgtgggttgaaacatcctcgaggcagttctgacaccttttcaaggaggcatgagctttagggaggcttcatggacaagtaggagtttaaacagaagagagacaaggaaagattattttaggaagtggtgggagtaattttagcataaagttggtaatgtcagagaagtttgtgatcgctttttctttttgaattactagtggtttaacattgcagctagaattagttaacagcactaggttgcaagtgacagactcccaactcagacctagcttattaactagtttattattaaccagtttgttaactgggataattgaaaaatataggatgaggccaggtgtggtggctcatgtgtgtaatcccagcactttgggaggccaaggcgagttcgaaagcagcctggccaacatggtgaaaccctgtctctacaaaaaatacaaaaattaactgggcgtggtggtgcatgcctgtagtcccagctacttggtaggctgaggcaggagaatcgcttgaaccctggaggcagatgttgcagtgagccaagattgtgccactgcactccagcttgggcgacagagtgaggctctgtctcaaacaaaacaaaacaaaaaggttaaccaaaaaaaaaaaaaaaaaaaagaaaatatatatatatatatatatatatatatggtgaaatttctggcaggag

SEQ ID NO: 71051 - DNA, 1385 bp, Homo sapiens
cctggctaattttttgtatttttagtagagatggggtttcactatgttggccagactggtctcgaactcctgacctcatgattcgcttgctttggtctcccatgggattacaggcgtgagccaccacgaccagcctaagctgtgctcttgagcacccctttttatggtttctcaaacagcccaggctgttccttgtctgatcttgggaaggatatttaacctctctgagcttccttatctttgaaatggaggccagattaccttccttgcagggttgatgaggattaaataagatgggtatgtaaagcacctcacacagttcctactacataacagaccctcattaaatggtcatggctactgctgctattatattatcaactcttttatgtccttaaaccttattttgaaatatatccttgaatcagaatactttgatcatatagttaatattaccaacttgttaataatctcactaattgtaatggattgtaagctcactaattgtaagtccttttggactaagaagatcattgttttttttgttttgttttgagatagagtctcactcttgcccacgctggagtgcagtggggtgatctcagctcactgcaacctccaccttccaggttcaagtaattttccctgccccaccctccggagtagctgggattataggcacccgccatcacgctagactaagtttttgtatttttagtagagacagggtttcaccatgttggccaggctggtctcaaactctggaccttaggtgatccgcctgccttggcctcccaaaatgctgggattataggtgcgagccactgtgcctggccctcagaagatcattgttaactgtaaatttgttatcgtctcctcctctcaatataacaggtatttgatgctgtattttgataagccttttctatattcatccaaacttcgagaagtagaattgagggaaggaagtatcaaacaaaacaagctgggtgaggtggctcatgcctgtaatcccaggactttgggagactaaggctggaggattgcttgaagtcaggagttggacaagcctgggaaacaaaggagaccctgtctctacaaaaaaaaataaaaataaaggctgggcgtggtggctcacacctgtaatcccagcactttggcaggccgaggcaggagaattgcttgagctcaggagtttgagaccagcctgggcaacatggcgaaaccctatctctgcaaaaaaagtagagtagtcccagttgcttgggagactggggtgggaggatcacttgagccctggtggttgaggctgcatgagccgtgattgcaccactgcacttaagcctgggtgacagagtgaaaccttgtctcaaaaataaatacat

SEQ ID NO: 71052 - DNA, 1033 bp, Homo sapiens
agtggatcccagctcagctccgcccctcccagcccagccctcagggcccgctgcgcaagcgcaggtggggagggcgcgcaccttccctatgcccctccgtcctccaggtggcgctggagaccccgccgccgccgcagccgcctctcgcccggccagacccgggcggcgccggccgcctcgccggccgcaggtccgcctccgccgcgccgagggcgtgggctcccggctcccggaagcggcggccgcggcgcggagccgagcgggcgtccgtcgccggagctgcaatgagcggcgcccggaggctgtgacctgcgcgcggcggcccgaccggggcccctgaatggcggctcgctgaggcggcggcggcggcggcggcggctcaggctcctcggggcgtggcgtggcggtgaaggggtgatgctgttcaagctcctgcagagacagacctatacctgcctgtcccacaggtatgggctctacgtgtgcttcttgggcgtcgttgtcaccatcgtctccgccttccagttcggagaggtgagtagcggcgccgcagcctggaccgggcgcctcgaccctgcactgccctcgccgtgccccgcgatgccccgatacagtatgtattttttcattattagagacggggttttgccatgttgcccaggctggtctcgaactcctgagctcaggcgatcgccctgtctcggcgtccccgagtgctgggattacaggcgtgagccaccgctcccggccaaatacagtattctttatcataaacgtgtgcagagactatgagcaagtcagaactggaaaaaggcatgtatgtgattttagatattgctccctcgcccaccgttttttaaaaatagagacggaggtctccctatgttgcccaggttggtctggaagtcctgggctcaagtgatcctcccttcttggctttctaaagtgctggggttacaggcatgagctaccgcacctggcccaagaaagccacttttagcaacggggaggaaagctgtatttttaagtggtt

SEQ ID NO: 71053 - DNA, 1078 bp, Homo sapiens
acttgagtttgattttgaaaataagctgatgttcattttttaaaaatcattcataagaagacataactgtggaactataaagttatttacatggaaaataatttaaaggacagaaccaaacaaaatgttagtacagtgtttagttggagttcctgtttaaggagagcccaaagataaagatatttaagtgttttggggcccacctgagcaattcaagtcttgaatagctgctagctcactaatcagataactcctaatctagacataactgacaaataatttgccaaatacaccaagatatgaagcagaagcactgcgtggttaaccagacagatcccagcaaaagagatgaccacatttctaataactgtggctgtcatttattatcagcactatatcaagtgctggacagtcatcattttatttaatacatacaaaacccctaatgagcagatgagaaacaaaggcttaaaaatagtggaaataaattacctcaaatcaacaaatctttaaacaagaaagcaggatttaagcccaagattgtttaatggcaaagcctttgctattgaccactccatattattttattgtttctcaaaggatggtagttgaattggcaacatcagcaacaactgagaatctatcccaaagtctcaaattctacccaggtctactgaatcagaatctctggctatgagacctacaagtttgttttaaccacctctccaggagattctaaagctcactaaagtgtgagaagtacacctctactctatttctccaagcttaagaaaatatatataatatttcactttgccagtgaagattcttacaaaacccagaaaatgcatatcacatccatttccttgtttaggctatgtgatcaattgtcactataattcctacaaacagaatatataaaatgagctccaaggaaaatgacacgatagcattattaaccacctaaaatatgaacaagggctacaatgattggaattctttcaagacctgactacacatattgatttgggattaaaacagtatcacttagctcactctctaagctttaacagataaa

SEQ ID NO: 71054 - DNA, 1037 bp, Homo sapiens
atttaggaactgcccgttcttccaaaatgttcactgtctaccaagtactatcagactgtccatatacatagttaaactgctcccaacttttttaaagcaccgcagaccttccatgtggtaggcacgcctcaggttgtaactcttccctttgaattggatagtcattatttaacttttgaattttttttttgcttgcttacacttcagaaacagtgaataatgctttgcttttttaaagagaccacttctatttaaaagcaaacttacttcctaaatgcaaagagccttgcaaaatgtagttaaatactttacaggatgtctcagacccttgcttaagtttattttcattggtggagactccttggggctatttcacattctgttcaatgctaacacgtaccaaatttgtagaatcatgggagattgttggtatgaagcaggaaggtttgcaaaattaagacaaattaagctgaatgtcagtgttatgaccaaacatgacaatttccactagtccacaggaaagtaataataattggaagccctgcagttgaatccaggaatgccctttctgaagttgcttgctgtttaccaatgtgaaagcaaaatgatccttcaagtactgtttcttgagaatttgctattgttatgtgatcttctaatagagatattggctccaagctctttgcaagagtattttgcaataacctcttctttaaaaaggttgactcgatgtgaacatgtcagactacaacttgcctgacatgaaagttattattatgagaccttttcccctccttgacttttttgctttttaatgtccccaaataataaaccatctcaaatttcttgtttaaataatttttataatatgcaaactgtactgaacaccatggctatcaaaacgagcctgcagttgcactgatctccatggaaacattaaaatgcagataaacaatcctagacaatagataagaatgcattaacctgtttattacagtttgaatttcttcctagtacacatattggcaagttcccta

SEQ ID NO: 71055 - DNA, 1176 bp, Homo sapiens
ccactacactgattaaatgacttactggcacaaaactattgaggcttaactagttgactgttttaataacatcattaaaatttcattttggtttattagagcacatccatgcaaagttggaatctaaccattctcatgtctccttataatgcctaggggatctttgaaacagtatttttgccaactcatactttctattttcattctgtaaagataaaacatgtaagtgaaaacgtttaacaaacattaagaaccttcttcgaccaggcactctccttcgctacaaaatttccacattacctatttttttattagccatttttgaactctcttccatttctaagtttctccctgcagctttcctgaacatgaagcatttccttttcttttcatttctagctttcctttctctgtacctcatgtacacttggaagcttcagggacttagcactggtcatgccagcctctacagatcacatctctgtctataattgggtctccatggtaatgagaagcagaaagtgctgaagtagcgcactatgtaaggactggcaagagaaaatactgtcgcggcctctacaggcatagcattgaatccccatggtgcccaagaagcccgagagaagcacgctgtggtgtagagcaggagactgaggacacggacttggcagatttattagcagcaatattctaagatgaaccaaatttaagagtttgtaagtgctcttttcaattggaaaagacctttgaaatttttttttcttttcttttaggaggccagatgctccagtgcctgatggcgaaagtgagaaaactgtagaagaaagttcagatagcgaatcttcttttagtgattaagcttaattttgataagaattacatatgcatgcataggggtacatttacattctgtaagagattgagcctgaactctcttagtcataaaaacatcaaatggccacatgtccactaccaagcttcttctatgttaaaaaaataataataaagcagttttaacctgccagtatgtcttgttgctaaaataaagggcctcaaaatgaaaaataggataacctaaataaagtacaattagtgctacaaatactaagatagaatattttagagatgcaatgagcaattacagtcaggcacggtggctcacgcctgtaatcccag

SEQ ID NO: 71056 - DNA, 1049 bp, Homo sapiens
agtagctggcacagtaggccactactggctaatttctctatttttttgcaaaggatggtgttttgccctgttgcccaggctggtcttgaactgctgggctcaagcaaaacgccctcttcggcctcccaaagtgctgggattacaggcatgaatcgacatccctggcctacccttttctaaagtagcatttattttaggaagttatgtacattgttgtatttgtttgagttgtcataggtactaatacaattttgatgtggtattaaaataattcccactggtaatgttttcctacttaacaaagtatagacagtaagaaatcaaatatatagcaaagagaaatttactgggtaaaatgtgcctagtattcatacccactaattctagagttgttgcttctaatgaaaagggaggaagatgatggtcccatgttagtattttaggcagatggagcatcagtcaaatcctggaactgctgtacccagctttaaagtttcactgtattgactacataatgcttccttgtagatataatctaaaattgttcagcagagcaaatgggtttatatttgacaactagggagcaatgccagcattattttctcttttgtagtatgccaaatatatttaaaaatataagccataattttaatacctaaagtaactgttagactgtgcattttcttattttagtaatagtaatttctgtttgtggtgaatatgagttttatttttaagtgtcctaaatgtttaataagagtcaagcctgagggagaaatcagtctggtagtttgtaattattaagatacagcagttataggccaggcacgggctcgcatctataatcccagcactttgggaggccagagcgggtggatcacagggtcaggagatcaagaccatcctggccaacatggtgaaatcccgtctctactgaaaatacaaaaattagctgggcgtggtggcacacacctctactcgggaggctgaggcaagaggatggcttgaacctgggagacagaggttgcagtgagccgagatcacaccat

SEQ ID NO: 71057 - DNA, 1047 bp, Homo sapiens
ccctataagcatcagcatatgctggatatccaagccttttacctgctactggcttcatttcatcccctgtccagcctaaacctacttcataatcctttacttcagccagctacctgcactagcaacttgataatcatccttgattctgtcttcttccttacccactacagtgtcaatcactatgatgttctcatttttaatatctctcacatctcaccatatgcctccatatccattgccgtttagttcacgccctcatcgtttgtaatctgaattactatagtagctactgattggttttcctgttctctttcaagccatccactaaagcctgagtggatctcttcatacttcattcttgcttcacatcttcctgtgactctccactgccttcaacgtgtagtctaacatcttagtattgcatagaaatggttttatcatcaagattcagattctctcactagcttcctctcttgtgattctttcacatatgcctatttcatatagccatagcaaactacttgcagttccctgaatgtaacattttcctattcccttttggtgtcgttaaatgttttcctttctctctgtggaactcccttccctcatcttactggcctggctaacctattattctttaagactccatcaggtatcaccacctgatagagtccataggtaactaccacggaggaagatcccaggcccttcaacatttccttgtgtctcacttggccagtttgagggtatttcgttgtctatgaatgttgagaaacattcagttgtgaggtagtgccaagtttaagggtagaattccagtaacaattaacattgtcttacagaaaagctgctcctcaaccacagcctagagcctgaattctgccccattacctcatatgcacatgccattggtcaccaggggcactggttggagtgggggtgactcaatgtaacctatcaccactactagcaacccagtttcaactgcatttagctagatgtgataagtgcagtcaactaccgtgttaacagaggaattatgatgct

SEQ ID NO: 71058 - DNA, 2389 bp, Homo sapiens
tgtttacctaaaagccttatgtgaatgaattctagaagtcaagggtaaacttagctttgataccatgaaaactagatcctaatactttatttgtagattatgtctttgtcgatatcaagatgctaaactaaaaataagtgatctgtaaagaagcactatctgctttgtggccactttcagttttttgccccctctaattgtgggcaaagtgaccatttcacaggatggtaaagttctacttaatagtcaggatcttaataatatcccagaatacaatcaggatgctgtgtatctgccagcttgtaaactgggcaactgctcttggattatgtgactgaatataatgtttaagattaggaggtttcaagtaaatgttctttacttgaatggtcatattttatgatgctacctttctttgtataggtgtatatttacacagaggtacattgacaatttaattatacagagtaacaagcatgataagctcttctatctggtttatcttgcattttgatagtagattttaatactctagttttttctcttctctttccaaaatgaattactcatcttccaattccattcccctttatttttcaaactacagatgtttaaatctgggacgaattgtatatgctgatgcatttaagtaatttataaaggcagaccttgttgcagcgtgtctttgaataatttttattcttttattttctatgaaaaaatttcttcattcatcaacaaataattattaagctcctattaagtgtcagggtactattctgggcactaaaggtacagtagtaaacaaaaggctctgtcctggtttgtttatattctggtctcaacaattgtttactgctctgataatgagtttgcagaaaatgtcaactttgttataagtgaatataattttataaaataactgagaagcgactgggtgcggtggctcacgcctgtaatcacagcactttgggaggccaagcaggcagatcacgaggtcaagagatcaagaccatcctgaccaacatggtgaaacactatctctactaaaaatgcaaaaattagctgggcgtggtggcacgtgcctgtagtcccagcactcgggaggctgaggcaggagaatcacttgaacccagggggcaggggttgcagggagccgagatcgcaccactgcgctccagcctggcgacagagcaagactccgtcccaaaaaaaaaagaaactgagaagcattataatacacgtaatagaagagttctcattcctactcatgtaaataagacagtactgtattagaatatgacaaatatttaatggtttttaatattttcatatctgcccttagttattgttaacagtttattttaattaaagtctttatgtctctaatttttcttttacagaaactggcagacctttcacttcgtatccaacaaattgaaacaactctcaatattttagatgcaaaggttggtatttctcaataatttgtagtataaactttgctgtgcatataccagctttcttaatcatacttaattttcattgcatttgggagtgattccatttaacttctgtatctgtgaagtgatactggttgtgtttttaattttactgcagttgcaaagaaaatggtgttcattatgaaccattaattcaaatgtacacatggtttgcgatttctttcattgtgctaggcaaacgcataatgcgagtaacatgttaacaagctgagctgttatctagttcacttcatttgatagaaaattccagatttattttactagttattatttgataatacaatactaatataaatctttagatgtctcagagcaaattttagagacaatatcagctgtttctatttgcagataccttaaatgctaatgaggaataccagttttgatgtcagaaattgcaaataataactaagaaaaatagaagactgttttagattgcaagcttaaagattttgataacagtgatgtctttggtttcatttttaatatttttttacatgtgttttttctgtttataaagttatggagacactagtgtattttcatgactaactttcctgaagttaatattttctttgtccatttaccaaaataaaactaagaaatattctgtaaatatttatgaggaagaaaaaaatgatatccctttttaatatgaccagaatgtctagtttgtactttctacgtctctttatggacttcagcaactgtgtttctcttagaacatttctctagtttggaaacccggtcttgaacatgttcaagatagtcctctagcagccatacccacttgaaactatttgggccatagccactgtgctaactatggttatcagtcaacagttctcaatgagtattgctgcttg

SEQ ID NO: 71059 - DNA, 1027 bp, Homo sapiens
ttttagcaatttggatattcatgtcagctggagactgctcaatgagataacaactaatatttattgtgtacttcctctgtgctgggcatcatactaagtgctttatgtgtatttaattatcgcagtcagtcctttgagagaggtttagttatcccactcatacagatacagaaactaagatgtagagaagtttaaatcatttgcttagtcattcattcattcaacatatctttgcatgcccccagtagttgtagctgcattagctgcacatacacagatagaaagtagcagaactggattcccactgattttttaactggaaaagtcaatatctcattgctttcttacattgcactgctttatctgattaagaagcatgcttatgtcaacttcaagtgagagagtgcagtacaagtaccttcttatagctatattaaaatctatttttagactcattcacttctttgctatgctatgtctgtttgatgtaatatatttttatgtcaattccaaagatacatgtattcaaatgtaaggtgccattttctcccaaggtaaagtcactttggtgttttgaaatgtttttgttaatagtgcctaataggcctctagtccttatttatttaaagcctcaaacaagaaccaactgactgtttctctcaacaaaagaggaacctcaactgttagtttttgaactgagagtgaactgggaggaaaaagaaaacttttcccaccccccgacaggatctggtttgaaccaaacccaaccttaaacaacttcagtcacagataaaccctcaagccagaattaagtttgaaacaaattgctagggttctttcttcatcagtggcactgtttctagagttcttcattaaagagaagagtataaaactgcattctgtgaagaactcaactttgcaaaaactttctgcatattaggctacttttgtaactcttccagtgattggcaccagagtagaagagagattagatgacagagaaagtagtagaatcagacccacatta

SEQ ID NO: 71060 - DNA, 1070 bp, Homo sapiens
agtccactgagtttccctaaaacaataattttggattcgttgtgaagaagggtcagttactggtgatttgtttctttagtagtgacgtgtttctctgattattcttggtctttgtggccatgtgttggtatgtgtgtgtttgaagaagtaaggacttactccagtctttgcagactggctttgtctgggaaagcccttcaccagtaagctcatccagaggttctagacaggccatctgttgtggtgcatggcaggcttgctgctggagtccttgggtaggctggcctggtgcctaggttcgtagggttgttcctggagcctgatccactggggtggacctgctgattagctctataggggtgggcctggatccttagggttccaacttgaagcctaagtctgcaggggttggtctggcactggggtgagccttgagcctgagtctgcagtgtctggccaggttccaaggtgggcctggtgcttggaacccctggggtggacctggagccagagtatgtgggggtgggcctgggtcctggttgtactgtgactagcctggagcctgagtctgcaggagtggtcctgcagcctccgtccatgggggccaatctggcaatgcaatctactggggtggtcccagactctgggtctgctggaacatacctagaccctgactcaccacagggatttgtctggggccagcttggtgctggggcaagtgtgcagcctggggtcacaggggccagactggagcctgagattataggtgctggcctggtaacttgggctacatggggctggcctgggtcctacggcaatagtggctagcctggaacttgagtccacagggatggtcctggagcctgtgtttatgggtgtcagcccaacagaagggcctactgggatgggcctaaaccctacttccactagggtatgggctgcaggagccagactggggccacaggagctgacttggcactggtcaggcctggaacctatatctgcaggagctgacctggtgctggggtgggcctgaaccttgggcccatggaggctagccctgtgctggg

SEQ ID NO: 71061 - DNA, 1070 bp, Homo sapiens
ccccaaatttgtaatttgttgactgaagacatttacgtttgttatctgcttaaattgcaagaaaaggtggttcatttgtttttgttttttgtgtggtttttttttgatgtttacattaccagtgacaacaggtttttttggccagtattcatataagaagctttttattctgttgcttttatattttcttctttatttaaatacattaattttgcttgtttggttggtgtagactgcaaaaatggagtctggactgtaccagttattcatagatggattgtatcccatgtttcagctgcgtatcaataatgtgtatttcacctgtaagggagcatatttttaaattttgtttatgctacaaagataaatcatcaatgcatttcatatttttgaaagtcatttttatttattaattttggggacttactgtgcttctttaattcttcacatattttatagcccatcctcatgggttctgtagccgttggatctggactgtcctggcatcgaactctccctctgtgtgtaattggaggagaccacaagctgttgttttgggtgactgaagtataaagtgttttctgtaccttagattcacaaactttgtatttttagtacatattttgaagaatttctatagtacatattttgaagaatttttatatcaaatataccgtatactttagaaaatgtctcagttgcttttattaaataaaatgttgatggtttgaaaaattatttttctactctgttctctgtgtgtgtatatatatatatttttaatcttacaaaatcatattgactcagcagctcacctccagagaagagatgactaaggaaaaataatgcttttgagtttatcaaaaaaggagtatttgaagtgtatcctgttttctatactttgagtatatgctgtttttctaattctcagggacacatttatcaaaagagaaaaaaaggccaggtacaatggctcacacttgtaatcccaacactttgggaggctgaagggagtggatcacttgaggtgaggagttcaagaccaacctggccaacatggtgaaacccta

SEQ ID NO: 71062 - DNA, 1050 bp, Homo sapiens
tctaaggttttttatattctctagagatttttacatagcctcttcctttacatttgatcttccatttgtaatataggttgaggatccttatctgacattcttggaactagaagggtttcagattttggaattttttgcattttgtaatatttgcatatacatgagataccttgggaatgggacccaagtctaaacatgaaattcatttatgtttcatgtataccttatacacatgacctgatgataattttatataactttttttaataattttgtgcatgaaacaaagtttgtgttaagtgcttatatgtggaatttttcacttgtggtatcatgttagcactcaaaaagttttagtttttggagcattgcagattttcagatgaggaatgctgaacctgtatattgcaaatgtttacattttaccgtacaacagtgaatctctgcttacacttcaggtatagttagtgagataagtgattgagtttctttttatttttctgtcttacagctaatggttgcagagaagaatggaacaatccggttttatgatcttttggcccaacaggctattttatctcttgaatcagaacaagtgccattaatgtcagcacactggtgcttaaaaaacaccttcaaagttggagccgttgcaggaaatgattggttaatttgggatattactcggtccaggtactttcttgatatgtttgtctattacacaccaaaaaaaggcagtaactgttgctaaatgatccactcatccatcctgttatacctgagactatgctgtcaagcgaaagcaagtctttcctatagaaggccagagctatggatttttatataacataaacttgctatgcagatttactctgggagtaacccagaaaggacagtgcaaaagaggaaatcttggatctgtgcaatgttgacttatattggaaaataagaaaaacactgaccctgttgcatgatggttccctgcagtggttctaagtcatgtctttattgtatttcatctgttttaactgattgcttgtttaggattta

SEQ ID NO: 71063 - DNA, 1032 bp, Homo sapiens
taaagcatggggttgctagtcattcagccttatattctacaccattttctttatgatccctcatcatgtctaccatatgcagatgcactcacatgcatatacatgtatatataaaaatatatgcacacatatatacacaggttgataaaaatactgatgctttatgtgtgtgtttgtatatgcatatgcacagaaaaatataaatacgttcatagttatgacctagtgtcattgaaagaaggctaaaattattacagtatttgagaggtaaagaagtgcatattcatttagaaaaaattattatctcctcctccaaaagaaggtaaaagtgtcatttaagtatttagtgggttaagcttattattttttaaaactcactaatacagaacatctcattcccagtcattgccaaataacagatgttcttgtatattagaaacagtaccattctgtaagaacaagtcagatcaacaagtatttattaaacacatttagtatacccaatattcagtactttgggggatacaaaagaaatacaagacctagtacgcactgtaactacaaaggatatcagtagtaaatcccatccctcctcctcatccctcaataatcttttaaaatattagataaaagtttatggtgaaagaaaactgacttctagaaaccagggaatttttagtttaataaaatataggtgtgcatataatgtgccattcactttctctataaaacatgaaatatttgtagttgtcatgttctaactgggatcattttttaaaagaatgagagaagggtggcatataaaaaataaagaataagatattagaatgtaaccaaatcactgtataaaggaatactaaattacctaagctattcactaagccagtaatatagttgtttaaaaaatgttgcaagaggaaaaatgatttttatcaaatttgttctgtgtaccacatgcaagctatgtgtttttcatattacctttgtttatgtacatttgaaagtctttaagatccataattaagatggagt

SEQ ID NO: 71064 - DNA, 1380 bp, Homo sapiens
gtattttccatgtagtgagaatgtacagtgtatttttttaatattgtcagtagataatccggttctggtaattcatttacctagaatatcttgattctttagagcattccattttctttgttttctttttttataacgtagacacaggtctcactgtgttgcccagtctggtctcagactccagagctcaagcaatccttccacctcagccccgcaaagtgttgggattatagacgtgagccaacacgcctgaccaagcagtccattttcattgaacttattatgaaatgcctcctaagataaagtagaacatgtttaccatttgtttctagttgccttagagagttattttgtgaggcttagacaactttggatttttttttaattcaatgaactagttaaatcttaatatgtaatttgcttttgaacttttcaaaagcataagcataacctcctgataaattcattataatgaaatacagaatattatattgtttgttctcattacttattaaaacatttactgtgtatgcttaggaagaagaagcagacgttgaaggcattcagtataaaacacttcgaacatttcaccatggagtcagggttgatggcatagcttggagcccagagactagacttgattcattgcctccagtaatcaagtaagtttaacagtaccaaatgcattccttactaatgtactttgattgtgttacatgattggaagtctgatcatagatacttttttctcaatttccattttccacaatccaagatattagatattttgatatttgctactacttaataatttaggcttatcatctgaatttgtgatttaaatatacagccatgactatgatgccttgaccatgtgtttgagccaaactacaaaaccttttacgtgagattcatctgaatcaaggtctttacagattgttcactgaatttacaactttattgaaagtataacttaaaataactaaatttggttgagacattaatgagctttccttccccacccataggccaagatcacatttttttgtccaacagtatataaatctgtaagttctggtcctggacttcagtttttgtgaaagtgtttaaaaggaatgatggttttctgagaaaaaaatcctagcaatgcctgctgaagccctctttacaggggcaagaatatgttaggttatttaagatctgttacaaaacactagccttgccttctacaaatgtcaaatctaaaagatgtgtcttcttttagtagacagtacttaggaactaaaagttatcaactattaagctaacttcgttttttttaaattaagggataatttagatactctgaaattctcagctcttaagggtatagtttgatca

SEQ ID NO: 71065 - DNA, 1588 bp, Homo sapiens
tatttacatataaagcagtgcaataagaaaactgctataaaaacctttgttaaagggcagaggagcatgaacatatatgcttgcctaaatcaatgttctcatccaagttctactagaggcctcaattcactaatgaagaccccttgaatagacttagaaatctggtatgtattttacactttttaaagtgtacacatatcaaatagaactagccacatttcacgtgcttcataaggtcctgtgtggctagtggccaccatatcagacagcacagttctctctgcatcttcctctgtaaatcgacagtaatctttaatataataataatactctgtagttctcagcagtatattatgattcagagaagataatgtattttaatacaaatttcagggtagtatctaaatgtttaaaactgtgaaagaggtattagactcaatggtaaatggattttatgttatttgtcatctctatttgaatggacagagttgttgcttataatgctttcaggctgaggctgaatctgctgcttagtgtgtcttcacctagaggagatcagctatggccagatatttgtcatcattaagttagactgatttggtgtggttccagagatggaacgtggaataatgagtagaatttacatggaaacagattttggcttaacgttaagaactcttctaataattagagctatcccccaattgaataaacttcccaaagaaatagctagttccctgtcactggaagtgttcagagaggggttgtgtaaactctttttttcagatgctctcctagggattcaagcattggggggaaagaattgaactagagaaacttcacagtcttgactaactgaaatttgtatttggccttaaatgggtgtggtgggagggcctgccagtttcaaacccttataatagcccttccatcaacctggctttgccccaacctcaaatatgccgaaaccttgtataatcatttgtattatagcaagttttccaaagtatcttaatttcctgcctatacaattctgcttataccccaaactaaatccaaaatagcatttgtctctgcctataccacacacacacacgggccttttagttggctcagtggcaaacagtgctgccaggaaaacaggtttcactggtaaaacaaaaagcccaggctgtacagtccctgagatttctttatccccatgaccacccagtaattccatatgtgatttgggtaacaaattaaaggacttgattgtcaacaatattgttacagtagcaagatgatgtgtatttacatgcaaaaacttcatttttaggagactgatttgtcaagtttggaaaaatagatgtaatccaaactgtgaagtcagctatgattaggctcctaaacttattttaaaattgtttagtggctgctgtcttggcatatctggctgttagctatacaactattatacacacaaattacgaagtagtaaaatttgacagtgtttttctttccttgataagtgtatttctttcatttgtggaaaaactttttgctgttaactcttaagttcacctgaaatttgaagttattttcaaag

SEQ ID NO: 71066 - DNA, 1009 bp, Homo sapiens
tgtgctctaatccacagtttcgtgaccttgtccagtagaaggctatttaattttcacaactgcttgaattttgacatacaagatgaagcaagatgcctcaagaaatgctgcctacactgtggattgtgaagattatgtgcatgtggtagaatttaatccctttgagaatggggattcaggaaacctaattgcatatggtggcaataattatgtggtcattggcacgtgtacgtttcaggttagtctacaaaactgcaccgaatgacagtgaacatatttcactactaagagaacttacacaaaccaaatctaaactttgaaagtatattgagtttgaatgttaaaaaaaaaaaagataagatccatagagaaagatgttcccagttatatgtgcctgagatttatgtaaacattatatagatagtgaaaaagaatggtatgaggcttcacttttgcctcatgatcattaatggaatattctgataagtgaaggctatgattaactgaacattggtatgtacaggaaaaaaacaatataaatgagatccaattaattacggtttttctacatcctgctttgacatacaaaaccagctaatgttgagagcccaaaaaacaatcttccaggagattttatagcttttataatattcagctttcctattagtatgctgtcatactttttgtgcatctaatgtatgcagaatatggagtcatattaattgagcaggcagttaagcatagccattaagagcatgaattctagaactggaatgcctacatgtttactcctgctttacttacttcttactagctatgagaccttgaataagatatttagcatctcctgtaaacatgaggaaactaatgcttgaattttagtatatgtaaatatactaaataaaaattccaagagggcatctgacaacattgtaatccatatgtatgttttagttgtcattgatacgagcagtggtaacactctcaggtttaatcaccaaagtaagat

SEQ ID NO: 71067 - DNA, 1119 bp, Homo sapiens
cgcgtctgccctacctgccctgtcgcatttttaagtggtgattcaggctgtggcttttgagggtgttttgcactgtaatacctcggtcgtagcaaagtgccgtgggaccgaagtattatggtgcagtgacttgacgctcgagcctggttgggcctgggggctgtaggcggagttcacagtatctagcgatggagctggtaggtcctgagggttcgtctgcagcttggaagacaggcccgtagaggcctgcttaacttccattagttaggcaggaaacctgggttctagtcccactatgtacacggactccaattcctcaactttctcctactcctgattagttacagcctcccaaggaacctttgggacttgcactcgaacactgataatgatgttgagtgcaatttttaaattgagcacctactaaatgcctggcactaggtgggttatgtacttgtttcactaacgtctcattctgtgaggtaggaattcccttcctggttttgcaggtgaagaaacttatgctcattagagattttaaataccgaaggactacaggtcataaagggggagcctggaagtgatatctgactcggaagtgtagttctttcaaccatttcacactgcctgcccagtgacaattttctgtctcacagtttttgctctagagcaacttggaatccaattttttaaaaacaagtgttatcgctgctgcctttggctactgtttttttgtatagtgcagcctgccattcagagtgcttgcatatttattgtctcattgacttctcacaagggactggaaggcaagtatttctgtgtgatgatgcctccacctaggaaccacgtgtaaggcttatggcataggctcccacagccagctagctacaggaagagctgggactagaccaggggttggcaaactggctgtgctgcctgtttttgtgcagccagctcctgagctaagaaggagtgttacgtgtttatatggttgggggaaaaaatgaaaagaataatgttttgtgatgtgtaaaaattacatgaaattcaaatttcagtgtccataaaaaaagttttattggagcacagctatactcatttgtttgtttatgtatgtcc

SEQ ID NO: 71068 - DNA, 1021 bp, Homo sapiens
tctccaccaagttagctcctaaatattagttattttattggttatgtagtacggtgtaacaaaccatttcaaaagttaaggttttaaaataaccatttccttctgattctgtggatcagcagtttgggtgggacactgcttggtgatactctagtggtcatacaggacacaattcctcctgttgtaataggtggtgacaacacatgtgaaatgtctaccagggaagcttattagagacttaatgcccagggtttttattgggggctaaatgcaaaggcatccactgtctgacatgtaccaaaattccagactcgcaagtgtttagcataaactatattgtttgtatgaacagtttagcacagtgaaccactcttactggaaacactcctgaaatctaagctcccaaactggactccagcttcaaaggagagcattcaggcctattgtattagtacttctgcacacaccacttaaggcctaagctcagaactcccacagcgtcattcttgccacattctattggttaaatcaagtcacaagcctggtccagattcaaaagggtagaaaaataggccacctcttttgggacaacgtaggatgggaggaaattggctttttaggtttttttttttttttcccaatttatcagacttattacctatctcaaaacaaatatatatatttaaatacagctttaattaggtatatttgtaattataagtttgcagtaaatttgcatgtctgtttttgtgtgaattttcagaattgaaggctacattttgttctttcagaaggtttggcttaagaaaccaaaggggagggaaatatgattgcgcagaaattgtattattttgttttcctaaatttaattaaaagcaatcttggtaaatatgaaatgacctctcattcactatatgtttttctctatctgtgcttgcctatacatgttaaatgttaatttcaggttaacataagatactttaactttgtattctgtcctactttaagataatggctgtgt

SEQ ID NO: 71069 - DNA, 1025 bp, Homo sapiens
aggagtagttagaatttaatttttgctgaattagggctggcagcttttggaaggcatcattattaatttctagaatattaatggagcagaatggaatcaataaaaaaaaccttcaacttgttcactgagagaatttattatgcagatgttgaagaagactttaaagaaagcattatagttagataaaatattagcatgcaaacatgttggtaacattagtggatctctaagcaactatatgtcactgtagccaggttataatctgttttatttctcgtgggatagatagaaattctgtcaaaaaagagaaagaaaaagaataattttgcctgattactaacatctgacaacttatagaaagaaacctgtgtctttttagcacttgtttgttacagtttcatgtgtccatgagctgagaagaatcaaaattaatctctggctcaaggttttacacttgatcttagccaaaaggccgagaagcaatggctcaaggttttagcactgatgttttgctttcctagtaatagtaatgaaacataattttattgcttcaaagagaataaaatacctaggaacccaacttacaaaggatgtgaaggacctcttcaaggagaactacaaaccactgctcaatgaaataaaagaggatacaaagaaatggaagaacattccatgctcatgggtaggaagaatcaatatggtgaaaatggccatactgcccaaggtaatttatagattcaatgccatccccatcaagccaccaatggctttcttcacagaattggaaaaaaattactttaaagttcatatggaaccaaaaaagaacccgcatcaccaagtcaatcctaagccaaaagaacaaagctggaggcatcacgctacctgacttcaaactatactacaaggctacagtaaccaaaacagcatggtactggtaccaaaacagagatatagatcaatggaacagaacagagccctcggaaataatgccacatatctacaactatctgatctttgacaaacct

SEQ ID NO: 71070 - DNA, 1049 bp, Homo sapiens
ggaattcactatggcaatgagaattttaaatacgagattaaaaatagattcgccaaaagaacgaaaaggaactaaaaagaatcaaaattttcccccatcaatagtacttaagtatagtttactgcccacccatccatccattttgggtagaagaaatttgacgaatttcaagaaatgtaacagcggctatgtatttaccagttttatcatgtgcaaacttgccttagttgttcatattttataaaatcatgaaaacctttttcttttatatctggtttccaaaattgtctcatagttcaacttgggtgttctcttcaaacccacaaaaattgaatgtagactttaccaaaatttaatttgtatttcttatctcagttataagttattgaatattctggtacccaactttattttttttttttttggcattatctttttcagcacagtggagaatttacagtctctctcagtgatgttttattgacatggaaatacttgctccatgagaaattgaacttaccagttgaaaacatggacgtgactgaccattatgaggacgttaggaagatttatgatgatttcttgaagaacagtaatatgttagatctgattgatgtttatcaaaaatgtagggctttgacttctaattgtgaaaattataacacagtatctcctgtaagtattttttaaacaattctattttaatcaaattaaaatttagctctatttattttgaattatagtatcaccagttatagtaacttggtaatgtttttgctttgtgaatcatgttaaaaatgggaaaatttagctacctgaaagctacttattacttgaaagaaagattttgtggtaaattttcttggacttgtgttattgttatttagttgctatacggatagcttcttattagatcaaaaatccctaacaaagaaattagtcccaaatgcctgatttctttttgaatcatgtcaaagattgcttttgtattcactttcttgatttaatgtgcatctgttcatttggcatatgttggataaatgattggt

SEQ ID NO: 71071 - DNA, 1053 bp, Homo sapiens
cttacagagatgatttttgtctatttttcacatagttgatttagagaggcttaatcatatatcagtactggattgtaggacaacaaagatcttaaaaaccagtgacagtataatctacctgaggtctttgggcgcattgttttccttctattcctcgcccttgtctaagtcctctaataagtttcctcatttgagtgggttaagttatagtatgatatatatcagggtacaagtttgaggttgtctctgtgggatactctctccaaatgtcatcgtgtcatcaggagtaaaattgaagctgctaagatggtagtacatgaagtagaaaatgttctgcattttaaccgtggaagatcaacaacttaatctctgatactattgtttgttctagggaaatttccagtgcggggaaaaagtagacaggaaaatatatccctagattgatttctcaaaaatgcactaagtataatcccaatttttgctgaaagtctctttcaaggtacatattagaatattccaaacagttttgaatgtcatgatcctgaattttcataatcctgataaagtttctttgtttcatatttgttgtagctgaaataaggtagggattatgaggaattaagataaagctaagtcagggcaattttgggaatgtggtcacttaaacagtgccccttccctcttcactccctacttacgattcctctcctaaggaaaatggattcagggcccatgggcatctcggagcatacaaggccttagattgtaactggagactaagtagagagatttgatacagggcttgctttctcatgaactgagcaagtatctggaagacaggatcagagacctggggtgaggagcagaaatggttaatcctgagaagagcttagcctcagagatctgtggacgtctttgggggaaggtcagcaaatgacctctgtaggtacgctcatattccctgaccctcaagccaagaagtagctgaatagatgggctcacttcttgttggtgaggcttgggagaacacaagactcttccttagcctcagca

SEQ ID NO: 71072 - DNA, 1030 bp, Homo sapiens
accagctccatgctaagagggactctcccttctgccgctccagagtcaatgaggctgacactggtggatcttccccaggagccaagagatctggcctagacagcagcaagcttcctctttctgaaggtggctgtatagttgacccctgccaggtagatcagaaggtcctaaaaagtgtgcaggcatcagggacccacccaaaggaccccattcactgatgttgatgcatctcccagcagccgcaggctccaactaaggaccatttctgcagaggtgctacattttatgagctttctcaagggtggccttctcatcacaaagaagttaaagccaaaaacctatgccttcagctgcattcttccgtgggtagttgcagcaccctctgccatccccccatcccagagagcccagcatcatgaagcacccgcggcacccccacccagacccaggcccacgcaggtgcactgccttcttttttgccagatccatagttttatgttgaggtgctattcttgaattttcccaagtacctaacatttatacgtattcaagttgctgtcattccccccagtagctctgttctgttacgcacgtgtgttgcagctaactcatccttctctggctgctggaaacccttaaatggtgtgttgttttcttcattagctttttgggactcagatctgactgctgaagtagcttaagtgatgacagttctacaagtaatagaagttgaaattgtatctatacttacagagcagcagtggacaaacaaacaggctaccagtcatctgctgaggctaaggaagagtcttgtgttctcccaagcctcaccaacaagaagtgagcccatctattcagctacttcttggcttgagggtcagggaatatgagcgtacctacagaggtcatttgctgaccttcccccaaagacgtccacagatctctgaggctaagctcttctcaggattaaccatttctgctcctcaccccaggtctctgatcctgtcttccagatacttgctcagttcat

SEQ ID NO: 71073 - DNA, 1070 bp, Homo sapiens
tgctctgtaagtatagatacaatttcaacttctattacttgtagaactgtcatcacttaagctacttcagcagtcagatctgagtcccaaaaagctaatgaagaaaacaacacaccatttaagggtttccagcagccagagaaggatgagttagctgcaacacacgtgcgtaacagaacagagctactggggggaatgacagcaacttgaatacgtataaatgttaggtacttgggaaaattcaagaatagcacctcaacataaaactatggatctggcaaaaaagaaggcagtgcacctgcgtgggcctgggtctgggtgggggtgccgcgggtgcttcatgatgctgggctctctgggatggggggatggcagagggtgctgcaactacccacggaagaatgcagctgaaggcataggtttttggctttaacttctttgtgatgagaaggccacccttgagaaagctcataaaatgtagcacctctgcagaaatggtccttagttggagcctgcggctgctgggagatgcatcaacatcagtgaatggggtcctttgggtgggtccctgatgcctgcacactttttaggaccttctgatctacctggcaggggtcaactatacagccaccttcagaaagaggaagcttgctgctgtctaggccagatctcttggctcctggggaagatccaccagtgtcagcctcattgactctggagcggcagaagggagagtccctcttagcatggagctggtccctaaacttcagattgcctgggattcccatcacggtccagaagaagagacgagacctgaagaagctggcagctgtcatgcggcaagtgagacaatgggaaagccacccgcttcagaacattgaagaagccacctggcaccaactcactgtccaagctgagaagaaggaaccagggacccaaggagcttcagtttaatataaaaccaggagcaaacctccgaagtccaggcatctcagagaaatgctttttttgtgtaccatggttaccaaatacagagctagattttatttttgtaaatatttgcatctcct

SEQ ID NO: 71074 - DNA, 1874 bp, Homo sapiens
gtagagaccaggttttactatgatggtcaggctggcttcgaactcctgacctcaagtgatctgcctgccttggtctcccaaagtgctgggattacaggcatgagacactgtgcccagccaacatattttagaaatatgatatgtaaatggtctagaatgcatttacttccaaaatcacctgttccagtaagttaacacatttggtgaatcaccttcatttttgacaaacattgctgaggtagattcttctatatgtcccatgttaaatagattgcacttaaaatatatattttatcagtgccctcaaatacttgtatgtctcttgtaatactcttgtatgtctcttgtaatactcttgtaatactctagatttaataaagtgttttatatgtgcatctgatattttttctgtcctatttgaaagtaagttgctgacatgtgggtccctggaattctttagcgtacatttcctaaaagtaatggcataaccgcaatataagaaataagaaaatttaaataagtattttaaaatatcatttactaacttccatatttaaatttctccatttgtccccaaaatggttttatatctccttagactcttttactccagaagaattcccctaatcttttttttttttaattttctgattaattccttgtggtattatttaacttgtttctctatttgctgtatttccaataaactggaagtgatatctgaaatcttgcttagattttggtttaatatttcctaagaaatacttcttaactgatgcagagtatttcattttatatcttattgggaaacaaactcaggttatcctgaattgccaggtctctccagtacaaagatgtagtttttcctttgctgtcagcaaagatctgtgaggtgacactttggcactgtataaataatcctgtttctcaataaccttttatctaatggttttaagcattgatgatcctgacttgaatcagttatttctgtagtatctatagaatagtgagcttctggccaggcacggtggctcacgcctgtaatcccagcactttgggaggctgaggcgagtggatcacaaggtcaggagatcgagaccatcctggctaacacggtgaaccctcgtctctactaaaaatacaaaaaagtagccaggtgtaatggtgggcgcctgtagtcccagctactctggaggctgaggcaggagaatggcgtgaacctgggaggcgggagcttgcagtgagccgagatggtgccactgcactccagcctgggagggagtgcgagactccatctcaaaaaaaaaaaaaaaaaaaaaaagaatagtgagcttctaattctgttatgtctttacattaattacttgccatttctcaataaagctttatcttatcaaatgagatgaagtacccttctctaaaaatctcagggtaactcctcaattctctaccaatttaggggttagtgtaatagttatatataatataagcaaattagatatttattcttttattgctctcctttttgtgtgtctattgtttggattcatgaatttatatttattcactgttttaaaatgagttacactcattaatctttgatgctaaaatagaggaagctgcttcaagcaggtttttgtgtcttttttacatgctctagtagacttttcaagcattttcctcttttctggtacaagaaaatatcccaagcccaccttgaatgtttcctgcccagacctggttccttttagagatttgtaactattttctcttgcttgaaattaatttttcacttacatttcctttcttttcccttgatgctccaaatcttgacaaagtgattgccaaattgcctgatcttttctcggtggcgc

SEQ ID NO: 71075 - DNA, 1183 bp, Homo sapiens
caacatagtgggaccttttctctacaaaaaataaaaacgttttgctgcttgtggtggcacatgcctgtaatcctagctaccggggaagctgaggcagaaggatcacttaagcctgggaggttgaggttacagtgtgccctgattgtgccactgcactccagcctaacagcaagaccctgtttctcaaaaaaagaaaaaaaaaaaaggaatttgattttgatgaaatgaaatttatctttttatttttccttttctcattgtgcttctggtgtcttatgtaagaactctttgccttattccaggtcatgaagattttctattatgttttcttttaaaagtttaatagtttatgttgtacatttatagacttatgatccactttgagtttacttttataaaaggtgtgaagtttaagttgaagttcatgtgttttgcatatggatgaccaattgctccaacaccaattattgaaaagactgtcttttcttcattgttccttttgcacatttgtgaaaaatcagattgctatatttgtgttggtctatttctgcacgctattctgttccattgagctgagtgttcttttgtaaatactactctatcttaattattgtaatcgtatagtaatttagattgtttctcagcatttttaatatactgttccaatatcatctggcctacatacttctggatgatttgttaaccttattattgttcctctgtaggtaatgtgtcattttgttctggctgcactcaagattttctcttacttttggctgtcagagtttatattcattttgtttggttttcctacttaaatagcttattggatctataagttaatgttttctactaaatttgggatgctttgggacaaaatgtattcatgtattttttctactcttttcacttctcttcagggattccaattacgtgtatgtttgacctcttaaattgtctcattaatccctttgattctttcatcttttttgttgttgttgttctcctttgtttttcagatttgataatatctattggtttgtctataagttcaacaatactttcttctactctctccaagttgctgttgaacccatcaagcaaattttgttttacttattgtacttttcatttccagaatttattttgtccacttttctgttgacattccctctgttaattt

SEQ ID NO: 71076 - DNA, 1044 bp, Homo sapiens
ttaagcttgttatttaatctgttgtttcctaatttatttgaccatagaactttcccctaaattatcgacatttcacaggatttgtctttcttagaatgtaccttggaacatttcatgtttgattggaacacttacgtacagctatcacatatgtatttttatcattgtaaggacaagccttttgaactatacatgatcccaggatgggaaagctggatgtaacttagtgattatctagtctgtatttttattttacaaatagagaggctgaggtttggaagtgttaaattgcccaaccaattcacctgtttaacacaacagatcagctgacgctaaaaattcccttgttccatgtaacaatttcaatagctagtagtcaactatattataatatattcataaatgagttctttagagtcaataatacattctaattaatatactttagctcttaatttgtcccctaactcagctcctcagcctcaatctgcagctgggtgtcattgccaccacacttgctagcatgaattctgcatggcatttgtttctttggttatttacttctgactcaaagtgtgtcatgagccataaaatgtgcttcacttttaactgtatacccagaattatatagatttacttagctttatgaagtaaattacagtttaataaatcactggacataacttatccgtttgttttaattcataggtggccacgtcttttattagaacaatagagcttggagggaaaggatatgcaccaccaccatcagatcctttaaggacacatgtaaagggattgtctaattttattaatttcattgacaaattagatgagattcttggagaaataccaaacccaaggtaatgacttttcatatattacaaatatgtttttaatctatctttaaaactttacagaattgggtagaaataagggatattgaaatgaccaagcatcagaccaaacggtgaggcgaagaaacaaaatctagatgaataaattataatcacatgaccttacctcctaaatttctgcctgtga

SEQ ID NO: 71077 - DNA, 1105 bp, Homo sapiens
cgggcggatcacgaggtcaggagatcgagaccatcctggctaacacggtgaaaccccgtctctactaaaaatacaaaaaattagccaggtgtggtggtggcgggcgcctgtagtcccagctactcgggaggctgaggcaggagaatggcgtgaacccgggaggcggagcttgcagtgagccgagatcgcgccactgctgtccagcctgggcaacagaacgagactccgcctcaaaaaaaaaaaaaaattcagaaatatttttcatatattttatgtggcacctttaattacatttaatttttaaaggtaaaatttacttcaacaaatagttatcaaattcttgagtatggtatggaaaagcagtcactttatttaggaaagtgaagaactcagtaattacattaaagtattaccaatcatttgtctgtattattgcttagtgttctcttccagttactttattttggtacaagcttggggattcagttgtgcttttcatcagcagcctcttgtttctctttctgccccagggcactggtgtgatgcagttaggagtcaggagctcagtttgcctctttctcatctaaattctcctattaatgtttatccagaatagccataatatatcttctgggaagcactcctgaatacctcctccttctctctacttccccactcaaacttgtctatactttcagtagttcattgtatcattatcacttgtgagctcttaaagagaaagattttattcatttttgtattgccggtgaacagcataaatatcctgatgtcattttagttaaaacttctggagtttctaggctttagaagcaagaatttgaattaaaccactgtgttgctgagcagatattagaagctaacctaatggtggctctagaagtgagtatatagtaatggagtaatcagagcactactgtttggggtattttgccatggcttcaaaatgttgaccttggcaagtctctgaaatacaagtcttattttttcctaaatacaattcagccagtgaattacatcatctttaaaatttaacatttttgtcatgtagaaggaatgagaaaaggaggtcaaaggtgactttcct

SEQ ID NO: 71078 - DNA, 1027 bp, Homo sapiens
tattaaccatttgaatcttttccaaaactcttttctattagagattaattcccaggaaaagcatataatgttaattacgttttcattttggctacatttcatccagttcacagctgaaaaagaaagtccacatatatgtgaaagaattcctagggtctactcagacttctgattacagaagtatggcagactaggcccccagattgattcttccattgaaaataattaataatgttggatagcatatttcaaaaattcttcttaaatgcgttggtaagtaggcaaatgtaatgaaaatataggtcaaaaataggtgaaggaggaaagccagcgaggcaagtgaagaagggaagccagcttttagcccaggaactggccagcatggggagataaataggaaacacatacccattctacagggctaagccctcagtgtaaaaataaactaagaataagggctttactttgacaaaagggtttctctaaaaacctagttaatggtaaaacgttttagtgttctgcttaagaataagacaagagttcctgctgtcatcagttcttttcaacatagcatgagatgtccaattcagtgtagtaagacaaaaagaaataggagatataacagttgaaaaaataaaattctatttgatgataatatgactaattatatagaaaactccaagaatgtaaaggcaaattattacaattggcagtacagtttaagagtgttgctggacacaaggccaataaacaaaatgcaattggatttctgtatcattactaaatagaaggatttttttttaaaaaaaacttcaaaaatataaaatacatagaataaatctagtaaaaaccatgctagcttattttcccttgaaaggttcaaactgaatgtgaaagtccctgcttgtcctcttccaccttgctgctatccctgagctttgtatcctgatcacagtgttactagagatgtttgtcctcaggatgatatcctgcttgcttactatgcacagctttcggcttaccatgc

SEQ ID NO: 71079 - DNA, 3266 bp, Homo sapiens
taaggttagtatgttaagcattgtttaaaaatactagtaagtcataattatgcagaattttcacaaagtttaatgcacagagaaagcatatcatttcagttactgatacatcttaacactactttcttttaaaacagacatttaacatacacaagttatagtagcagtatgggcttctcctcccattggcaattaaatgcttttattttcttctgaaaagatgatgtggaccaacaggtatcagacttgccaacaaggtcggtagactcttcccagcatacatctgagcactgaaggaagaagaaagtttaaattgtttaaaggactataattatcacacaaaatttattaagaaaaaaagaatggatctagtataactaattctgagtaaaccaaaatgataataattaattgttgctatttaatcccacatttttggcaggtgtaattgagccatggtcttatttgattttgttatgattgcatccaaattcactttaactcagagttctgtttaatggtggtaggatgtaagaattgaattttgaaaagactactcactgtcaaaatctctccttcctataggaaatttagctgagttttcttcatccccaatttctctcttttcttgtgttgattcagtattctgaactccattctcagctgggaaagctacagatccttttagtgcaagataaggttttatagccagattcagtggcagaccatgatttaagaaattatgtttggagcctgtgttctgtaaagagaaggttgatttggtttttagctatcgtattcggagtggaactataatacaattgtataatattcttgttgatcaattcaaagttactctgcactgtttttgactttttaaaaataccttagatgcaaatttataggagaaaaaacactttcagataagaggtgtttgctgggatggaagaactacctggcatgtaagaaatatcgtcagtcgtcctaatgcatattgtgactgtttgcatatacttctgtttataaaagtatcagttttacttttcagaggatttgtaagaatcatttaaattttcattgaaataaacgacaagtcacattgccacttacctttgaaactttattttcctcttcgttcatgaaactgctctcatcatttttatattgttccagggaaggagcaataactgatttttctgcagtgtcttccttctgaaagcctttccccaacctgaatgtattaaataccatgtcatcatctaaatttcttatggacttggatgctgaaagtaaaataccttgagaaaacaaagaaaaagttagtattaatatataggaagagagattcatttttgccattcttagtttgatgtttgcatacagtcaaacaagaaagaaaatgaaaaatttctctgtcagcctgcttggtaaacgattctgtatctttatatattttctagcttgaatagaaagcacttcaaagaattatacttttcatcattttagaaatgactcattagattgaggctaacctttatgcagctgctaatacctacattgttttggttttagtgacacattgtttattttgagtgtgaattttctcagaatctgactaagatccttggtagaatgctttctgttgagtagattatagtctcttgaaaatgggttgttattaaggaagaccacaggacatcaggctctctctatattattgtttccttttgtgtattttctgattaagtaaagatattaaaactcaagttatttcactcaaggatgataaggataaagttttatttccttttaatcctgattaaactgaaataatcctcaaaagagactttcttttataaatacttgatatagtttttggtgattaaagtacatatgcctgtcagtgtgaacaaaaagccattcatgctatatcaaaaattgacctgtcaggtgtattttatctctgcatttacaaaaggataatatgtacaaatatttattaatgaatttagaaattaatgaattagtccatgaaaagaatatttatgtgcccataaacattacttttggatgatgagtttatgttgtatgacttttaattaaacatttcagagttaatttctaattttgaccccaatgaataagataatacattcttttatatgtcttctggtacatatatgtaagaatttttctagagtatatttctcagtatggaattactggatcatggagtatgtatatgttcagctttactaatgccaaaatgttttccaacatagttgtaagcgatttgtgccctcgataagcagggtatgagaatttccattgttccatgtcctagctgactcttgtgtctcattgtccttttaatttgtattttcctaattaccaaagaggttaagtgtcttcccatatgtttctgagccatttatgtttcctcttatgttaaatgctttttttttttttcttttttggctttgtccatttttctattgggttgtctttttctaatttatttatgggagttctttatatattctggatattaattgttagttatatatgtttcaattattttcgctcagtttgtgacatattttcaacccctctggtgtcttttggtgaaccaaactgattaattttaatgtttaaatatttttcttttttctttatggcaactacttttaatgtgttgtttttttttagaaatccttctcaatccttagattattaacgtgttttcatatattttcttctaaaagtttaaatattttgactttcatgtttaggtttgtaattcatctgtaattttgtgtatgatataagatagagatgtaattttactttttccaatgtccttatatatttcttgaagaagtcatcctgtccccactaatctgcagtgccatctctacagtatatcagatttctatatatgtgtgggctcctttcagaacgttctattccacagccaaatctacagtattaatataactttaaaataatttttaatatctggtcaaatttcccagccctctacttacccacatgtttttcttttacagcagttccttagctattcttagtcatttcttttccatataaatcttaaaatcagcttttcaagttccgtaagaacacttgacaggatattaaggttctagttaggtatcccttatctgaaatgcttaggaccagaagtatttttggatttgggatatttttttcagaatttggaacatttgcattatatcagttaagta

SEQ ID NO: 71080 - DNA, 1387 bp, Homo sapiens
gttcatacacactggccaaagcctccagtaaatactgaaaatggagagaagagatatctttacagtgttactgattttacagataatgattttaatgcttcaccactgagcgtaatgtttgctgtaggtttcttatagatacttgctataaagtacaggatgttctcttttgtttctggcttactaatagtttttatcatgaattgttgttgaatattattgaatgctttttttgcatatattgagatgaccagatcattttctccttcagtctttggaaatattaacagatttttctaatgttaaactaaccatgtgttcatgaagaaacctttaaattatcggattcaatttggcaatatttgatttagtacattttacatttattatgagtaagattgatttgtaattttccttttttatattgactttggtttgatattaagtttgtaccaatttcttacattgagggcaagatttatccttctttcttttctctcttgttagactttgggtttggtgttttcttggtaggatttttgttgttaagaattgatgtactttcttcagtagctgtagtaacatttagcttctctgtttcttttttagtttgttttaggaatttacattattgtataatttgtccatttcacttaagtactttttatctgaggtagacttaactgctgattttctcggggactattaagatctttctcagtaaatgttttgtgattataattataaacaaaggactctgacatcccttgacttctttgatcttagagcttccttatctttttaatgttgttagttgtgccctactttgtttcccttggtttgaacctggtttggatgtgcctgtttaatctataaaagtccttgttaggctgggcacggtggctcacgcctgtaaccccagcaccatgggaggccgaggtgggtggatcacctgaggtcaggagtttgtgaccagcctggccaacatggtgaaaccccatctctactaaaaatataaaaattagctgggcatggtggtgggtgcctgtaattccagctactggagaggctgaggcaggagaattgcttgaacccaggagacggaggttgcagtgaaccaaacatggtgccattgcactccagcccaggcgacagagcgagactctgtctggaaaaaaaaaaaaaaaaaaaaaaaaaagtccttgttaatggaaatcttttttcttagatgctgttgtgggagggtaataaatattaataattatgtactttgttttaaatttccactggatgaattggcttggctgatcttcactcaaaattgggaccaaatccaaatgattttgacggtttagagaagttaatgttttattttgtttaaactgtc

SEQ ID NO: 71081 - DNA, 1977 bp, Homo sapiens
gagctgagaatgcaccactgcactctagcctgggcgacagagcaagattccatctcaattaaaaaaaaaaaaagttatgtgaacatgcttgaaatgatgttcatggctaaatttttcagttaccttgtaaagatgattcttggatattgttttgattctgagtacttttggagtcatctgatagtatgcttcgagaataacaatctgatgatagctttcaacattgggttaccaacaaagcttgttattttgtatacattgattcataatttcaggtttcttcaccattatggtaagtagtgtattgagtcttcattctaacacatgttaggaatttatgtttgtactcatggatgtctttaaccctcagacatttctacttatattgagaactctagactgaaaacattttgaaatgtagtggttttactatgtaggaggaacatgtgattcatttgttctgcttcattttcttctgtttgtgatagagattggatcagatgaaagtgtcttgataatgatatacatgccattcttttcattctatgtatttgtagtccttttttgccatcataactttgtttatgatattccctgctcttaaaataccctcatcttgtccctccacctatctatatctaaaatatccttcaagaccttccttttgcagctttctctgagtactacagccaaatcctcttgtctgaactccaacatgtgtaatacattatcatcctgtttaaatataattatttcttatatttattaatttatcaaggccctaaatatctgcataagcttgccttcatggtttcactttttcattgttctctatattcatgccatgtaactttggcatgccttcccactgtgggtggggtaacctgcccactgtttgactctggtttcaggcatgtgatttgctttaactaatgagatattatcagatatcatgcaagcagaggcttgaaatggtcttgcacattgggaattccctcttgagcctctgccaccaccatgaaaacattcccatgctagcctgctggagagagccacatggaggagagccatgctaccctaactgccatagctgaggctatcctcgatcagcacacatccattcaagcaccagacactggagaaagtccacttgaggtcagtagagctgcctagcagatgcccaactgacccaaaaagcataagacataaacatttattgttgtataccctctgaagttttgcatgtgttacaccatattactatagtaatagataattgatacaaatgtcctacatggcctggaccatgcattccttgctaaatttatttcttgctactctgtccctctttcgtcactctctagtgatattggccttctgtttttatgatatgccaagatcatttctgacgcaagactttttccctgctattctctttgtcaggagcatctttctcctgttatttatctgagcatttatcactcattattgtgatgctcagctcaaatatcatggtttctgagagtgcttccttgaccctatgagctaaaggagcccccttcccactcattctttccctattcctttcactcctttattttcttcactgtgcttctgtctaaaattatcttacttgtttacatgcttattgtccatttcctctaatgccagtgagggagatggtatcaagaacagagtatcaagaacagagtctggcacatagtagcctttcaataaacatgtaataaatgtatgaattattttttcattaagagaacagatggtagaaactatgataggttctagaatatgatagagtatttacttattacctaggtctgctgtgacaaattaccacaaacttgatggcttaaggcaacaaaagcccaaaatcaatgcgtggacaggactgtgtttcctccagagactctaggggagagcccttccttgcctcttccagcttctggtgactgttgg

SEQ ID NO: 71082 - DNA, 1220 bp, Homo sapiens
ctacttgaaactctagacatttttaactgaatttttaataaaaaattactgaggctttgtagaaaaagatgagaatggggtagcatagagtagttgcgctagccacatttcaagtgctccagtgctgcatgtggctagtagctaccatattgaacagtgtagatatagaacattttcatcattacagaaagttctattatacagcactgctccaaacagtaggaactctgaacattgagctagataataagatataatcattttatgttttgtatccacagtggggaaatgtaaggaattgtgtcttgtaattctcttatactgtacctttatttgctcaacagatgtttgttttgcctctaataatatataccaggcactctactaggcactgggaattcaggggtagacacaatagcctcaggcctttctgtatggagcttgtattctcatggaagagcagtcattaagtagataatcatacaaataactatagtctctatagtgctggttgtatagtagatgtttaaatgactgttgattaattgactaatgtgtacagtcccatcatcttcttagatactgacaaatcataggaacaaaaagctagctagtaatttatagttaaggtctgcaagtaacattaaaatttcagtgcagtcaataaatttagttctgttcagactgtttttgttatttttcttatttttgacatagagcaaagattatgtcagttgccctgtggtttaaagccacagttattctagaagcacagttgccatcattgagtagtagctgatccaaaagaattccagccaaggtcttgccaatgatggaaagaaatgatgtgtcctggaagttgccaaaaattatgtttttcttgttgaagacaatctttgtatctttaagcccttcatatgttgtgacatgagcacatatgaatgttccctaaaaggcaacaattatgctgtcaaattcattcaagcagtagttatccctgtataatttgaagttatacagatgcctaataagtgttttgatgctgttgctactgatgttgctgatgacattacatagaaagttgcagaagataaaccatgaagattgacactttaccattattattttgattttgtttctctcttcacatcatcaagtcttgcttatgctgttaagccctagcagttctttaatatggaagggggtatgacatataattt

SEQ ID NO: 71083 - DNA, 1140 bp, Homo sapiens
aggggtcgtaggaaggttctgggggagctgaggttgtgctctcatacaaggggttcgagatattctcaggctgctgcttgccaagagctgcaacattaatgtcctcttccgactgtttggaaagacaagcatgaaagccaggagcatccccaaagcaggagcgtctcagccaagttggcaggtaaagcaagccaccctttgcctctgggagcttttccttttttaacagtactttgttgagagatgattcacatataataaaatttaccaacctttagattcagctcagtgacatcttaccgatgtctgcccatttgtgatcaccaccaaatcggcacatagggcatttccataccccaggatgtgttcacatgctcttagcctgctggtgcctgccacccagggtaactgctgttctgactcccatcaccctgaagtggtgttgcctatcctttaacttaatataaatgcagtcatacagcctatacacttttgctaaaaatggggattttgagattttccctggagcttataaatatacaagctgtctgccagaaggcagcaaactgctgcttgggggctctgcaccacagcctttaccaggagtgttttgaggagagggtgggccagagaggaggacaaagtccataaggaaagatgctcaaccgctgtgctgctgccccggccatattcttacacagccagtcaagagctggctgctgattgggatgtggactcaactgttcaaatagaaatgagtgtcactggctgcagcataaagcctctggctgtgtagggtccctagccctgtcccccagttctcagagccggtcttgaagcccaagctaggtcatggggtgtgcttgtgcagtgaatcctccaaggtaaacaagactcctaggtcctagtgaatgtgcctccaggccaaacccctggcacagaggctcagggtgggttctctccttgccaagccctgtctcagccagaaggaggggcttggaaccaccactgctgttcctcttaagagcagggaccccatccaagcagcagtaagcgtggggtgggtggccgcccctgctactgtgtgacacactgcttctgggtgaggactctggcgcagccaccgactgaagcagccca

SEQ ID NO: 71084 - DNA, 1112 bp, Homo sapiens
attagtttgtaattgtgctagtgctgggtgctgagctcagctgcccggatgacctttccagactgaaggacatactcccctaacagctgggagtgctgctggctggccatttacttccagcccttatgaggagtttcccctgctgaagagccctgcctgccccagatcatacccccttcctgcctgtaacccttaccggctccatatggggtacaaagggctggcctcctcaccccaacttgggaaaccctctggggccatcccagctccagagccccttgtggggtcagtgagacctcattgtggccacattacagcccagtgcctctccctgacaagcctgtacccagccggctcagcccacagcactgtcctatgaaccttcctgcacgccattctccacctcagtatctgctttcggggaacccaacctgcgacagtgcttctgtgtgttttcagtcctgcaggtttgaactctgactttggagacttttccagttatctcgtggaatgacagattgtgcctgtatgatatcaggcacaattaatgcaaattaggcagacctatttattctagatgtgaatttgctatttattttaaatgttgattttatgtgttatgtgactctgaacttattgccaaataaaagtttgaattgtatcatctggtttattgtcagtcacctattttgtgtgcttaagtctgccacgttaaattctgatgaatccacagtatcgttttctaaaaaggcatttttttccaggacttgaggttatttctacaaaaatagataaaggagatcttggattaaaaaaaattctaagggacttcaaaaagtttatccctgagagaagggataaccttttttggggaaagctcaaaggtttcttctcactacccccatctccccccacccacagcaagcacacccacttgttttcagagcttgaagactgtcattcctcccatggatatcttttttttcctcccttcgatcacctgcctttgtgtacctgtgatggtgggtgttggtggactcactagcaaatctgtcccatattgattttttgggggcgattttctggaaacttggcatgtcatctaagaggaa

SEQ ID NO: 71085 - DNA, 1090 bp, Homo sapiens
cttgtatatattcttaaatctaaaggatggcaggaacatgaggggagcttgtggagagtgcttgcttattcaacatttttattgtgataaatgtatgtaaccatctattgatgaaatccaagtctggcattccatgggctccttgccagatggcagaaacttaatgagttatatagcatcctttgtaatgctgcttgttatagttggaatgtacttgtgatatttggctgtatttaactataatggtgaaggtgaccctttagatccaataaggcttctccccatcttctacattttgttatgaacacagtaaggcacagtagtatgttctttttttggaacagggtaggcattttgtttattgtttgcttgcttctaggtgttttcgccatcagggtgtattggaggctgacacttaatgggtgtgtgttgcgcccagaactgctcggtgtcggggttctaaaagaatgcgctggtgttcttggcttcaagtttctgctttggagaagcagattcaggaagtaggtgttgcttaaaaataattcttggtttttatctaatcagatattcattgattacctaccaggtgccagttatagggtgttttgtttactcaagaatgaagtagaactatttttaaaacctgtttccatgagtgttcacgttaggtgacctaagctttgaaggagaaaaacatttttgggtatgaataatgagttttgtaatcaattcccagttagaagaatttcagtctctgggccattgagcttggcagtgttgagatctcccatgtgacagaagcctgacatctgggccaccaaggctcactgactgtgtaccttgcagactgtagacccatgtcgtggcggtaacggggccgaacacagtcattcccatgtgaacgatggaggcacatcccactttattattaatccttgtatatactcagtcaggacagattttaacttgtcgctgtcatgactttttttttttttttttgaggcaaggtctcgctctgttgcccattctggagtgcagtggtgtgatctcggctcactgcaacctcttgcctcccaggttcaagcaattt

SEQ ID NO: 71086 - DNA, 1050 bp, Homo sapiens
ctctgcttactgcaccctctgcctccctggttcaaatgattcttgtgcctcagcctcctgtgtagctgggattacaggtgtgcgccaccacgcctggccaatttttgtatttttaatagagacggggtttcaccatgttggccaggctggtctcgaactcctggcctcaagtgatctgcctgccttggcctccccaagtgctgggattacagatgtgagccaccacacctggctctaggctgttttcttaattaatatttggggctgctctaggctaacatgtttctcaaatgagtcctattttttttttttaaaaaaagaagtgattttgatttcagtagtttaaaaacaaggatttttgaatcattctctgttgctttgcttttttattgcctcttcagagaaatgaccaagagtttcttcaatgcccagtttggaagcctgttccgcacagaccagaacccaacctacttcctaaggcgcctgtcgcgcttcgctgacatctacatggcgtctctgagctgcctcctgaactatgacgtcagccacactttctacccccggaggactccactgcagcacgaactgcccgcctggtcagaaaggccccccaccttcggaacccctctcctgcaggaggcccaggccaagtagccaagggcaaaaactagaaactgtaactgcccctgattgggcaggcatgatggggttgacttcatgtgggtctgagtgttgcttttggaaaagatacagataagccttttgatatttattttgtaccttacggagaataattctcccaatggttaagacaggagctagcagcccacccctccagcctttccccccatgcagggctgaaaggcaagcttcacattggaactctgattttgcctttttgtttactgaggtcctggaacatcaggtttcctgggataggtgagaccacttgatgccatgtctgtattctagcaggtcaagcttgaaacggttcttgactcctccatggaacatttcctgaacatttacgggctatgcattgggaactgc

SEQ ID NO: 71087 - DNA, 1065 bp, Homo sapiens
tggagttccctggcagttacttccttaagttaagttaggcagccagttttggctggtaagtgaggaatggcagttttatcagtcgtttcctggcccatggaagctgcctctcttttgtagctgtatccccttaattctccatgtgcccctttcctttccagttccatgaggcaccttgctttctccctggctccagcttgcctgggctacagccgtctcagcatgggtgctgacatttttaggatctgggcacaggtgcttgctctcttggctaacacacctgcaacctgtggccacagcctattgcccatgcctgccctctggctttggaaatgggcagggaattgccttgcctgccccagctggcactctgcttgggagtggctgagcagtgagatcaggcagggccatgagtggcaggccagattctggctccaggtgcatgcattccagagcatggggccctgcacgtccccctgggccttgtttccaggatgcactgggctccattagttcttggctcttctctgatgagaatcctctgatgaggatttattctgtttccctcgctatgcttgtctgtgagatgatttactaaaaatatacagtgtcaattctgagttagtgtagtttagagtctgtgcatgtcatacactactaatagttactttttatgtgctggacactgtgctgagtgctggctctatacactttgctcatttaatagtcacagctgtcccttgcaggtaggtacaattttcccattttagaataaggaaacagtttttgagaggttaggtatcattcatgtctgaggtcataaaatggcagggcagggcttgaaccaagtccccaagtccatgcttcagagcactgctctaatgtgccttcctgtttagaggattcgggtataggcaaggcttgactcaccctcagtgaaatctctgtgaccctggcagctggtcataggtacaaacacaactgcacgtagatggtatcagtatattttagctttggaaagaggttttttttttttttggttttattttgttttcctttttctga

SEQ ID NO: 71088 - DNA, 1029 bp, Homo sapiens
tctgcctggtcaagtaaatccgggaaatctgggtgaaagaaagttgattacagcagggcttttcagagccatcaatagctttttaagagggacatgtttagtgcatggtgttttccaaatttatatgaccctggaattcttttttttgtttgtttttgtttttgtttttgagatggagtttctctcttgttgcccaggctgaagtgcagtggcacaatctccactcactgcaagctctgcctcctgggttcaagcgattctcctgcctcagcctgttgagtagctgggattacaggtgcccgccaccatgctcagctaatttttgtatttttagtagagatggggtttcatcatgttggccaggctgatctcgaactcctgacctcaggtgattcacctgccttggcttcccaaagtgctgggcttacaagagtgagctactgcgcccagccccctggaattcttttttttcgtggaacacctttggatactgggcttcacacaatttgggacgcattgaattaggccagggaatatgatggtggagttttggtttcgggttttttttaggtttttgcagggagctacttcctgtgatagtgaataactggtatttcatagagcagacagcctgtactactccatgtcataatgtttcccatttctgttgttaggcctttccgaaagatgaatgagaaaggtgtcttactctgggataaaatccataagttgcagaaaggccagatatacaagcaggtatctcatgaccagctgatcctttttgttgctttgctttgtggtcggtaataatgctaatagctgatgttcattgtggcttactgtatgcctggcacagttctgagtgattcccatgaactgattgattataacttggtggtaaacttaggtttaaatcaatatattttcaatatattgctagtatctaactcaaaattgaatgtttttttaaaaacaaaatttaaggcatgactttcatagtgtgtaacatataagatgccagtagtaaac

SEQ ID NO: 71089 - DNA, 1022 bp, Homo sapiens
tccaggctggtgtgcagtggcgccatctccgctcattgcaacctccacctcttgggttcaagcgattctcctgcctcagcctcctgagtagctgggattcaggcacccaccaccatgcccagcaaatttttgtattttttagtagagacggggtttcacgatgttgtccaggctgatcttgaactcctgacctcagctgatccacctgccttggcctcccaaagtgctgggattacaggcttgagccaccacgctcagcccattgtccttttttattattagaactttccttttttgtgttgatgatgggatctcgtttagtcacggaaaaggcttcctgctgttcctggtgcttcgtggctctgtcccttgcgtgggcccctgtttctaaagcattccttccaccctgtctgcagagctctcatggaaacacgatgaagcagttcatggacatcttctccctgcccgagatgaccctcctgtcctgcgtgaatgaatacttcctcaagaacaacatcgactatgagcctgtgcatctgtacaaagatgtcaaggttgtatccacagtgagagattacagtgctgagtctgtttcagccttttcagtgggagtcacagagtcttgaacctcctttctaggttaggtgttttaaatagtctcttagctgggaactcttatatgtggtttaaccttgaacattacaagaaagatgttgttacatcaggagaattggaaatcagtcaaaagttttgttaaaacgagatggtgctgacactgttatctcaatttttgatcctttctgaccagaaggccaaggccagggccggtgcacttggccaaagggatgatggggatggaagtccagcctgtacctactcacccatgagtctgcccgagcaagggtgcctcttcttttttttttgaacagagtcttgctctgtcactcaggctggagtgcagtggcgtgatcttggctcactgcaacctctgcctcccgggcctcccgggttcaagtgattct

SEQ ID NO: 71090 - DNA, 1048 bp, Homo sapiens
aaactcctaataaaatcatcagatttcgtgagacttattcactgccatgagaatagcatgggggaaacagctccggtgattcagtgttctcccaccaggtccctcccacaatctgggaattataggagctacaattcaagatgagatttaggtggggacgcagccaaaccaagtcagcccctatctcaggctagagtattggagggcaggaggatgtctgatggagacaaaaacaatctttctctgccctaatgtattaaatacattaaaacaaaagccagcccaccccaaagcaagtcattaggaagccttgtgctttagtggtgtgagagcctggaccatagagccagaaagcctgggttctaatcttgacctaccacttcctactttggtgtgcttgaacaggtacatgacctttctttgcttcagttacctcagctggaaatgggaagaataatggtgcctccctcctaggattgttgagaattacaggaatgactaggtgtaattcatatctggcctatagtacatgccatgtaatattaactattattattcctgctcttgttaccaatagaacagtagtagtagtaaacatagtagcatcttacctgatatttgtggcatttacttgtggcacattttgcctcgtcatgatgacagtgccttgcacctcaattgaaaaatcccagcactgcacaggggtgtgaaaatcattggtttctctagttgagctctttaactgcaccatctggtttttccagaggcctcagtgttgtccctgatgaagaagtcattgaaatgtacgaggggtcccacgtgcccttggagcagatgagtgacttttacggaaaggtaatgagaagcactttattcatttaaagcagcctttttccttcttgaaacatggccttgtcgaacttacctactgcttatatggaattgacagggaaatttgagattgtgtgttgagagagactagcgtttgaaggggacacccccagattctttcatgattctcctttctgaagcacttcctccccacctg

SEQ ID NO: 71091 - DNA, 1117 bp, Homo sapiens
cagtagagacatttgcaattccacctgttgagacatctactgttaactgtgtttacttgttttaattcgctttttttggtaattcgagtggttgaacatttagtttaccagctatttaatttccttttgtatggatttttaaaatattaagaatactagaccattgctgtttgtcttttcaattttttggtctaatatactcacctctttccccaaattgttgttttcatatttttagatgcataggtgttaaaaaatcttatgttgcaaatctgtcaatagttttcttcgtgatttattctgttgcttttttttttttaacatttggaaagttatgttttattcagagatgaaataaatggtatatattcttgtttttaatgttcaaaaattttaaactctgactcgcatgtttctttttctacctttttaatgtttaaaatttttaaactctgactcacatggtgttttgttttatagcataatttgaaggaaagtcttacttgacattcttttcacatagctgattggtgtttatgcatagacattagacagagacagaatattccaggcagatgtaactctggtcagtattcagctacagcatatgttggagaacacagagcagtggatgacccatcttgttgaaagtagggcatgggaaggagaatttaagattggagaaatggattaaagtatacatagggaatgcctttgataccaggttaaaaagttaaaaatttatcgtcagaagtttgagtggctgaattttcttaaaataaacttttttagaattcctttggatgtaagcaatagaaaacttaactctttcccgttgacatcttttccaggttcctagcagtggcccctcacatctccagatttatgttctcttaaatctacctttggaagaaaagagtgcctcttccctgaaattcccttacaaatccagaaattgacctgattggacttattggttcactttggctgtagagaaagtatgatgattggctggaggggatcccatgtctgcctcaaactagtcagcattcttaagggaattcaggtgctctgttaggccaggcctgggttacatgccctccttctggagtcagga

SEQ ID NO: 71092 - DNA, 1050 bp, Homo sapiens
ggccatctggcatctgtttgagcttgttgtgtgatcacaaggctgcccattttattttggatggctgagtcacagagagtacttttgattccccttccatatgatagtcgcttaaatatgaaggtggtgatcatgcatcatcactgcaactcacctttgatttgatcattttggaagctcaactttgctttcactctagtttgtcagtatccctttgaaagtgaaccatttgttcctgaccatgtgtggtctgactggttcatggtggagggaagcaactggctcttccttggtgaacaaacactgtacttctgtaactttaaaagttaattcgtgttcagtttgtggtcagccaaatcctgactttgtccttcttgtattgacatgatgtaattttagagaaggaaaacaaaagctttaaaaaaatcttctttgcaaataagtacttagaagacaatgatagaattctattattttttaaaagtcaaatactacatgttatatctaggagaatgcagagagaaagagaggctagctgattgatcaagctgggttttataggaaatttttatactttaaaggattggtccttaatttgagtaactctttttcacttcactagggttttgaggaactgtttcatgataagttaattgataagataatgatgtataaacctgaatataattttaatttgtatgtagagatgcaactctctgcatagactgtaatattttgttctcattcgagcagaaaaatctacttgagaaacactactagtgaatattaatccttagctaaggtagcagacctttcaaatgttttgccctcagtactcttttatacactttaaattattgaagatcctagagtttcggtttatagattagtctcaagtagacttttaaataatgtattctgcccttatgttgatagtgattgtattagaaattaaaacccagagaattttaagatatgtatttattgattcatttaattaatttattttttaaataaattcccgggctgaatttatttaaaattctgact

SEQ ID NO: 71093 - DNA, 1058 bp, Homo sapiens
cacctcggcttcccaaagctctgggattacaggcctgagccaccacgcctggcctcggcttcctcttcattattagtccttgagatttctccagtttctcagagttcagttatgacttcaagagaaagtcctctatattttttttcagcgtgtgggtattctatacaaaaaggtttttagacgatctagtctgccagactgctgaaagccaaagtccaaaagaactcttgacggttagaggacatctgtttccacatgtctttaagagttcaataaaagattggtttccaaacccggcctgtaaaaatatagattcccgggtcttacctccacattttaggaatcagaatctccagggttagggcctcagaatttccatttttaaacaagcttcccaggtgattccgatgtgcctatcagtttgaggaccactgaattcttttttttaatttgtcttaccttcaaaagctggcaaaaaaattatttaatctcctttttgtattttttctcctttcacttcctctttaccctacccagaatttacaccctaatgaaaggggaaaatgaactctagctttcaactggtagatcagcgagccacctccacggcaattacagaaaatcataacactcagcagcaaaagtcaggccaaaaaatatcattattccaggcaggcttcttgacccagcagcaaatttaaatctaaaaaacagtccccatgctgagttctgcctccataaggatcattgagcataacagctcaatccttcaaactttcctaaagcgtaacagaagcactaaatgagcactgggtcaccagaagacactaagattcccctggaatcccctgaagttatatacaaaatcatttgtgtgtgctcaagtattatgtgtaatactgcaaatgtgtctttttataaagaaaaaacacacagctttctccagattctcagtgggtcctatgactccattactctatatccctgctgcgtagaaaaagcacatttctggttgtaagcatctttcagtattatcaacatatgttcttattaggcat

SEQ ID NO: 71094 - DNA, 1683 bp, Homo sapiens
acctcatcattccatcccatgtggcctgcgcgccaccacaccacacggccacccccgcgccaccctgaaattgaccgcagcaggctgggcgtggggcccccggcccggccccgccccgccccgtctccgcccccgtcccagacccgcccactccccatcgaccccgcccccgttagaccccgcctccggctccgcccactccccgccccgcagcggcgggagggcaggcctgcgccgccacgtgttccgacgcaggagctgccctcctgcagggcagagcgcgggtagatcttgggccgggcagcagcagtcgcagagcggcgcggcggcggtggcggcagcaggcagcaggcatgaccatggcagcggcggcggtggtggcacgcggggccggggcgagggcagcgacagcggcggctttgcggggtggctgcgggaccgcggctcgggggcggccgtgtgcgggccccgcccggcccttgtgcactgcacccgggaccgccccggacatgaagcgctacctgtgggagcgctaccgggaggcgaagagaagcacagaaggtgagtgaggcggcgaccccgccccggcgcctggggcccctcctgcgcgctcagctgggaagcgggcgccctaggacccggaccagcccagctgcggacctccagggcctccagtcgcgaaccccggtgcccacacccccagccgcaggcagcatcgctcctgcggagcgactcggggaaacggggaaaaatgcgctctagaaacttcacaactcgcgcctttccccggtcgggaaagctgttgtatatattcttgggatttttagcccgaaatctgcatctgaggggctttgggccgcgcggggctggggttcctcaggcctcccttgggagccggccactcccacgcaccgttaggtgttgttactcatcaatagtaataatagtaacagccgagtcgggctggcgcagagatgcccaagagcggggctgctggggaggtggccgatcccgaggctggtctgttttccttttggtgggggtgggttgggatgggatgggatgggatgggatggaatgggatggaatgagatgagatgagatgagatgagatgagatgagatgagatgagctgtgcggtgtttgaaagaggagaggtccaggtggggaaggttctgggttatccattaacctcggtgaggaggggattctaaggctgtgaatgggaacttcatggccaggtgcacataaaatgagcttggctcggttgttactactaatgaactaataaataccagtgccgggcacgtagattatctctaaatcgttcctgtaatctacgaaggaggttccacatccccattctatagatgggaaaggcgagactcaggtttaaatgacctggccaaggtgacgcctgaatttagggactgtctcagctcctaacccactgtcctgtttcctgtgctccgttgaccatttgggaaccaataatccattgtcgctgttgcttccaaggaggattcagaaccgaaatttgtatattggttacttcttgttgtggaggtggcacatagatagggagagattatttggtgagcaagaacgttttataggatcacattttccattttttttggccagaagtcagtttaatgaaaaaagcaaattggagtgattttc

SEQ ID NO: 71095 - DNA, 1091 bp, Homo sapiens
attcgtgagggggggcggaagtccaccaatcggagctgtccaggtgcggtgaccgatgcccgaagcgtggctccttccgattggtcagggtttgcagcttttctccaatcaaatggctccgcgggcccctcacacgtgggaccgcccctttgcctgggcggccttggcctctaagggaaaacgtccaatgaatgtaagcagagaacacatccatccttttagagaggtcgcggcggaactacttccggatcctagagagcgtttattccgtgaccggggaaacggtagccatggcaacgtgttcttcaccctttcccatctatgcctggggtttcgttggaagtgattccagcacgactttcgcggccagctttctcgtgtggcggcgcttctcggaaagaagaaacacacgagagaggttgcaaatcccctagaaccctttcagatggcgggggggcgggggggtggcggtggtgagaaactacagctcccggcatgcaacgtcctaggggttcactgcattgaatgctgggggtcgtagtctttggtctctgaggaccagctgcgtagttttggccctttctttcacgttcccccagcgtgtctttgccagagccctgccctgcgtcttagatgttacatctcgttctgattacagtagagatatgtgcctattccaggagtctccattgtacacagcttttagaagcgggcctagaaagccttcatgcctcgggcaaggccgcccggttctggggggtcggtctgagtctgggggctccgcctccggctcaagagcacgagtttccgaatccgcctacaagtgcgtcacttgggcagccggagcgttcacctcctctgtgcctttccgcggccggaatccccaggccttccttatctggtttacagaagaacgtggttgggaccttcccgaccaccttagggaaatcgcgagcagcgctgaggccttcgactccccaataaagtacaaaggcggcggtgacctgacggtcgtagaaccctttctgtgaatcaggtggagagcgtggtcgtaaaagcgggtctagcacagaaaaggaaaacccttagtt

SEQ ID NO: 71096 - DNA, 2952 bp, Homo sapiens
gcgaaagtcgtgctggaatcacttccaacgaaaccccaggcatagatgggaaagggtgaagaacacgttgccatggctaccgtttccccggtcacggaataaacgctctctaggatccggaagtagttccgccgcgacctctctaaaaggatggatgtgttctctgcttacattcattggacgttttcccttagaggccaaggccgcccaggcaaaggggcggtcccacgtgtgaggggcccgcggagccatttgattggagaaaagctgcaaaccctgaccaatcggaaggagccacgcttcgggcatcggtcaccgcacctggacagctccgattggtggacttccgccccccctcacgaatcctcattgggtgccgtgggtgcgtggtgcggcgcgattggtgggttcatgtttcccgtcccccgcccgcgggaagtgggggtgaaaagcggcccgacctgcttgcggtgtagtgggcggaccgcgcggctggaggtgtgaggatccgaacccaggggtggggggtggaggcggctcctgcgatcgaaggggacttgagactcaccggccgcacgccatgagggccctgtgggtgctgggcctctgctgcgtcctgctgaccttcggtgagtgattctggaggagcagacgtcccccctccacacacgcggccgcttctcgaaggtcctgggggcgttgaacgtgggaggggggatcccggggcctgcggtgggccaagggacgtcaccattcctcgaaagagggcaagggaattacgtttattctcttcttcctctggaaataaaaaaagagagcaacatcatctaactgccctacagatctaatagtatctcgcccggaggtctcagcgacctcggggtggggcctctctgaggctctggctcccccgggagctgtgcgagtccctcccccctccccgcccggaggactttttcggccaccgcaaccttcggccatcccagctttcccgtcccctaattccccagactccgactcctcgcaagcccgtgtcccttcttagatgctggcctcgggagcgtgaggcctggggccagcggaatggcagtgtcagcgtgtttgattcagttttgctggagttcggttcttaacatttctcccccttctcatgcctctgggctcaatttcagttcccctcgccagaggttgcataaatcctatttgcattctgacctgtgctaacgaaggccgaagttttggcttgatcagttgggaggccttggctcggcctgcgcgcaacacgtgtgggtgtagaagaggcctggtatcagtctgcttaacgttatttataaatgatcggagacacactgtttagaagtggtgactgcctccgtatttcaggatctactggagacttcagcatctgaacttaaatagatgttctgtcttggctttacctttggtatttaaaccagggaatgcactctttcatccccacctcccttagttaccaactgaattttgcaacccctacccttccctatttgatcatcctccttggagaagtgtgatgttgaagagtttgcccgtgttaaatcttcagggtcggtcagagctgacgatgaagttgatgtggatggtacagtagaagaggatctgggtaaaagtagagaaggatcaaggacggatgatgaagtagtacagaggtttgtgttcatttgaacttacgtatacagataagccgtgtgaaccttgtgagttacggtcacttcttatgtatctcttctccaaaggtccagataaagtctaacaccctgtatttaaatacccggtgagttgtgtgcatacatacctcctaacttgtccctaggagtgatgaaaactgagtgaattcctttgaaaactatattgcagaatactagcaccataaactttgtaagactttatagaagatactttcagttggatttgtattcattaactgtgtacaccgagtaagtttaaaaatgggatttctgtcagttgaacaatattttaaaatttggcctcttgggacttattgacagttttgaagtcctcactgtggagcataaatgagtatgactttgctttttagtagaggaaagttgggatttttttttttctggcaattttaagaaccgagtatttccagtgtaatgttaaaggtagcctactgctgtgctaacataatgagacggtatatcagttatattttataaaggtttccattttaacccccaagacaatattcagaggcccctgtgctttcatcataattcctctagttttgaagggaactatgccatgcaatatttgcttacctaactgatttccttagagaggaagaagctattcagttggatggattaaatgcatcacaaataagagaacttagagagaagtcggaaaagtttgccttccaagccgaagttaacagaatgatgaaacttatcatcaattcattgtataaaaataaagaggtaagcaacatgtggttagaatattttatctctgtatggtggcatacttgtttacttaaatttgcttaatttactgcaaaagtaatgtagtatccaagtaagtaggtaacaacctttaaatacctaatatgtccaagaattgctaccagatatctgggaagaaagggagtgtcagacattttccttttcctttacctctaaataggttcacggcctgataatagttgtgagtctaagggcagtcacataaactaaacttcttgcattgcatacctgaagatcactgttaggtgaataagagtgcttttataaggtacagagaagaaataaatgggtttggcataaaatcgaatatcttaatgcatcttgaggatagtctaagtgtattccctctggcttccatttagattttcctgagagaactgatttcaaatgcttctgatgctttagataagataaggctaatatc

SEQ ID NO: 71097 - DNA, 1498 bp, Homo sapiens
atcacaggctgcctgtggtctttgctctgcctcatcctcaggctgggacagaggcgtgggcagccacctggagtgtgtagccggttgccatggtgcagagcaagcttagagggtctcatactattataattaaaggctcagcctgaaaacagagctctcctttacaactcattggccatttataactcattggccaaaactagtcacatggccttagccattcttaaatggaaagtagagtactcctaagtttctggaaggcagacagccaggaatattgagtgaagaatattaatgatccatcacagattccaaatagaggaatcattcaagttgttttgtattctagtaaagaaataggcaagacataaaattttatttttcttgaattgttttccttcaaaggtaacttgttttatttaggtcagcctctaacctttgacatttaggccagtctgcccatttgatattaatactttctcaaatacataaattactttaagatgtacactttcagaaaaggccataaaaaactatgtggaggaaaatatctcagtttagttttctgtattggaattgatgggacccaaagctggttagttcctcaatatttgtttggcataatgtaaatattaaatacaactatctggttcttgtcttgcatttagtgtgataaggagaagaacctgctgcatgtcacagacaccggtgtaggaatgaccagagaagagttggttaaaaaccttggtaccatagccaaatctgggacaagcgagtttttaaacaaaatgactgaagcacaggaagatggccagtcaacttctgaattgattggccagtttggtgtcggtttctattccgccttccttgtagcagataaggttattgtcacttcaaaacacaacaacgatacccagcacatctgggagtctgactccaatgaattttctgtaattgctgacccaagaggaaacactctaggacggggaacgacaattacgtgagtatgaccaattccttataagaattaatagtcatggtgaggatcttgactctccagttctattctctgagcaaatgacttattctgggccttaattttcctgccttataaaatgaggaaacagaactgttgtcacttgaagaaatgtttgaggacctgcaaagggccaggcacaaaggtttgtgattgctgttgtacatggagggtataaagtaggaaatagcagcagcttccccaagggagaaggcttcttgggtacccacagaggaggcactgcttggtcagtttcccaggttagaagagtaatttgtctgtggagcatcctgaataaaggcatggaggcatagcatgctcactagatgaacagagttcttttcggtggcagttatggatagaatgtgatgaacttttatttatttatttattttgagacggagtctcactcttgttgcccaggctggagtgcaatggcacaatcttggctcaccacaacct

SEQ ID NO: 71098 - DNA, 1056 bp, Homo sapiens
ctgcattttagtacttttttaacttgtgttcccaatttaccttcccctgccttcgtcactaacattgatgtctccaggtttcatttggaggcatcactaagagttatgccccagtgccctctctttttaagcactgggctagatgttggagaaggatagggcaatcattcccaaggaaagatagaaagtgatgtcccaagagatgttaatgtcaggttgctaagaagcaggtgaaattatctggatataagctccatgaaggcaaacattttgttggaagctccattcccaaagcttaacacttaattggcagccatttgtatgaataagtgaggttaaacaggacagttccatgcagggaacgatggctgctaacacctatccaggacctagtttccatgaccatgcatatctttttaaaaatttcctttgcccacttcttaaatgttaacatacattttctccaagttaagtttcagcccttttctcattgtccatgtgatctttatgtagtcttatccactgccacggcctcaggttccatctctagttctcaaatttatattcttagcctagatcaggagttagcaaactttttcttaaaagagccagctagtagaaaaaaagataaaagaaaacaacaagaaagaaagagccagctagtaaatatttttagcttgtgagctatatggtctgtcacatgtcccaactctgtttagcttgaaagcaggcatagacaatacataaggatgtgtcccagccaagtgtggtggctcatccctataatcccagcacctcgggaggctgaggtgggaggatcacttgaacccaggagtttgaggtcagcctggacaacataatgggatcccatctccacaaaaataaaaaataaaaaattagcttggcacagtggtgcatgcctgtagtcccagctactcaggaggctgaggtaggaggattgcttgagcctggcaggtcaaggctgcagtgagccatcatcacgcctgggtgacagaggtccaaaaaaaaaaaaaaaaaaaaaagtgtcccaataaa

SEQ ID NO: 71099 - DNA, 1058 bp, Homo sapiens
ttgccttcattctttttttttttttttgagacagagtcttgctttgtcacctaggctggagtgcagtggggcgatcttggctcactgcaacctccgtctcccgggttcaagcaattctcctgcttcagcctcccgagtagctgggattacaggcgtgtgctaccacacacccagctaacatttttgtatttttagtagagacagggtttcgccatgttggccaggctggtctcgaactcctgacctcaggtgatccacctgtctcggcctcccaaagtgcggggattacaagcatgagccaccgcgccggcctgccttcattcttttagtgttgaatatttaaatacgtgccaaggtaatacatataagtttttaatcaatatagatttaccttgctgctccatacataaataggaaagtttatgaactgtgaatattttttgacgagatttttaattgtatccaattcaaggtaatcagatgcttcttcttttaagacaaggctgcaagaaaaattcgatgtttagagacacctaacatttagaagatctgattataaattcatttaaataccatggtaatagccagcagttcagtataatccaagatgtcctaattattcatgttaactctccatcaccaacaagggtttgtgagctaaaatgtaacacatgtagatacagtaaagagaagaatctcctctacattacctcaagtggagaataaccttagttttaagtagaaaattaaaatattcccaaccgtctgaatagattgttttcatttttcaaggtgagaaagcactgaaatattctggagagaaatggaatcatgcactctcatagctcttactgttattccagaaacctaatgattattgtagataactattcctaattaatgaaaacattttccttaaaaaagctagaaaattaatctggtttatatttatatctgcactatccaaaatggcagccactgggcacatgtgacttatttaaataaaatgtacagttcagttccagttatgctgccacattccaagtactcaacagtca

SEQ ID NO: 71100 - DNA, 1764 bp, Homo sapiens
atttaaataagtcacatgtgcccagtggctgccattttggatagtgcagatataaatataaaccagattaattttctagcttttttaaggaaaatgttttcattaattaggaatagttatctacaataatcattaggtttctggaataacagtaagagctatgagagtgcatgattccatttctctccagaatatttcagtgctttctcaccttgaaaaatgaaaacaatctattcagacggttgggaatattttaattttctacttaaaactaaggttattctccacttgaggtaatgtagaggagattcttctctttactgtatctacatgtgttacattttagctcacaaacccttgttggtgatggagagttaacatgaataattaggacatcttggattatactgaactgctggctattaccatggtatttaaatgaatttataatcagatcttctaaatgttaggtgtctctaaacatcgaatttttcttgcagccttgtcttaaaagaagaagcatctgattaccttgaattggatacaattaaaaatctcgtcaaaaaatattcacagttcataaactttcctatttatgtatggagcagcaaggtaaatctatattgattaaaaacttatatgtattaccttggcacgtatttaaatattcaacactaaaagaatgaaggcaggccggcgcggtggctcatgcttgtaatccccgcactttgggaggccgagacaggtggatcacctgaggtcaggagttcgagaccagcctggccaacatggcgaaaccctgtctctactaaaaatacaaaaatgttagctgggtgtgtggtagcacacgcctgtaatcccagctactcgggaggctgaagcaggagaattgcttgaacccgggagacggaggttgcagtgagccaagatcgccccactgcactccagcctaggtgacaaagcaagactctgtctcaaaaaaaaaaaaaaagaatgaaggcaaaatgtggtctattagttaaggatactctcagggttttcttacaaaaacctattttttgacctgtaatgttatatcatattctgtagacaaaatcagaattgttaaacaaatgagtttaaccataattctcttatttcaacagactgaaactgttgaggagcccatggaggaagaagaagcagccaaagaagagaaagaagaatctgatgatgaagctgcagtagaggaagaagaagaagaaaagaaaccaaagactaaaaaagtaagtctggtttatctccctgcataagatattgtttaacatgtataggcaaaaccaggaaaacctaagtatgcactggctgatttgaagtcagcttcagttcaggtgctaagtccatggagccagcttttaaaataaggcctttgtttgtatgttgaatacattgtcctgtagaaagttttaagtatcaaacccaggtcatttttatgaagagttttctaacttttatatattgcctaggactggtggcttatatgtttggaattttaaaatcttaaaaagccttctgagtcctcttttgtctttttatcatgcagagattaaccataaaaatggttctctggcttgcttaggtagcagactaagaagtattgatcatggtggttgagaaatatttttgtaaaatgttggatttctttaagtcatgaaatgggaatatataatatgtatttccttctaacctcaaaacaaatattttcaagaaacatttttgctagtt

SEQ ID NO: 71101 - DNA, 1089 bp, Homo sapiens
ttttgaattaaatattgagaaaaatactttgcttttgatacagttggcagaaaccttactagataacaggtatcctttggtgccctttttttttttttctttaatttggagacagagtctctgccacccaggctggagtgtggtagcacgatcatagctcccttcatccttgaactcctaggcttaagcagtcctttcacctcagcctcccaagtagctaggaccacagacacacgccaccatgactggctaagttttaaaaattttttgtatagttggaggtcttgctatgttgcctggactggtcttgaactcctaggctcaaacagttctcctaccctaacctcccaaagtgctaggattacaggcgtgagccaccacaccagtcctctgggtctttacatagtcttttgaaatctactgaagccatggttactgctaggataaccttggtgagtgctgagagagactaatcaaatactataataacttcaggttgaaaaaactgtctgggactgggaacttatgaatgatatcaaaccaatatggcagagaccatcaaaagaagtagaagaagatgaatacaaagctttctacaaatcattttcaaaggtaaatatttataattccctagtttctggttattaatgaatagacaaaatatcaccctcttagtttaattgtatatggtatgtgaccatgaatatgagatggtccattcccattttttcccagtgagaaaattcaaaaaaagacctttaggccaactataatatgtctacttctggtttattgacctagtcacaattaaaatcacatttatgaacctttgagattgacacctcagtagagatggtctttgagagtaattggtttccagaacacaccatttttacttaagttgaattattatactcatcactacttcaaaattgcagcagttattaaaattagtcctagctcttagtgaatagtgaaactacaaaatcaagaatgtttgaaacagttttatggctgtttaaacacaattggtttcctttttattcctgtgtattttgtaatatgtgatttttttaaaaaaattatttt

SEQ ID NO: 71102 - DNA, 3429 bp, Homo sapiens
ttttacaggtatttacatacatctttgtagccactcttagagctaagttccatggaagaaacatgttcttgagtacttactgtagttcaagggcacactgaagtgttgtatgtaattttgtcatttaggcagggtggtggttttcctattcacttctctcatacgtaagaagtataaactcatccttccttctgagagtttaggaaataatgttattgacaatcatcatcaaaacaaccatgtctagtgaattagaattgcaattctagatatttcttcactccacccttttctttctcttccccccacccttttctttctcttccccacctcccgccagtaaaggaaaattttttgttagttaattgctaaactgaatatgtaccacatagtacattgcttagttcttgcactgcttttctcctgtgtcgtttgaatgactaagataccaactttccacaggaaagtgatgaccccatggcttatattcactttactgctgaaggggaagttaccttcaaatcaattttatttgtacccacatctgctccacgtggtctgtttgacgaatatggatctaaaaagagcgattacattaaggtgagtttttaagtagtacatgctgcgtttaaaatttgaaagtttaatttccagaaagtgacttttttttggtctctttagctctatgtgcgccgtgtattcatcacagacgacttccatgatatgatgcctaaatacctcaattttgtcaagggtgtggtaagtatctgaagtttgggagaaggggtgattgttgtgggggtctggcagtgtagagtgtttgtttggctttgctttcttccagtggttttattgctcactgaactttcttttgccatctgaaggtggactcagatgatctccccttgaatgtttcccgcgagactcttcagcaacataaactgcttaaggtaagtgtctctgggaagaaactctccactttgctgtttgattggggttcagaggacaggctccatttgtggagtaaaaccagattttgggtctggtccatgattcttcagatgaatttcctttctttctggagttatcagatcctaagaatctgattctttttctcccaacatttaataatgaagtttcaaacatctagaaaaaaattaaagaattgtacaggtccaggattaacattttgtcatctagacacatagccacctttttatcaagcctttcattaaacctttcccctccaatacttccataattagaagactctttagtttttgaatttaaaagtatttgaaagtagcatatttgttcacttcatttagatgctagagagagagtatcactgagtcctaaggttagaatataaacattaaggcaatcttgtggctatttgcacggacagctgaatttcagcccaatctgaatgaattggagtgcttcaccatttcctgcccctcaataaatggcaataacgatatcgtctttgtgtttttcacactcctgcctgggtaccttacattctcaaaagttggagattaacttctctaatcagttattctttcattgtgtttaggtgattaggaagaagcttgttcgtaaaacgctggacatgatcaagaagattgctgatgataaatacaatgatactttttggaaagaatttggtaccaacatcaagcttggtgtgattgaagaccactcgaatcgaacacgtcttgctaaacttcttaggttccagtcttctcatcatccaactgacattactagcctagaccagtatgtggaaagaatgaaggaaaaacaagacaaaatctacttcatggctgggtccagcagaaaagaggtgagatgaactcataagtgttgtcagccattctggaaggtagctagggatttatagccaactcttgagggggagaaaaggaaaacttaattgtgtaactggagtagttataaggcctggtcagtcactgacaggaaggtcatttatattctctgaacctcttaattcttcacctgtaaaatggagtttttaataatgtataaacatagcagctgctaggataaacaaatacaccagggccagacttggaaaactttgtgacttcttaattttgtaggctgaatcttctccatttgttgagcgacttctgaaaaagggctatgaagttatttacctcacagaacctgtggatgaatactgtattcaggcccttcccgaatttgatgggaagaggttccagaatgttgccaaggaaggagtgaagttcgatgaaagtgagaaaactaaggagagtcgtgaagcagttgagaaagaatttgagcctctgctgaattggatgaaagataaagcccttaaggacaaggtactgtggaaattacaaattgtggaaatattagtatcagcatttaagagaaagttattttgtgaacaaattaagctgcagctggttactttgtaaccattagaatggtaaaaatttaattaatgtaattaaattattgggagaaagcttaaaactttcgacaatactgctttgttaataacttgttacaaattaaattttatgtttttaaaaggtggtatttaaacttctgactagaaaattcagattatcaagtaagtgcccctacaaattctcctaaaccttaagaaaagctatttttatgacctgcttctgtgtttatgatcttaagtgataaagtcttagacagttgaaagacaattgctcaatgaccttacctgttgatattaatttatatgacttgatttctttccctaagattgaaaaggctgtggtgtctcagcgcctgacagaatctccgtgtgctttggtggccagccagtacggatggtctggcaacatggagagaatcatgaaagcacaagcgtaccaaacgggcaaggacatctctacaaagtaagcatcctcgggaaagtccctgccagggcgttgccccttacccaatctttgttttggagataataccagcttcaatacaaagagtaaaattgccttaaatgtctaccactgtctactataaggtagacaacaagtttacgaagggatttctcctacatttgattgagaaagaaaaggtctttgactcatgattttctgattttattgtatttgatatgtaaatgggaattttcttaatgtgttatgcatagtctttacttttgcattggattatatgcttagcctaatatctgaatttattttacatttttaaatgtaatagctgcacgaggttaatgacaacattcctcaagtgagttaagtccatttcaaatcacgtcccccacacccccaagcattaaattatgggtatccagatagaatgtctcataaagtagacggtacaggacctgtgaattaacagtatttgaactcaagggcctatacctggaggtatagt

SEQ ID NO: 71103 - DNA, 2122 bp, Homo sapiens
ttatactgtattgggttttttatttttttcttgttttgccctttctaatattttcaatccgaggttgattgactctgcagataaagtagactggaaaagtacagtcgtccttaggtgtatgagggagattggttctaggacccctgccaaaatccacaaatattctagtcccccagtctgccctgtggaacccgtgtatatgaagagtgggagctctgtgtgtgtggattccacatcccaagaatacggtattttctatctgagtttggttgctgaacctgcacatacggagggcggactgtatttattggaaaaaaaatagcatataagttcaaacctgtggtgttcaagtgtcaatagtacattttgattttttttttttaccaagagttgttctgtgtaattatgaaagaataagggaaacgtatgaaccctaaaattggatatgttttgttaatgttcatttttatctcttaacagttactatgcgagtcagaagaaaacatttgaaattaatcccagacacccgctgatcagagacatgcttcgacgaattaaggtagtattaaagcagtcctcttgcttgtcttttaatttgagtactttgtatcttttaatattaatctagtgcatcttcttgcatttcaggaagatgaagatgataaaacagttttggatcttgctgtggttttgtttgaaacagcaacgcttcggtcagggtatcttttaccagacactaaagcatatggagatagaatagaaagaatgcttcgcctcagtttgaacattgaccctgatgcaaaggtttgtatccccaaccttcccgcaaaggctggctggctttctttgtttctgttctttcagaataggcctctcatgattgagggatgtagctttgcgacatttgcctaatttctaccttttgaaagaattttattgaatgtttgaatccctgtagtgtcaggcactgcactagaaactaagtcctccttttacgtcctctttcctttttgcctgcctccttttgttagcttggctgttcattctagttaagaggatttagtctgtggttctgaataaacagaagtgacattaattatgattttatacatataaatgagcaaagtggaaataaatccaaggcattaatgggcccataaatgttgtgtttaggtggaagaagagcccgaagaagaacctgaagagacagcagaagacacaacagaagacacagagcaagacgaagatgaagaaatggatgtgggaacagatgaagaagaagaaacagcaaaggtatggcaaatcaagaatgtgacttgcattttcagttctggcaaagttaggacagagttttagttctggcaaagttaagactgtgtaacttacagaagtcagactgagcatttaaattgtttatttcatgcacaaacctgtgagctaggttttttttctgctaacttttaataccttctgggttttttttatttatttacaggaatctacagctgaaaaagatgaattgtaaattatactctcaccatttggatcctgtgtggagagggaatgtgaaatttacatcatttctttttgggagagacttgttttggatgccccctaatccccttctcccctgcactgtaaaatgtgggattatgggtcacaggaaaaagtgggttttttagttgaattttttttaacattcctcatgaatgtaaatttgtactatttaactgactattcttgatgtaaaatcttgtcatgtgtataaaaataaaaaagatcccaaatactcagtgtcttgactgtcttgcagagaactacctaatacttggctgaattttttttttttttaatcatgtgtcttgggttctttttcttagaaaagtgactcaggcttatgaccttttttttttttgagaccaagtctcacttttgcccaggctggagtgtggtggcgcaatctctgctcactgcaacctccgccttccgggttcaagcaattctctgcctcagcctcctgagtagctgggattacaggtgcccgtcaccacacccggctaattttttgtatttttagtagagacagggtttcaccatcttggccaggctggtctttgaactc

SEQ ID NO: 71104 - DNA, 1049 bp, Homo sapiens
acaaaggccggggccgcgcgtgcgcactgtggcctggtcggcctttccttccctggctgcggcggtggtggtggaggtcggggctgctctgagggttacctggtgcacctggacccttctttggttccccgcgataaccagttgactataaaatatattagtaagcattcagcagtctttggttaatgtgtctttctggatgccattcttggctagaagggttttccgtcaccctccattaccacgcagagagctgtaaagatgagtgtcgaacatttccagctccaggagttttcattttaaagttggttgatttgttgcggcttccccccaccccaaaggcctactgaaagcaactttaagggtcacgggttagataattttgttgtgggcatatgtatacactctcgagtagtcaatctaaaaatgacctttgagttttccagtggccttggggacgatcttaagaatccgtttttaaaaagtcctttgggggagtcaagagaaaaatttgcaaaagcaggagatttagggacttgaactcctggcggaagactaaatttttaaaaaatggatatggtgacagttttttaaaagataaagagtgatgatttacattgaaattaaaaggaaaaaaacctatgcctaatgaagaattatcctgactctcagtggctaatgggagctgaatttaggcaatacaagggacttatatgggcctgttcatgtctgtaaagttggcatgtctggaatctgattctgacatgccgagaattggtgttacatgaaagggcacactaaccaaaataaattagagcttaggaaaagagatatatgtagacaaagtgtggactttatcttgactttgtggatcaagtcctggaataaattactccacttctttcccagaagaactttacaaataagagaattcaccagaatttgtggaaatctctctctcataacctcacttaagagcagaattgaaacttgggccaagaataaattacacattgtaagactttattcagggtcttacagcaaaatag

SEQ ID NO: 71105 - DNA, 1006 bp, Homo sapiens
acaggcagcatcagaaggatgctggcaggaggtacctacagtagtcattattatagcaaatttattatataccaggtactgttttggatgttttacataggccaactagcttaatgctcctaaccaattattaggtactattcccattttacagatgtggaagcatgggcataaagagattaaggaacttgcccacagagctagtaaatgggagagctgaaatttgaatccagatgacctagcttcaaagtctgcttctctagctagcaaatgtgctttactgcctctcttagtgagcaagatggagatggactgatggcaatccagttaggtgaaataaaaacctgacttactactgaaagaatcaggcagactgaagagaggtctgtacttatatgccatgtatctctatccctaactttgttcctttcagtaccttaacgtcagggtgctgatggcatggtgataaaatttgtgagtgacccaagcctgggaggaatttgtggaattaactgattgatttaatcagagtccagataaatcctgactgactggaatggtgaatcatcttttacaaagaagaggcacaatcctatactcagctgcagaaaaatcagtgataaagtgtggaatgagggagaagtgatacaaggacagtgttcgttgatgggaaactcagtgtgaatcaacagtataatgtgggtgccagtatagctagtgtcatgggttctgcagtttgtctccaaaatgagcaagttggtagccctgctcattttcgggctgatgaggctttatctggagttttgtttgattccgagcaccaaaaaatgaagaaatttgaaatcatactacatgaggaattatactatttgaggaatactgtatgaggactggcttattctaaatctttatatttacagtttctagtagactgtacatatggtgaatacacagacctccatctagcaataccaaatggaataatagttatggtgctatcgcatca

SEQ ID NO: 71106 - DNA, 1048 bp, Homo sapiens
acctcatctctaaaacaagcccacaagccattgtgtttttcttttttctttcttttttttttttggacagagtcttgctctgttgcccaggctggaatgcagaggcatgatctcagctcactgcaacctccacctcttgggttcaagcaattctcctgcctcagcttcccgagtagttggaattacaggtgcacgacaccatgcctggctaatttttgtatttttagtaaagacgggggtttcaccatgttggccaggctggtcttgaactcctgacgtcaggtgatctgcctgccttggcctcccaaagtgctgggattacagacatgagccaccatacctggcccatttgtggttttctactggggaagttgagttaaaatgtttcccttccttcctgtttctctatttttctgttcttatttaattatttatgtatttacatttagaatttatataaaatgatatgtagatactttgtatccttgaggaggttaagatgccaagtaatactgtgtcgaaaataatagtctatgattattcttcccacgaacagctagcaggggaaggagagtggcatggggggttgcacgaacccagttctagggagaaagaaagggaagatattgcagaggagactcatgttgggactgtaagagcttaattttggggagacaggtacaaaaggtgctagttgggtaacttttctgggaaagctgctaaagtttctaagttaagattttctgcatttctggaaattatttgtatttcagaggctccaaaaggaagaaaaagaaaacccagaacaacagaaccaaaacaaccagtggaacccaaaaaacctgttgagtcaaaaaaatctggcaagtctgcaaaatcaaaagaaaaacaagaaaaaattacagacacatttaaagtaaaaagaaaagtagaccgttttaatggtgtttcagaagctgaacttctgaccaagactctccccgatattttgaccttcaatctggacattgtcattgtaagatctttgtcctcgttggattttataagt

SEQ ID NO: 71107 - DNA, 1271 bp, Homo sapiens
tatgctggtgccccaaatattctaggaacatcatatgtatctagttcaagctgagctcaacaaatgtacaatatgctctttcattgaaagctgtctgaatttagcatattataaatattgtcatatttatatttttgactactttttaattcaattttagtaaagaatttcgtgaaggaggacgtattctagtacagaaattacagaaatatcagccacgaatagcagtgtttaatggaaaatgtaagatttacttttaaattttttttttctttgctaacattatgggcaatgtaaatatgtttgtatttcattttaggtatttatgaaatttttagtaaagaagtttttggagtaaaggttaagaacttggaatttgggcttcagccccataagattccagacacagaaactgtaagtccctaaaattgaatttgtaaatcagctaaatgtgaatttttttctagataatttccttatttgtcctatccattgtgatttataccatgcaaaacaattacactgtattttgttgaataatacctatacatcagctttaactaatagttgtaaattaattcaaatactattagggtttattagaaagaaaaacatttgtcagctaaatgtcttgatgttgttattcagtgaaaatattgagaggaactggctcatatactacattcagaatacatttaatggcatgtagttgtcaaattcaaatggtttagccctcgtactgttgtgaaacaaacatggaaacacagacatgatcctgattaggaaaaccagttgccccatttatatatcttagctcaacttcattttagagccatataaataatacaacccagacaagcctccagccaacctaactggcattcaatactgttgtcttatacacaaagtcatcatgaaataacagtgtttttcaaattgtcctctctacagagcttctgcaggcatttggttccaattttgcttcttagttttaggttttatttacaacttttaaagaacaacacagtgcacagatttacatgttgtatatacaacatcttaactgatggagaagctaatttgctgccaggtttttgtggaaacctaaaaatgtttctgccacctaaatatatttaaatttctcctttaaaattgtttttgttcataatttcttataaatatgcaattgatgagttttattatagcattggtttttgcttaaataaaggcccacctttgtctgcttggttaaaatggtacaaattcactac

SEQ ID NO: 71108 - DNA, 1050 bp, Homo sapiens
atgcctataatcccagcactttgggaggccgaggcaggcggatcacctgaggttaggagttcgagaccagcctggccaacatggtgaaaccccatctccactaaaaaatacaaaaattagccaggcatggtggcatgcgctgtaatcccagctacgtaggaggctgaggcagaagaatcgcttgaacccaggaggcagctcattaggcggaggctcattatttttcacttcctgacttggtaataagtcagtattacaaattcaaccttaaaagcaactacttttattgatttttacatatatttatatgtagttaagtatcaagttattaacccaaataaagacaaatattctaatctcaatgagtgaattcaatagaattataagatttctgaaattataaaatgttgtgattctagctctgctatgttatgccatcatccagtgcaagatgtgctcagtttcctcgagcccaagacaaagttcattactacataaaactgaaggacttaagagatcagttgaaaggcattgaacgaaatatggacgttcaagaggtgcaatatacatttgacctacagcttgcccaaggtatgttactgtcctcattccttttattcattttgtgtgtgtatatatacacatatatacttacatatatatacacatatacatatatacatatacacatatacatatgtgtgcacatatatgcacacgtgtatatatacatgtgtatatatacatatatacacataagtatgtatgtctatatacatatatgtgtgtatacacttgtgtgcgtatacatatgtgtgtgtctatatatagacacatacacacacacacacacacacacacacacacacacacacacacattacagaaagtatcttatggatttaaaagcaggaaaaaagaaaacaattatattcgcagccagagtgctctgataatgaatattagtcactgttaaaatctccttttaccaaggtcttccctctactctggcacttctgcagataattcacctgcagagtgccagagcag

SEQ ID NO: 71109 - DNA, 1065 bp, Homo sapiens
tgcgtttttctaaacagtttttctgaaatacttacccaggtgccttatgtgccacagggggttaattgtggaatatttcccatgaaacacaatcagcattggggaggtggccacccctcctcccagggagctgctatagaggttttccctaagaaatgaaatagaaaaacaacatttggcctggagcccccacaaactcagataaagtcgaatctgatattgtaaatgatgtaagacattatctcactatgtactaagacttatggcctttcattctcccccaaattttcattttgaaaattgtcaaacatacacaaaatagtaagaataccatgaactcctatatacatcacctagagtaacagtgttaatattttgccattttaactcccagggttttaaatagtagacacaggagatcaaattcgaatcctacattatttagaataactttacttgcaaattcaaggttatgatggtattaaaatatccagatacacaagactgctaggcaatacaatgatgggataatagtgcttgtattagacttatttttatcttctctattttaaaactccgataacgaaaaattataaattataaaaataaaccttaaaaagcaaaattgactttatataataatccttaataaaaaaatctatgttaggaggggaaactcaactaagataaatgaagattgtttggtggaaaagattcaagtcacatttttcaacagcttactaggaaaatgtataatcagggactcctcgctccacaggatcttgattcctctgatttatatcttttgaggaaaggttttaattgactgcccccttttctttcttaacattgcctctgtaagaaaatctgacctgagatgactgtgaaatatttctaacccttgaactatgtgtggaaaattaattgaatgattttgtttccaagcatggaaaaaatggtagagaagccttcacgtactccacattcttttgcatccatttctccaattgcttggtgatgcgctggtgcttccattctgtcatgttggcaacaatcacaccagga

SEQ ID NO: 71110 - DNA, 1058 bp, Homo sapiens
ataacttgatttaaaaataggcaaaggactccggaatctgctaatcccagtcggtgccgcatccccagcccgccgccatggccgcctacaaactggtgctgatccggcacggcgagagcgcatggaacctggagaaccgcttcagcggctggtacgacgccgacctgagcccggcgggccacgaggaggcgaagcgcggcgggcaggcgctacgagatgctggctatgagtttgacatctgcttcacctcagtgcagaagagagcgatccggaccctctggacagtgctagatgccattgatcagatgtggctgccagtggtgaggacttggcgcctcaatgagcggcactatgggggtctaaccggtctcaataaagcagaaactgctgcaaagcattgtgaggcccaggtgaagatctggaggcgctcctatgatgtcccaccacctccgatggagcccgaccatcctttctacagcaacatcagtaaggatcgcaggtatgcagacctcacagaagatcagctaccctcctgtgagagtctgaaggatactattgccagagctctgcccttctggaatgaagaaatagttccccagatcaaggaggggaaacgtgtactgattgcagcccatggcaacagcctccggggcattgtcaagcatctggagggtctctctgaagaggctatcatggagctgaacctgccgactggtattcccattgtctatgaattggacaagaacttgaagcctatcaagcccatgcagtttctgggggatgaggagacggtgcgcaaagccatggaagctgtggctgcccagggcaaggccaagaagtgaaggccggcggggaagatactgtccccaggagcaccctccctgcccatcttgtccctctgcccctcccacctgcacatgtcacactgaccacatctgtagacatcttgagttgtagctgcagatggggaccagtggctcccattttcattttagccattttgtcgcctgcacccactcccttcatacaatctagtcagaatagcagttctagagcac

SEQ ID NO: 71111 - DNA, 1014 bp, Homo sapiens
ctattcaaagtattcttagatttatttttctttttcctagataacatcctagaattattttccgcaaaacaattatgtagctaaactttgaagttttatatgtcctgaaatgttacaatttttgcccttacacttgaataataattttgtaggaaatagatttctacaaaagtcattttgctcaaaacttcaaaacatccatgaaacttagtgccactttctaaagttaaaaagctatgtaggacattgctatgacattatagtgaaaattttaaaagttacaaagcagcatttttagtatgcctcatttatccatatgtgtttatccatagacagaggtgtcttaagggatatttatcaaaatattttcaatagtgattgttctggttatctagtgccatacagtaaactgccccaaaatttaatgatgcagaataataaccatttgattatgttcatggattctgtgggtcaggaattcaaataggccacaggagggatggctgggcagtcagctgagaaggcttgaaggggttacttctatgtctgatgcctcaactgcaacgctgaaggacaaactcagctggttctgtcaccctacatagctgcatatggccacccagatggtagttttatgggagttgaacttcttacatggtggctcaggattccaagagtgagtgttctagttaagccatttaggccttctgtgacccagcctcagaagtcacgtagtgtgctttcaccataccctattaatcaaagcagtcacaaaccagtccagaatcaagggaagggaacatagacccaacttcctgatgggaagattgtcagaggatttgtagctatgttttaacaccaacagttggcaagttgtcattgataagagtgttggctaaatgatgacaggaattatttttaatctcttctgctcactactgagccccagaagagtgcctggtacatagtagtgtttgataagtatgtattgtatgaatgaggtttggggtttct

SEQ ID NO: 71112 - DNA, 1053 bp, Homo sapiens
ttttctattcttagcacttcaaatccaagaagtaaaatgaaataagctactttatgtttttgttttgttgttgctcaggatgtacatttttggtggatgggtcccacataagggggaaaatactgagacttcacctcatgattgtgaatggagatgtaccagttcattttcttacctaaatctgggtgagtcttttaagagttactcattgaattaatctttattaataagataatttttgtaattttgttaagaacaaaagattagtcatggatatttctatcttttcagatacaacagagtggaccaccctagtatcagattctcaggaagataaaaaaaattcaagaccaagaccaagagctggccactgtgctgttgcaatcggcactcgattgtatttttggagtggaagagatggctacaaaaaagcactgaatagtcaagtttgctgcaaggatctttggtatcttgatactggtaggtaagaatatttaacaaataaactttttcctttaggtaagcactcaaatgtctgccttttgagacttactgtaaatgctactacctcttgtttcccataattaagtatgaatggaagaaacaatatgtatagttattctccactcctgagaagtatataattatcctctccttgagtgtaggctggatttaaagactcctttgcaaagaataaagtatggaaagggaaaatagtagctttacagaaacctggcaagcacgagaaacctggcaagcatgagaaacctggcaagcactaccttaatcaagtgatcaaggttaatatcactagtgataagttagtatcatttactccctaatatcatgtgataagtgaaagtacctcggtggtattcccaaatccataacctcagcctaactatgagaaaacatcaacaagcccaaactgagggacattctagatcttctacaaagaatatgtgagcagtactattcagaagtttcaaagtgaaggaaaacaagggaagactaagaaataatcaaaaactggaggagacaaaggagacatta

SEQ ID NO: 71113 - DNA, 1017 bp, Homo sapiens
tttgtttagcctatatcagatacattacagaagctagacaaatgattacaaacataataatgaggtaagttaaaattctactagtgcaaaaagcaagcatatgccaaaagcaaagcatatgaattaaacaaatgcagaatgaagctctcaccaagggcattgctgggataacaaaccagagaagctccttgtaaacattgtaaagtacacatttaaagagtaaagattcatacagccacaaaaaaggtattctaacaacaccatagtagtgcatttattttatctttagagtttggaaaccactcattatgtgtctaacaatttgcatattttcttcaagagaaacttaattagtgagacacattaattacaaatactgtagtataaaaatcccagttctttacaaaaattatatattaaaatattctatacactttaaattagtaactggaacacacatatatatcaattctgcacaattaaatccatctttgctggggggtatcatacatgaaatttgaggacatagctactcagtcaacctaaactggcataaggttatgtggtataaaaaaagatagacctgtgcccctgcagttattgaagctcttagtttgaaatatcttttctgcaattattgctctgtatattaattccagatttaaataggcagtggaaccatgaaattcctaaaaggtttaaaacaagttacctgtagcagagtgtttataatgcctatctgtatctttaaggttgtaatggaacctgagttagctgtctaatgcttatattttcatagtaaaaaagtttatacaatttcaaggtaaaaacaatgcaaaaataaaacatttagagcatttacaaaaatcttacaaatgtttaaaacactattttaaaacttgtgtcctgttaaggtgcttgtttttttctccaataggaggacatatactttaattttgaattcaattatgaagattttaattttagcaaaagcaaaattagagccattaagacaga

SEQ ID NO: 71114 - DNA, 1028 bp, Homo sapiens
ttgtttttaccttgaaattgtataaacttttttactatgaaaatataagcattagacagctaactcaggttccattacaaccttaaagatacagataggcattataaacactctgctacaggtaacttgttttaaaccttttaggaatttcatggttccactgcctatttaaatctggaattaatatacagagcaataattgcagaaaagatatttcaaactaagagcttcaataactgcaggggcacaggtctatctttttttataccacataaccttatgccagtttaggttgactgagtagctatgtcctcaaatttcatgtatgataccccccagcaaagatggatttaattgtgcagaattgatatatatgtgtgttccagttactaatttaaagtgtatagaatattttaatatataatttttgtaaagaactgggatttttatactacagtatttgtaattaatgtgtctcactaattaagtttctcttgaagaaaatatgcaaattgttagacacataatgagtggtttccaaactctaaagataaaataaatgcactactatggtgttgttagaataccttttttgtggctgtatgaatctttactctttaaatgtgtactttacaatgtttacaaggagcttctctggtttgttatcccagcaatgcccttggtgagagcttcattctgcatttgtttaattcatatgctttgcttttggcatatgcttgctttttgcactagtagaattttaacttacctcattattatgtttgtaatcatttgtctagcttctgtaatgtatctgatataggctaaacaaatacttaaccaaagttaaaatacatggtaagcaattttgcacatattaaatattagggtttgttgtgtatatgtgtatacttaattataaaagaatatgaatggaaagttatactaaaagtatatgtttcaagcccagttattttaaagatctattgctttaatagaaaaagtttggcttttaaccctttcttctc

SEQ ID NO: 71115 - DNA, 2706 bp, Homo sapiens
ggccaacatggtgaaaccctgtctctactaaaaatacaaaaattagctgggcgtcatggcgtgtacctgtaatcccctctgcttggaggctgaggcaggagaatcacttgaaccctggaggtggaggttgcagtgagctgagatcacaccactgcactccagcctgggcaatagagtgagactctgtctcaaaaaaaaaattttttttttattatatctattgatatagttaatttcaacatgctattaaggacctgataaagaaggttattaaaattgtgttttctcaatgtagataacagtatatagtgttctcttaatagttaaaaataagcatatgttcatatttgcataggagatttctagaaagatacacaagaaatgggaattagacttgttattgtctttttattcactgaatttttataatatgcatatggtacttttaatctccttttctttaattctgctcaatttaaattttctaatcttagatttctggtgttcagcaaattcagttttcatgatctgaagaaatgatggaatggggagtgtagagaaatgagagtctgtatgattctggaacagagacatcagaaggaaagactggtgaaaagatgtatctttgtatattaatagctgtaatgtagcttcctgatgcttgactaattgaggtgttaattctgacttgagaatctttttcatgaatgattttaaagaaaaatttggattttaaaggtattaaaatatttttgttttgtacgagagtttgttgctctgtatgactcctgtatgcattgtatattgcaatttattactgtcagagatttgtagacagtttcttattttcatattgaatcatgttacttttgtaattcaagtaagcggctgggttaattcatgatgtttgcccttttaataaaatataagggtagagttcattttgaatgcaagttgcctttattataaatttgagtttgtcttggttataccttgcatgataacctagctagatttctagcatttgctgtatttattaaaattattatttttttggtaaaacattaatagtttaagcagcatcatttttttaaaaaatgtaattgaataagtgtgaatgcagaagcaaatattgtctgccctgttaaacttggtgcccattaacagtgtttacactgttcatcgtgcctgttaatgtagttttagttactggagcttttttaagactagatttggttttgagttacatttttaagaatgtgggaatatatttaagtttaatgtagtcctagtgctcttgaaatggtgcccctttcatttggtacatgattttttttcaaatcatatcttcaagtactatagtattctcttacagaagaggagttttatagtctgatggtaaatgtcttcattttacctttttaattgaaatgtcaagtttcctgttacactatggaaaccaagaaacatcagacatcattgcgtgtacagaccttttgcatgggtgagtggatgaaatggagaacagagtgagtgctgtgaacggtgtgaaatagaagccaacttctagtatgctgtcttcatctctgcaataaactaaacgtaaataatgtaactttgtataatttagtagtatgtacttggattgtttctttttgaaaagtgaggatttgtattttctcatctattctttttggtgttaattaacttgagggatttcttttttaagtttttaatatcaaaaattgctattgtatagtttgcctaaaaggaagttggagtgaatatcatctttgaaggacactcaaatttataaggtagaagcaatttcccagatataggctgaacagaaacatttactttgccagaaggagcctttaggagtatatgtgggctaatcagaggttaataatgtcctcatctcctactctccatttaaaaaacaaacttcattgtagtaaattcaaataggaaaaaatgggggagtagttaagcaaaatcaacagtcatcctactatgttgaaagaaccaatgttaatattttgataaatatcatttgtccttttactttgctaaatatgtatatttttataaaaatgggctcatattgtgcataccattttgtaacctgcttttttcacttaacaatatattgggaacatcttttccaggtcatgcatagtcttctgcatcatttttattggtttattattctgctgtatgactcaatcataattcatttaatcttctattggatattttgactatttacatcttttcacagttataaacagcacttcactgaatcccatgtacatccatgactgttttcttaaattctttgaattgctgggttaccaaatatgcaaaattttaaggcttttgatacttcgttatgagtgtatttttgagatattttccacttgatccaagcagtgtgtcactatataactgataaaagcacttggtctttgattatcagatactgtctctaaaattattttaaagattaatatttgttcaagtagagaatgaagataaaaaaggaatttgaggccaggtatggggtgtctcatgcctataattccagcactttgggaggccaaggcaggcagatcactttgaggtcaggagtttgagaccagcctggccaacatggagaaccccccgtctctacaaaaaatacaaaattagcagggtgtggtg

SEQ ID NO: 71116 - DNA, 1012 bp, Homo sapiens
ctttaaaagttttatatagacttttacataaatgagtttatataaacttgggtttggagaaacatacaacctcttaatctagcagtattgaaggagccataggttacggtctgtaagttttatagctaagtcgtataataaatatttatgagtacctactctgtggaaggtgctgtaccaagctgtaggaaacacaaagctgattcgtgacattaagtagcaaaaatctaataggagaaatgaggaataataaaaattctaaaaatgtgtaagagaaaaggcatagagaagcacttacattttatgaaagaaaagatcatttttgaaggtggtatggagatgttatttgagatttttggagaatgggcaagtaggattttagcaggtatatttgaggataaaaagtgttctaggcagtgagtctgaaattaataaaaaaaaagttcagttctggctctgtaaaaattatgaagagacttgctatcctaatccctaaataatggttaagaggtgaaccagaatgattttattctggatcactttggtagttttttctatcttgaaatagaaataataagaagctttacacctaaatatttttatttctttagatactgaggacagcatgaatgatcatgaagacacaaatggttcaaaagaaagtttcagagaacaagatatatatcttccaatagcaaacgtggctaggataatgaaaaatgccatacctcaaacgggaaaggtaacgtagaggagaaatttaactaggttttttcaagggaaacacgaaactacatgaattcataggtcatgggtacagttagctgttgatttcaatcattcaggctttcagcaaatcaaatatttctttcatgtctacatacacagttactgaacagtgtcccattttcaattctgtcatgtccctaaatgttctcctctctcccacttattggaggcagataaaatagaatttagactgttttttttttttttttttttttttggggac

SEQ ID NO: 71117 - DNA, 1016 bp, Homo sapiens
atgctgtctttacatggattagctcctaacctgtacaggagcctgggaggttaagtcttgttctcatccagtttgttcacggtctcatggtaagtggcagggaattcaaactaggtgattcgattccagagcctgtgtcctggaaggactaataggctctgttctctaccccttcaccctgcctcccaggttatgtaacatttgtcctgcaagctgaggacagagaccttgtctgttgttgacagctacgtgaccagcacatagcatgaacctggtaaatactaagcgctcactcagtaaatatttgttggctggcttactgacaatctacagtctgttttataagtttttataggatgttttagacctagaaaaaacctttgggatgcatctagcaagtttttttccatcattcttatatataggcgaatggctggcatattctaagcatcaaagattaggttgacttattgagtgaaaggtactaagtgccatagagctttaaagaacagaacatttgtttttgaattgcagaaaggataaatcagaaagattaaaggaggatagagaacactgggattaaagtctggggcaggattttaatggtagaaagacagaggaaaggaagacagaaggcgtgaaatgatagaaagctaaaacttgcagaactgaagacacatacagttaagcagatgatgtgcggcttctcttcaaaggagggaggatgagatcgaatgtctgtggggtacactacgtgccaaacactgtctttagcagctttctagtctttatttaattctgacaactctaggaaatacttttatcttcacttttagaagactgaggtttagcgaggctaatgctgttagtccaaatgataatcatgttgctaattccagtgcatgacaagataatatgatttaaacttttttcctttaatacttttgtttgtgttatatttctaaattaattcatctcccagatccgcctggttatttgaacagtgtcttgctcat

SEQ ID NO: 71118 - DNA, 1386 bp, Homo sapiens
acagagggatcctgcagaccttgaactgagccttgaaatagagggtgggagtggattggtgaagggtgtcaccaaaagcaaaagcctgatggcaggatgggcaacttaagtttaggggatcgggagtagaggtgcatggtccagggtagatctcaaaggataatgtaggaaagagaaagcacttgtcccctctggatatttaattctggatgtgctactatatctgtaacctcgggtgtgttacagcttctttgagctgtggtcgcttcactcctaaaatgaaagaagtgcactcagtgatccctaaataaagcacattctagcacaaagatttttattaaccatgaagatagagaaaagtaggaaacaagtttggttaggttaaatgtgcgatctgctcatgtgaagtcatgaaaatgaggtttggatttgacacaggaagcctttaggaacctttgagaataggttcaagagtatagaactggtgttgtggtgagattagtcttataacaatatgttaagatgggctgggtggtaatccagtggaaataggaaagggaaagcatatctaggagacatttttaaagaggtaatagatgaggtagagcttgaaggagatggaagaacctaagatgatgctggtatatttggctgggcagagtgaagggctggtattcttcttagtagaattacagtagtggaaagggaaatctccctcctttccccgttgcagggaatggggcaaggtgaatttcatttcccaatatcttaaatttgccgtgatgagatattagacatgccctacaggcatgggttgcttgagtggcaagcagaatattggttgtagatttggcatttataagcatagaagtgatatttagtgagttcattaagaaaataagggaagaaagagaaggataaccttgggtgaaacaattagggggtggggaggaaaggatattgctttggaaatcagagtaggagagaattccaagcataaatgtgtggcgagtagtagccagcactacaaagaacagtcaagtaggatgaggacaagatcactggcagcttttaagagtggtttcattctgggttggggttaaaaagtacatgttcaggagtttaaataggaatgaagaggtgtcttaacaactgtcagggcaagaatggtagctaggcaagggtatggggcagaattaagattttatatatctctgtgtacttctgtatgcttaatgagggagactaagcatgtttaaggaagagtgaaggagctggtaaggaggattgaagatacattatagaagaggaatctttgtattatttcttatcctcagatagataaaaggaatgtaacccagaaaacaggtaaaagggtaaattaag

SEQ ID NO: 71119 - DNA, 1053 bp, Homo sapiens
tttaaaattaacactgaaaggatgtgtttttgttttggcatcctacccctcccccatttaattgtttcctttgagaaagaatggagcaaatgagaaatgaaacttgtaacacagcaattggtactaatttgttcagctatttatgccttacagtgagactgaagtgctatttcgatgcaattttagtcaaaaatggtggtgcttcaaaattataaataagggtcttgattgtgttgcttttttgatatcttctcagtgcagaatgtatcttcattacagtataatctgagattcttaattgaaaagcattatattctcagataattttttcctcctcttgagctatagaatgtctaaatgttactctgaaacatttaagaaaaccatcaccaaaaaattaagatgataaggggtgtgtttgcatcttgagtgttaatgttttaagtaatttagatgtataatttttggtctcttgcatattatataatttggtccctttttggtgtattgtaatgaatgtttatgatgaatatggctaaattcagggttatgttggaaaatccattttctcctttccccatggaattaacttgtttttaagttctccaaaataaatctttcaagtcaacaaacatttattgggtgcctttttatactattttataccatgtactccattgattaagaatagtagtcaaaattatacaagccctctttaattttatgagaaaaaaagcctataagtgatacatttgatgtatttttactattgatagatgttaggtcctaatagatgtttatcttttaggttgaaatcacaaagattagacacctttttagataggtgttcttcagcaccactgacaacacggttctgacagtatttcatgacagtaagtatattttaccattttggttgttaattagatttgaatagtaattggctggaaataaaattgtaaccaatttatactggaggtgcctggtagaatgaatgcatttcaagtctagacagacagtacctctgctcattcctgttgcttccttattttc

SEQ ID NO: 71120 - DNA, 1081 bp, Homo sapiens
aggcacctgcgtggggaggaaggcatggctttagcttccccgcagcctggtttgcgcgtaaagaatgcagccatctggcggtttgcggtccctgtacttgccccgaaggtgggaaggaagcccttcggattggactaaggttttaatcattagtggtgggaggcgggaggatatgcagggccttaaagaacggtagtcttagagaacaaagaattacagagcacccacaaatcgtaatctcgcccaaagcactctaacaggataatttaaacaaggttaggtagcctgcgacctttaaaaaaatggcatcccactaacccgcatggaccccatagttgcgtggttcgtgctacaaatcactggggtggtttcatctctcttagtatggaaactaatcagcaacataaagtgatgaaagcaaacggatcaatatcagtggcactaatcagtggggggtttatttgtaaagtattgaaagtttaaccaaaattccttaaaaggcaaattattccttccctgcattgctcttgtatcttaatttaaggattactgtatattgatgcaaaactctggttgttgatgccaaagaatggagggtggaggaagggactactgcttttcttggatacaaatttgcatttcttaaaacattaaacagatgtatgcattcccttgagcttttacatatatcaacctgcccttaagaaaatatacaccatatgaggtgacagtgtttttctttaatgtactgagtctaaatatatactgaatcaactatttgggtgagtgagtgtggtgtggtatgactccctgcccacacccccctctcccattccaagcaaaatacataaatatagctcccatgttttaagtgttctgagggcttattttttcaaagacactctttaaaaaataacatttctcgttacaaggaaggacttttctgagcagttttggggttagaggatactattaatatttgaaaagaaattataaattacttttaatattatagcaaacgtcaagcagtttttgctacctggacctttttagtggcattaaaaactttcaattcagtggc

SEQ ID NO: 71121 - DNA, 1054 bp, Homo sapiens
actaaaagtaaaaaaattagctgggtgtagtggtgcgcacctgtaatcccatccactcgggaggctgaggcaggagaatcgcttgaacctggaaggtggagactgaagtgagccaagatcgcaccactgcaccccatcctgggggacagagcaaggctctgtctgaaaagaaaagaaaaggaaaaaaagaaaaggaaaacgttctagttattttaactttctggttgtttgaattttgcactgaaatttagactttagggccatttccctagatctaatttccctaatattcaaactttttgcttgagtcacacacaaactgtgttacattttaaaagtgattgtaatactcagtcacctatttgtaagaccatctgtggtctagtcactcaaaacaaccaaatatgcagacaacataaagatgaaatgaatgttggtttcttttattgtagttgtgatggatgggaaggtggcctccaaaccacctgtggtgggtcactggaagacaaacctgaagggtttgttgcacctaatgcagtccagtcaggatcagtctgtgcctcaaaaggtgcctgaacgggcaccactgaaatcctaggcaagcagagtacgaagccaggctctttttttctcctttttttgagacgaagtctcactctgttgcccaggctggagtatagtggcatgatctcggctcattgcaacctccacctcctgggttcaagtgattctcttgcctcagccttctgagtacctgggattacagacacgtgccaccattcctggctaatttttgtatttttagtagagacagggtttcaccatgttgtccaagctggtctccaactcctggtctcaagcgatccatccacctctgcctctcaaagtgctggaatttcagacattagccaccacacccagccccgggaagccaggattttgccaggctttttttttttttttatcatacagacctaaattggagtcttacttcttgcattcattagcttgtgattttgagtaagttactgaacttctttgaggttccatcttc

SEQ ID NO: 71122 - DNA, 1053 bp, Homo sapiens
ggggaaaaataagcaaatgataaacataaacaaaattttattttccttttttgttagaggcagaatttaaggaaaaattctgatgattttgattacagttagtggctaacctcttatgatttatttacctatctatttatctttccatctatttgtacatttttttgtttgtttgtttttttggtaaacagtctctccccagtaagaatgcagttcttcttaatcacagaagttattcctttccttgtaatggccttctctgttctgtgtcttggcaaatatctgagcctaatagttgggtggtgcccttggcatagatgttatgtaaggaattgtcacctgcttttagagtcagtcatcccatgaaatcgaaggagtcagtaaggcgttatggaatcaggaggcttgtgtgacagctctgacgctgataccaattaatgacctgactggacctcagtttcctcatcagtggaatgaacacagttggcctagtgaccccagatgtctctcccaagctaacattctgtgattctcattctctgaaatgttaccacgaggaatgtttacttatacgttactttttaaaataagaaaaatggagaacagaaaatgagaactagagtttaattttaaaattttgaagtgtcatggatgaggctatcgtcatgtgtcatgttgctttagtccaatagttcttaattaacagtatgcattagaactaccagtgaacatttaaagtatatgcatatatgtgtgtgaacatatatgaatatatacacacataaatatgtttgtttatttatttatttacttatttatttattggagacagagtctcactctgttgcccaggctggagtgcagtggtgcgatcttggctcactgcaacctccacctcctgggttcaagcagttctcctgcctcaacctcccaagtagctgggattacaggcgcgtgccacaacacccagctaattttcgtattttaagtagagatggggtttcaccatgttggtcgggctggtctcaaactcctaacctcaggtgatccaac

SEQ ID NO: 71123 - DNA, 1630 bp, Homo sapiens
agggaaggttctgattatggcttgttggcaggatcccctgagaacatatcttgactgtgatctgagttaggaatattgaataatatgtcagaggttccagtcagatgaaagaagtaaatctataatcttcattagagtccttccttcctcagattccttattttggcctgtgggacttaaatggtaatgcttttagagtgaacctaatattagaaaatgcatcatcatgttttcctttgtgataattaccatccttacttccattacttctagctaaagatcatcaccctggtaaaactttgccagagaacccagcaggattcaccagcacggccactgcagactccagagccctgcttcaggcctatatagatggtcactctgtggtcatcttcagtaggtccacatgcacacgctgtactgaggtaaggctttaaactcaaggggtttaaatggaattgaaggaatttgacagacttttgagctcaaatgtaaacaactggattttacctttaggaagagtgtatgtaggctgggcgcggtggctcacacctgtaatcccagcactttgggaggccaaggtgagtggatcacaaggtcaagagatcaagaccatcctggccaacatgatgaaaccccatctctactaaaaatacaaaaattagcccaacgtggtgtcatgtgcctgtagtcgcagctactcgggaggctgagacaggagaatcacttgaacccaggaggcagaggttgcagtgagccgagatagtgccactgcactccagcttgggggacagagtcagactccatctcaaaaaaaaaaaaaaaaaaaggaaaagtatatgtaggtgtaacttgcttcagagtaattgtaaaatgtggatttgataacaaaatattgtttgaataatctttctgagcttttgggaagtatgagacatattcaggtagtcgaggtcagggaaggttagggtgggggagttaccaaaccggttgatttgcggccctttcagatatgtctgtagggaatatttcataaggaatggttacttagggtactaccaaattttgataaatatctcttcatgctttggtttattatggggaaaataacttcacaaagaataaactgtttcctacttggttcttaatcttagattatcagagagaaaaggtcagtggttacagccaaggggaggattagtttagtccaccctgaataaaccagggtggacttaaccattaacgaaggtgagaattgaaaggcaaacctgatctgtctggtgcttcataggaaggctgagggcatttaaatgtcactgaagtttagctctaggcctacacaatggagtcttaggtaaatataactggccatctgtccaggttcactgagaggttaatttattattttttatatatatatatatatatatatatatattttttttttttttttttttttttttttttgagacggagtctcgctctgttgccaaggctggagtgcagtggcgcgatctcagctcactgcaagctccgtctcccgggttcatgccattttcctgcctcagcctcctgagtagctgggactacaggtgcccgccaccacaccccgctaattttttgtattttt

SEQ ID NO: 71124 - DNA, 1937 bp, Homo sapiens
aatgtttttctttgtacgtgaagtttttgctgtatttagaattattttcttaggatagattactggaatggatttatgggtcagagtatgaacaattctaaggttctagagccctttaaatggtgtgtactaattaataacttcataagctcaaagagttccctgtacttagtagtaagaaataataataggttttgggccaggtgcagtggctcctgcctgtaattccagtgttttgggaggctgaggcaggcagatcatgaggtcaagagatcaatactagcctggccaacatggtgaaaccccgtctctactaaaaatacaaaaattagctgggcgtggtggcatgcgcctgtagtcccaactacttgggaggctgaggcaggagaatcgcttgaacccgggaggtggaggttgcagtgagctgagatcacaccactgcactccagcctggtgacagagtgagactccgtcttaaaaaaaaaaaaaaaaaaacttccttttgcgggtggcggcgaacgcggagagcacgccatgaaggcctcgggcacgctacgagagtacaaggtagtgggtcgctgcctgcccacccccaaatgccacacgccgcccctctaccgcatgcgaatctttgcgcctaatcatgtcgtcgccaagtcccgcttctggtactttgtatctcagttaaagaagatgaagaagtcttcaggggagattgtctactgtgggcaggtgtttgagaagtcccccctgcgggtgaagaacttcaggatctggctgcgctatgactcccggagcggcacccacaacatgtaccgggaataccgggacctgaccaccgcaggcgctgtcacccagtgctaccgagacatgggtgcccggcaccgcgcccgagcccactccattcagatcatgaaggtggaggagatcgcggccagcaagtgccgccggccggctgtcaagcagttccacgactccaagatcaagttcccgctgccccaccgggtcctgcgccgtcagcacaagccacgcttcaccaccaagaggcccaacaccttcttctaggtgcagggccctcgtccgggtgtgccccaaataaactcaggaacgccccggtggaaaaaaaaaaaaaaaaaaagtgatctggctggacaaactgagccagtcccacacaaaatcttaaaaaaaaaaaaagaaaagaaataataataggtttttaaaaatcattatttgcctattggagaggtaaaaacagatttctttatcttaatttgtatcactttgattattaatgaggcacaatattttttcctgtatgttgtatttcctatgtgtaccttgctgggctcaggtggtcctcccaccttagccttccaagtagctgggactatctaaattgtagtcactgtgttgtatttcattatctgaattgcctgttcattttcctcatgggataataatactaggaagagccccggtgcggtggcttacgcctgtaatcccagtactttgggaggctaaggtgagtggatcacgaggtggggagatcgagaccatcctggccaacatggtaaaaccctgtctctactaagaatacaaaaattagctgggcatggtgacgcatgcttgtagtcctacctactagggaggctgaggtaggagaatcgcttgaacccgggaggtggaggttgcagtgagttgagatcacgccactgcactccagtctggtgacagagcgagaattcatctcaaaaaaaaaaaaaaaaaaaattagttggctgggcgtggcggctcacgactgtaatcccagcactttgtgaggccgaggcaagcggatcacaaggtcaggagatcaagaccatcctggctaacacggtgaaaccctgtctctactaaaaatacaacagggccgggcgcggtggctcacgcctgtactc

SEQ ID NO: 71125 - DNA, 1212 bp, Homo sapiens
tccccacctcgtgatccactcaccttagcctcccaaagtactgggattacaggcgtaagccaccgcaccggggctcttcctagtattattatcccatgaggaaaatgaacaggcaattcagataatgaaatacaacacagtgactacaatttagatagtcccagctacttggaaggctaaggtgggaggaccacctgagcccagcaaggtacacataggaaatacaacatacaggaaaaaatattgtgcctcattaataatcaaagtgatacaaattaagataaagaaatctgtttttacctctccaataggcaaataatgatttttaaaaacctattattatttcttttctttttttttttttaagattttgtgtgggactggctcagtttgtccagccagatcactttttttttttttttttttccaccggggcgttcctgagtttatttggggcacacccggacgagggccctgcacctagaagaaggtgttgggcctcttggtggtgaagcgtggcttgtgctgacggcgcaggacccggtggggcagcgggaacttgatcttggagtcgtggaactgcttgacagccggccggcggcacttgctggccgcgatctcctccaccttcatgatctgaatggagtgggctcgggcgcggtgccgggcacccatgtctcggtagcactgggtgacagcgcctgcggtggtcaggtcccggtattcccggtacatgttgtgggtgccgctccgggagtcatagcgcagccagatcctgaagttcttcacccgcaggggggacttctcaaacacctgcccacagtagacaatctcccctgaagacttcttcatcttctttaactgagatacaaagtaccagaagcgggacttggcgacgacatgattaggcgcaaagattcgcatgcggtagaggggcggcgtgtggcatttgggggtgggcaggcagcgacccactaccttgtactctcgtagcgtgcccgaggccttcatggcgtgctctccgcgttcgccgccacccgcaaaaggaagtttttttttttttttttttaagacggagtctcactctgtcaccaggctggagtgcagtggtgtgatctcagctcactgcaacctccacctcccgggttcaagcgattctcctgcctcagcctcccaagtagttgggactacaggcgcatgccaccacgccca

SEQ ID NO: 71126 - DNA, 1612 bp, Homo sapiens
agtctaatttcttcagtaaaaacacacttattccaaatttggttccagaattgccttaaattgtttttgctctgttcttaggttgggggcggctatgagcaggcagaggatgtggtgtcacccaattaggagctctcagcttacgaggcaattagcataggttgccagggctgcacgaggagtggatttctgctttgtcattctgactctggcagttagcccgcccgctcggcgcagggcgtggcttctcgtagccattaggaaacagcaaccctttcacctcagttttcttcactccggcatttgcagcagagcgaaaggtggtcgagtcctgaaggagggcctgatgtcttcatcattctcaaattcttgtaagctctgcgtcgggtgaaaccagacaaagccgcgagcccagggatgggagcacgcgggggacggcctgccggcggggacgacagcattgcgcctgggtgcagcagtgtgcgtctcggggaagggaagatattttaaggcgtgtctgagcagacggggaggcttttccaaacccaggcagcttcgtggcgtgtgcggtttcgacccggtcacacaaagcttcagcatgtcatgtggtaggtgaggccggcgcctgtaggctggcggtttccttcctcttggtctttgtagagacagtttgcagaacagcggagaaaatgggtattgtatcgtttcttacagagtccgagtcttgaaatgtagatgacaatgtgttgagtggactgacagatccttgagaatattaagaaagtataactatgtaagaatgcttctctaggaattttcacaccatttaatcctcagaaatcctgagacgttggcaaaacacatggggtctccatgtttttacaagtagggaaagcaaggctcagaaagatcaagtggcgtgcccagctggacacagactattaaatggggcggcgacgacgaccccagggcttcctcactctctcaggcagtacaggacagtgattaaacgcgtcgaccacattgcctgggtttgaatcctgccgctgcttttgagtagctccttgagcttggacaagtttcttagcttttctgtacctgtttccctgtctgtaagttgggcctggtaatacttacttgtagagtggttgtgaagttgaaatgtaaatatatgtgaagcagtatagacatgttagctactattattacaattaagcagctatactttgttttttgttttttgttggttttttttgtttgtttgttttttgagacggagtctcattctgtcgcccaggctggagtgcagtggcacgatctgggctcactgcaaccttcgccccctgggttcaagcgattctcctgcctcagcctcctgagtagctgggattacaggcacctgccaccgcgcccgactaatttttgtatttttagtagagacagggtttcaccatcttggccaggctggtcttgaactcctgacctcatgatccacccgcctcggcctcccaaataagcagctatacttttgaatgttggcgtgatttatgtctaatgaataggcctcatgtcagtgtaactgtggaatctgtatgttccactgagttcaccc

SEQ ID NO: 71127 - DNA, 1214 bp, Homo sapiens
cagctagccttgaggccatgttttcagccagtgtgcggatttgccggggtcagactccaagcttgattgtgagttctagcctttgtcagaaatgcagcaagtcatgctaacttgcaagggagtcaacagagggcacgcggtgcctgcggggccgggacggaagccccgcccccggcgcagttcccgcctgttagcgggggagaagcaccttacacgctccgctctgcttttgtgccacacagaggacggtcgggccctggaaggaacgctctcggaattggccgcggaaaccgatctgcccgttgtgtttgtgaaacagagaaagataggcggccatggtccaaccttgaaggtaggagagagtaacgtatctttttaaacgggggatgagctcgttgagctcagcgtggtcacagcctgccttttaaagccagcgtggatgtgaccctccaaacgggacgcagcgctgggaaatgacgaaaaacgctcgtgggctagcgcatgtgttaatcgaagttgatgagacgttggacaaatttcacatctcgggaaacttgaaatttctaacgctttttatcttttaaaatagctttttaaaaatgtcctttttctcctatttccccttcctctttccctcccagttgtaaataacattttttagcagcaatgtaatctgctaaatgttagttgtttagggaagtcctgagaaaaggggatcaggaaatgcttatctttgtcatcaaggtggccctgtaatcttcctcttaattctctcaggggtaggggacccggaaaccccagggtctggaggagagcaaccaggaagctcttggggtgacttcgttttccttcaggtgtgtctttttagcccagagttaatagttgggtgaagggaaaggaagaagtcttccctttggctggtagcaaacgcagtagaaatccttccttagacctatgctactgaggagttatagccactgagggatttatagcctacagtgttagaaaaatgcttggaggctgggtgtatgtatgttttatttatgtatttaaaaaaaaaaaacagtcttgctctgtcacccagagtgcactggagtgcagtggcgtgatcttgtatcactgcaacctccacctcctgggttcaagcaattctcctgcctcagcctcccgagtagctgagattacaggtgcccgccactacacccagcttcacc

SEQ ID NO: 71128 - DNA, 1172 bp, Homo sapiens
taatcccttctttttggaggcattagtaatgtatctgcttttggcttgattaaagttgaggcctgaggaggactggaggattgctttgaagatgagggaagtgacagattctctggcgtacattaaaaggaagtaagggttgaggactaccaagatttattagagtcttagactgttagaactgcaaataaacgtagaaatttactggttgtagagtcgtgttgagctcctcctacttctaccaggtgtaaacacaaatctctttttttgctgtgtatctgttctttaatagtagcgtcaaaattctggtggtatagacttcagatttccggtcacttctcctgtttactcaccagcgcctgactattctaggcatcaccttcttgcccctatttacttttgcctggaccatttcatcagtctttaactggcctcccacttctgatctcccttctcttccagctcatattgccagtcatcttcctgattgctactcgctggccccagatctgcatccagaacgaaatgggagctccttagcttggtattcaatgccctccagggtctagccccaacctgcttttctggttatctcctgctctgctccctcacttactggaggctcccgggactatcattgcagctaaaatatttctccctacagttttcctcctcacttctattctttatttcaacacctgtcttctcttcctaccacaacccacttttccaactgcctacccgttcagaatacaagaccaaagttttccattcctttcctcctctgttcccacgacaatcccataagtctttatttttggaaaaggaggaatcctgccaatgataactttttggcttacatatcgaggtcagagagctagtcttattctttatgcctgtggtcccaggcatatgttagagcccagcagatacctaagcaaatatgcctgttaatgattataacatttatttgttgaatacctattatgtgttagactctaaatgttgttaatacttagtgattaaatccccacaacagtcctgtgaaggaggtgatattatccaggtttacagaagagaaaataaaagccttgagaatttaaggagcatgcccagattacaagctagttaagtggcagagtcaggactagaacccaggcctgtttgcctgc

SEQ ID NO: 71129 - DNA, 1051 bp, Homo sapiens
tcattcattacatgcttgctgaatggaacttcattcttctgtgcctacttgtactttctttaagagaacaatgaggctgggcttctaaaaaaaaatatacattttaatatcttccatatattgaaaaaaatttctttagaggcaaggtcttgctctaacccaggctggagtgcggtggcactatcatggctcgctgcagcctcaacccccctgggctcaagcaatcctcttgcctcagccgcctgagtatctgggaatacaggcatgtaccaccacacctggccaatttttaaattttttgtaagataaggtctttacaaaaggctttttgttggcttaggcttattttttaatacctagtgtgcattcagtaaatatgtattgagtgaatagatcgtggtagggccagaagagactcacttaaaggatttagctctaaggtatctggttttattgaagatgggctatcaggaaccaagctctaggttgttcagaagagattctaggcagcatattggaaagcagttcagaattaaaagctgtatgacagcaacattgtctgccttcagcattctatgcaggtgtgtccaggtcagttgggaacaaagtcacttcacatctatttagctagtatttactgagcacctgtgttgacatcgggctaggcactatctttgtaatctctaacgcaagtctgtagagcaatgtacttatttaaaaattcatttgtcaggctgggtgtggtggctcatgcctgtaatcccagcactttgagaggccgaggcgggtggatcacttgaggtcaggagtttgagactgacctggccaacatggtgaaaccccttccctactaaaaatacaaaaaattagccgggtgtgttggcgggcgcctgtaatcccagctactcaggaggctgaggcaggagaatcgcttgaacctgggaggtggaggttgcggtgagcggagatcctgccattgcactccagcctgggcaacaagagtgaaactccatctcaaaaaaaaaaaaaaaaagtaatatacaaacacttg

SEQ ID NO: 71130 - DNA, 2391 bp, Homo sapiens
gccgggccggggcggggctgtcttcccgcggagcgtgctgggggcgggtcgcgccgggccgggccgctagtgcgcatgggcgggcgtcctcggctctaactgccgccactttccacacgctgggagggccgttacctcagagatacccgtggccggcatgttggttgaaaaagcttcccggaagggagacgaagagaaaggagaggagcagctcgtgatcatccccggtagcgagtacgcggcgaagtaggcggcggcggagggagcgctgatgaagatggatgtgtcagtgagggccgcgggctgctccgacgacctcagctctggggaggccgacgtagacccaaagctcctggagctcaccgctgacgaggagaagtgccgcagcatccgcaggcagtaccggcagctcatgtactgcgtgcggcagaaccgggaggacatcgtgagctcggcgaacaactccttaaccgaggctctggaggaagccaacgtcctctttgatggcgtgagccgaaccagagaagcagccctcgacgcccggtttcttgttatggcttctgatttgggtaaagaaaaggcaaagcagttaaactcagatatgaacttctttaatcagttagcattttgtgactttctgtttctgttcgtgggtctgaattggatggaaggcgatcctgacaagttgagtgattgtgatgatagcatagctctttccttctggaaggcaatagaaaaggaagcaacatcctggatggtaaaagctgagacattccattttgtttttggttcattcaagctagaacgttctgcaccaaagccccgacttgaacaccagaaaaaagttcgcaagatggaagaaaatggcaacatgcctacaaagttgcagaagttggacctgagtagttatccagaagcgacagaaaaaaacgtagaaaggattttgggattgttgcaaacctactttcgaaagtatcctgatactcctgtgtcctattttgagtttgtgattgatccaaactctttttctcgtactgtggagaatatattttatgtttcttttattgtaagagatggttttgcaagaataaggcttgatgaagacaggctgccaatattagagccgatgaatgttaaccaaatgggtgagggaaatgattccagttgccatggcaggaaacagggagttatatctttgactttacaggagtggaaaaacattgtggcagcttttgaaatttctgaggctatgattacatactcctcatactaaagatttcttagtatagcatcctttttgtgttttttttctgaagttagatggagagtaaaatgtaaactgaagcacatattgtatctcttgtaaagtgaaaaagtattttcaagaacatcagacattgttttactgtgcagcatatttttcttagtaatttataaggtcatgatcttctgttattaaaacaaattcactggcatatttatgggaacgttttattgaatgccctttaagactattaataaaaacaagttttggataccaaattaagggatatttgataatttgcaaaacataataatttacgaaaatcagtgatgatgctctgtgatgcgttgctttctctgtcatagggaaccaagagaatcccagaaagggttcctaaccaggttgggcaaagagtgggtaaaaaacaaaagttaaaaaaaaaaacctgtctgtaaggcagtgaatatgcaacattaagactaaaaaagtcattgcaaggaagacttaggatttatgagtgagtatccatattctaaacaatttctgttattgtactcagcaaaagtagtgtctctgctgtagtagttgaggtatcagctaagggtgaaaggtgagtagaaacacgaagaaggaaaaggcattctaggcaagagaatagcaaggtcaaatgcatggaattgttagaagttaggcacgagaggaccattagatttatggaaaaactattatatttgataagctgggcaacaattgaataacttcatctattaatatcctgagaagatgtttttgtcaaactattatacattgaacacaagatcttgctatccagttgtagtttttatctactgaatttcttctctggcccctagtgtccctttgtggtctttgctagtacatagaatgtccttcacaatctacgctttttcatcatgtaacaactttgaatatttgtcccactttaattttgcatttctatctttttttttccccctcgagacagagtatcactcttgcccaggctggggtgcagtggtgcaatctcggcccactgcaacctctgcctgcggggttcaggcgattcttgtgcctcagcctcccaagtagccgggattacaggtgtgtgc

SEQ ID NO: 71131 - DNA, 1001 bp, Homo sapiens
aattttaaaaacaatgtttctttttttttttttttttgagacggagtcttgctctgtcacccaggctggagtgcagtgccatgatcttggctcactgcaatctccgcctcctgggttcaagcagttctcctgcctcagcctcccgaatagctgggactacaggtgcacgcctccacgcccggctaattttttttgtattttggtagagacggggtttcaccgtgttgcccaggctgattgtgaactcctgagctcaggcagccctcccgcttcggcctcccaaagtgctgggattacaggcatgagccacctcactcagtctcataatgtttcattctaaggtcaactgaatgcttcaattgcctgtgtcttgccaattggtaaattttacctacagtgcttaaaaatggtgaggttcattcagagcttttttggtaaaatctgtgcactggttgatacaatttgacttgaagcttgaaccaggagaagccaggttacatacagaatttcagtaaggaacggattgtaaacattggtgaagggaatatgtgacttttcagcatgaggatacattttctggtatttgttctagtaggtatgttggaggagggggattcctagaaccatggttttcatttagacagccagttattgtgttctgtcaccatctttgctaatttcatgcagataaaatgaggttgagataaaaaatgattgtatgttatttttccagcagaacatctaactggatttattagttaactcttaaaccaggaagtcatgctctttgagacccagtagggagtcacactagttacttgaagcataattgatcctttgatcgaatggctattattaccaaattgtttttcccccacagtgctttgtattgaaggaggaaccttggccataatgccagttgatgactactggctgtgtttaccagcctcttgtgctagaccttttgtgcagactgtcagagtggtgcagtcttgccccca

SEQ ID NO: 71132 - DNA, 1595 bp, Homo sapiens
tcctccttcacattgctccaccgcacccccttccacatcccaagaaccttcttcttccgctgaccccaagctctgcctttcaccccctacatctgatagtaggcaagagagaaatgtgcagtttgggctggtaagtttgggggcttttttttgttattaaagttaaggctttttgtttgtttgttttttaaaatgagatggagtctcactctgtgagactcccaggctggagtgcagtggcgcaatcttggctcactgcaacgtctgcctcccgggttcaagcgcttctcctgcctcagcctccggagtagctgagattacaggcacccgccactacacctggctaatttttgtatttttagtagagacagggttcaccccgttggccaggctgatctcaaactcctgacttcaagtgatcctcccgccttggcctcccgaagtgctgggattacaggcgtgagccactgtgcctggcctacttgattttttgaaaacattttattgtgcttgttaacaactttctcagtcattatctcttgttaacatagatttttattttagtaagcgataatattaaatatatcaccaaaatattgtatgaaacgaatatgaaatataattaatgtgtatcagaattatattagtggaatgaaatgattttttaaaaattaagtctaacacctaaattataaaagtctgttacttgctaagtatatggaaagtaaatattaaatatgggagacttcatgcatatgcaaattaaaggaatgagctttgcagagttgtgcctatttaaaatatcctacaaaagcagcaactttcacgtttaacttttcatgcaggtcagtatcaattgacagttttgttctgaatttttagatgttatgccccagccaaacagtatagaaatgtcttaaataaatatttggctggtcttttaaaattgttatattgagattaagctatgcccatatttaccaagcccctatctttaaaacctagtttaaaaattctaggaaaaaaaggctaatgattaaacctgatttagacctaagttggtttacttatgtagaggtactatacgaacacttcaaagtagttagcagtgaccgtctttggggttaataaactaagataaagcaagcagttcacaactttaaggaaggttgaatatttccatctgtatgctgtaattaaacagcatcttccctttgaaaattccttttgtttttctttaagaaaagattttcttacaaagctttttggacattgctgattttaagttaaattattttctcttctgttatttttctttaggcttatcaggagggcagacttcaaaagctactaaaaatgaacggccctgaagatcttcccaagtcctatgactatgaccttatcatcattggaggtggctcaggaggtctggcagctgctaaggcaaggctccttgtgttgtctgttgtctgttgtctgggtggtgattagaatattaacatccctgacagggttctctcctctctctgtggaatttatttgatccactcctgtgacattttgcacattaacttgggcaggacatggacatcgta

SEQ ID NO: 71133 - DNA, 2307 bp, Homo sapiens
aaagatgaagtggttataattccctaaggtatagcttgtgctgaatcagtaatgggtagaagctgcccaaatactgcagaccagtatgtagcatgaagcaatgctttactgaaagtaattgaggaataatacctgatgtattttactccagtggtggtgtgtttgaaagacgtgtagactcagtcctttcaaataacctttggaggtctagttgccaatattcaaagcttattctctgagaatgataaaagatattctgcaaaacaaacttctaactcttgtttccctccctaaaaatatatttggaaatatcatagatgttgtcaactttttcatgagcgcctcatgtgaaaattttaggaaatcttgtaatacagaagaaaaacttcttcagtattctgccttagaaaccaaattagattaaactttaaaatgatttttaaaatatcaccttataggatacaggttgcattaagggctgtagactatcagtaaacctgctttttcagctacttggcaacttgcttggaaatggccactttcttttttcaggttattgctgaatctgttattgtttgagtggaattatgtgagagaagtctaaggtttccagctgattctaacaattttactactctattctgcataattttaaaatctactctcagaactatctgaatatctgttaatttttatcctggagtttaactaatcatcatggtgtgtgaagtacccaggtattaattattcgttatgctttaagctctatagcttaaaaaaaaatcatggatttttaacagcccatttccaatctgtcatgttaacctttccaactcactttaataattttattttccaggaggcagcccaatatggcaagaaggtgatggtcctggactttgtcactcccacccctcttggaactagatggggtaagcttttaagatactctagaagtgatgttgccgaagtagttttcccctggcaataatctaactggttcctaaagcctaattaaaaaaatcaaaaactaagttaaagaaaaaacagccccaaaacatatatatcttttatttgagccaagttaaaatggatcaggttaaatgctaaaaatttaggttctttggcacagagtcaagaagtaagaaccctgtctacaagctatgatttaaaggtaaatatttgagtaatctagcatatataggggcttaataactgaaaatttaaacttttcatatgtggatttgttttaaatctacctcctacattcaacaagagttggaatcagataccctactgtatagcccttgctgcttctgagtcttgatgaattatatgttcataatatttactgaacatttattatgaaccaaggcaatgacgatatagcagtgaactcggcatattcaaagttcatgcccttgtgaagcttatattctaagtggggagacaaaagatacctaagaactttaggagttgtggtaagcggtattgaaaaaattaatatagtggcatagagaggaagtggataaaggagaatttaacttcgagaagattatcaaggaagacatctgaagaggtgacatttagaagaggccaaagaatgagaatgagccagctgtcaaaaggtgaggcagaaccttccaggcagcttctctttctttgaggatagcacatacaaaggccctgaggtaggtaaaagtccttcatggttgtggcatggataatgggagctggaggtggtagtgtgagatgagaccagagaggaaggcaggtgtcactattgagggctttgtaggccaagatgaggaatttggactaatcaaagcatataatttggactaaattggactaatcagagcatataaatgagcctttgaagactctaaggcaggggagccatgtgataatataagattttttaaagattacttggctgcttgcattagaaggaaccaagaagcaggaagtccagataaggcgatgtcacaatttctgattcatccattcagcagatatttaatgtgtcaatctgtgtcagacactgctcttggtactaggtatatcccttctgacctgtggagcatatactccagagtgacaactggtagtattctactcagaggacttactttgagctgtgaagtctgttgccatctttcactcttatgtcattttggtcacctgcctgtgttttgttctaatggaaacaagctgtcaccatattctttaagcttagggatactaaacctatttttagggagcaagggaagtcatgcatcctttaaaaaaccaagtgaatgctgt

SEQ ID NO: 71134 - DNA, 1090 bp, Homo sapiens
atgctccgaaaacttacattaacctacagttgggcaaaatcatctaacacaaagcctattttataataaagtgttgaatatctcatataatttactgaatactgaactgaaagtgaaacacagtatgggtgtatgggtatcaacataaagagaaaaatcgtaagtcgggtcgtctgtatagggttgtgtacatagtaagatttcaatttctggcatctttatcagcagtcagttaattttgtatctttgaagtatacggaaattgtggaaatctgcccctctttttgttttgttttaggatgatgttaccgtgtttggtatgtaagggtctctgaacttatggatgttgtaagagttaggaataaactttattactgaccacattaagcaaatataatacaatatttcttagagttgtaataattgttgactttgttctttgaatgtttgtaaggcttggaaagcaggttataaactgatttctcaatgttgttgtaggtctcggaggaacatgtgtgaatgtgggttgcatacctaaaaaactgatgcatcaagcagctttgttaggacaagccctgcaagactctcgaaattatggatggaaagtcgaggagacaggtatgagagggaaaagctactcttctgtttgtgcttttgggggtttgagctgcaatttttgtgatgcgtcgtccattttcatgaagatagcaaatagcctagttgtttttattgtttacatttttgatggatataatcactggagttatcctttgtcaagtatttacatagttgttatggtaacaacagatactgcatttggactatggtatttctgtaatataaaattagagttcttttgaatatattgtcatgtagtatttgtgagaaatcatacaatgtttataatttgtaaggaagtactaattgcatttgctttctttcatgttgcatttttctccctccaaagaagtctgtttcatgagctgatgtttgtggggggtgggggttgtttgttcaggagggggtggttaggctttgttggattaaaactatttagagtaccctagaaaccctagatgagtttaagaga

SEQ ID NO: 71135 - DNA, 1858 bp, Homo sapiens
cctgtctctacaaagaataattagtcgggcctggaagccctctcctatagtcccagcttctcaggaggctgaagcagggggataatttgagcccaggagttcaaggctgcagtgagctgtgattgattgcaccactgcactccagcctgggcaacagagtgagaccctgtctctaaagaagagattattgaggctgggtgcaatgactcatgcctgtaatcccagcactttgggaggctgaagtcggcagagcacttgaggtcgggagtttgagaccagcctggccaacatggcaaaactgcgtctctactaaaaatataaacaattagctgggcatgatggcccacacttgtagtcccagctactcttgaggctgaggcacgagaatagcttgaaccctgggttgaggggtacggaggttgcagtgagcccagattgagccactgcattccagtctgggcagtctgggcaaccaaagggttgatttttatcctttgaaatttaatattactttagtgtcctgacttaaaggattaatttaattatgacagaatcaaaaagaataaaaaagttttctctttgataagatatgggagtttggaggaaatgtgataagactcttaaaatcctgtctaaatgaatagtcagtgaattttttccgtaaaaggccatatggtaaatattttaggattcttggggcatagggtctctagtagctacttaactctgcttatgtagtgtgaaagtagcactagaaaatatcgaaataaataagcatggctgtattttaataaagctttatttacaaaaagctgatgggctggattggcccatggtgcagtttgccagcccctgacataaacactgttactagtgtagtaactccatactcggctacatcagaatctcttggattttcttacaaacacagaatcctaagccttaatatatcccagaaatcagtaaaattcaagttcgtttctagataaagaaggaaaaagtttgtgtattgttattttagtttaaaattgtcaggggatctgtcttgtattatttaattgtattagtcttataagagaatacttgaagatgaaaaagtggcatatgtgctcaaaatggaggatttgccctttcagattgccttttagagctctgctccctgtatttcacttgagtggttattgagaaatgatctttgccagcagttgaaaagccaaacaagattttgttttattttcttatacagttaagcatgattgggacagaatgatagaagctgtacagaatcacattggctctttgaattggggctaccgagtagctctgcgggagaaaaaagtcgtctatgagaatgcttatgggcaatttattggtcctcacaggattaaggtaattgtgtgacatcctgactagctttttttttttcttttttctctttttaaaagctttggttagaaaatgttaaagtattataataaaagtaatagccactgtgacccagactatccagtttggtgattttgctatcatatcatcctatggggccttgtgtggaggtatggtaaagtgtaagtatgctggaccagaccgcctggttttgaggcttggctccagcacttactaacattgtgactttgagtaagtctgttaactactcagtcttaatttatcctttttactatattattgtcctcattatgaggatgaaatgagacaatgtagtgaatggcctttgttaactatgaagtttacaattctgaggaatgattacttaataaggttttcatattggttcctttgtaggcaacaaataataaaggcaaagaaaaaatttattcagcagagagatttctcattg

SEQ ID NO: 71136 - DNA, 1088 bp, Homo sapiens
ttacttgggcatccctggtgacaaagaatactgcatcagcaggtaaaggaaaaaagcagggtggaaaagaaaaacccattgtggatattgctttcgcatttttcttcaaacccactgcgtcaatttcttgggcttcagacagatttctttgccacattgtgccctctctgggggcaggggtttgggagaaagagaaaaaggaaaaatgattttaaaggagaacattttaaatattgaaaacttcaaacattggtcatcttgctacacagagtatcactaacatactagtatagatttacatttgtattcgaaatttatttatgcatgtatgagtatgaaagtatgtaataaaaccaaatggatattcacaaacattttgtaaaataggtatgatacatatatacatttagattttgtaaaatgaggatcatgtattaccctttaacacttgcagagtggctgctaaaagaattagaggctgtcaggccatttagatttatcagaatctagaccctactcaatgctgtttgaatggttgcagtgtcagtgtagaaggacctcctgaaacaagtcaagcaaggagatgttttgctgtgtggtttatttttgcccgtcaaatggtaacactgctgacattgttcaggagctttcaattatgaagtcattaagacagagtgttggtaaatgtgtcttcttggatgctttttgctcaggagtttctgattgtgttataaattactctactccttcaggctctttttggtatatgcttttatcctttctcacatggtgggagagggagaggcaggtctctggggccttttttatgaggacagtagccccattcatgagtgctctgccctcatggcctaatcacctcccaaaagcccaacccctaatatcattgccttggggtttaggatgttaatgtgtgcattttggggatacataaacattcagacaatagcaggctcccttccaatattttttaaaaactcattctctaacatgcttttatgatctctgtgtccctagctcaactagaagacttttgtcaggttctactccttatagttggcttttatatt

SEQ ID NO: 71137 - DNA, 2504 bp, Homo sapiens
tcagctgaggacaagcaacacaggtttttccacctcagagctgagtggtggcatgaggatggaggttagggtttgcaaatctataatttgttccaaacagttcaaaatcatttagtgtgaagatgaattggactaactgactaatatcagaagttacacagtttgctgtgtttagctatgggtagcttgagctactcccaaagcaactgagtggcaagaaagggtatctaagaattataaaaacttctcatgtattatgtgtgtagctagtagaatgtttatcatcttgaaagtatgttcttgtcaaagtaaaaatgtgtacttggatttagtaattatttatataggaactttctttttcttctttcttccttttttttttttttcccccagtgatgatcttttctccttgccttactgcccgggtaagaccctggttgttggagcatcctatgtcgctttggagtgcgctggatttcttgctggtattggtttagacgtcactgttatggttaggtccattcttcttagaggatttgaccaggacatggccaacaaaattggtgaacacatggaagaacatggcatcaagtttataagacagttcgtaccaattaaagtaagtgggtttgcctgtaggtttcttgattctacattcacagtaaaaggcaaaaagagagttgagttggtggtagaagcatcctttcagcattataaaccatcaggaatgctgattcccctactgttgtatactggtatataaacttgtacctccctaccatctaaacacctatatagctttgttcttatttgtagattaataatctcttcctttgtcaactttctaaattttggttttcttctcttctgtttaatgctttcctttatgcattcctttgtcatctttggtctcttaatactttgtttcttcatatgtaccagagatttaaataagagttcaacactaggccccacctgcactccctggctccccacaggacatttccccttggtatatgataacataaacactacataaacactacatacttctggcatccctgaaagtgattatctcatttatttatgtgtgctaacctttttcgctcttttaatcttttgaaaggagctaatactatgccaagtcacacctgggatttgttaccattatcacaaatgttttcatatatgagtgacaaaattgaacacttagtgtgtgtctcagactaatagataattttctctagtgcagggaaaatggtgggactattttgttaaagttaaggaattatagttgtcttttttttttttttcatctctcagtgggttgacttgagttgtgtatgtgactatggatctcctaatgctgatagataagaatatgaactttgggatcagaatgacctgaattcagataatattctgccagtttcttgctctatgactttggaagagttacctctctgaacccgtttcttctgtaaaatgaggttgaaaatagcatctaacaattcttgtgaggattgcattagccaacacttataaagtaattagaaaagtacctggtagagagtaagtttaaagtgaatcatctcataatattgttatgaagattaaggcacaaatttcctggaagctgtcagtgcttgattactgtagctgttttttatttttaccttttttttttttttttttttttttgagacggagttttgctttgtcacccaggctggagtgcagtagcccaatctcagctgactgcaacctctgcctcccaagttcaagcgattctggtgcctcagcctcctgagtaactggggccacaggtgcgtgccaccacacccggctaatttttatattttcagtagagagggctttcaccatgttggccaggctggtcttgaactcctgacctcaagtggtcctcccagtgcagtgtcccaaagtgctgagattacaggcctgagccactgcgcctggcctgtagctgttttttagagtagaggtatatatgctatatttgcattagagctatgattcataaacaacagttgtatgtatatgctgtactgatagaaagtaacatcttcctatatacaattttttttttttaatttatttttttattgataattcttgggtgtttctcacagagggggatttggcagggtcatgggacaatagtggagggaaggtcagcagataaacaagtgaacaaaggtctctggttttcctaggcagaggaccctgcggccttccgcggtgtttgtgtccctgattacttgagattagggagtggtgatgactcttaacgagcatgctgccttcaagcatctgtttaacaaagcacatcttgcactgcccttaatccatttaaccctgagtggacacagcacatgtttcagagagcacagggttgggggtaaggtcacagatcaacaggatcccaaggcagaggaatttttcttagtgcagaacaaaatgaaaagtctcccatgtctact

SEQ ID NO: 71138 - DNA, 1121 bp, Homo sapiens
agtttcccaggtgggtttcgttttttttttttttttgagatggagtcttgctctgtcacctaggttggagtgcagtggcgtgatcttggctcactgcaagctccgcctcccgggttcacgccattcttctgcctcagcctcccaagtagctgggactacaggcgcccgccaccacgcccggctaatttttgtatttttagtagagacggggtttcactatgttggtcaggctggtctcgatctcctgacctcatgatcctcccgcctcggcctcccaaagtgctgggattacaggcgtgagccaccgcacccgaccccaggtgggtttctaagtcattatacctagtctgtaggttgttgttgacatctatttgtagtaggttggtatatttattctcctctgccatcactcaagtatcagggcttgctcatttctttctgcatccttaacaactgaaaacaccccctggttctgataaacacccacatctccttgcccactccgatttttaagactttgtaactgttacccatatcactatggacctgctgtaatgtaatctatcctttgttgtcaatgaaagctgagcatctgtagtcaaaagagaatctctgaatttgggcaacagttgccctccatgggattaatgattctgggtgaatcacaagatagaaacctgggaaaagcagtaagtcattggtttgattttagggatggtagtgtgctttctgtagcttgcttttcccccccatttttctctgaattttattgtttgagaactctttcaaagaaagcccctctagcagacaacattgagcagcgaaaaagaaggaaataatcatttatcatcctaataatgttaagtgagggagatgggacataaaagacttttcaagcacgattttatattttaactttgggttaaccagatggaaggggaaggtagagaatccaacttgataaatgtctttatttcacagtaaaactttatcactcttacaggttgaacaaattgaagcagggacaccaggccgactcagagtagtagctcagtccaccaatagtgaggaaatcattgaaggagaatataatacggtaaggaatgggcccaggttaatac

SEQ ID NO: 71139 - DNA, 1050 bp, Homo sapiens
ccatctcaaaaaaaaaaaaaaaaagttgttttggtaaacggatggcttcagattttttccactgtaacttaaagtattattagtcaaatggctatacaaaggcaacagaatttttaaatgagccagaatttctgtcccgtgttctttcctttcatctccccacgcaaccacttaaaaaataatttagttacagactatgatgtcattgtctttaaacttggataggtttattaaggcattatgaattctctttttcctaatcagaagtggaaaataatttctactatatcatatatgttcaaaggatttttttctgaagattttaatttatttaaactcttgcattactttcttactgaaatatttatttccaagtttgaaaaatgaaatcagattagcttaataagcagagaaaaatatgattaggtaataaatgcaaagcctttttgttattagtcactaatatattaataatttttcaggtgatgctggcaataggaagagatgcttgcacaagaaaaattggcttagaaaccgtaggggtgaagataaatgaaaagtaagaaaaaaatctttattatgtcatatttgtgggattttttttttttttttttttttgagatggagtttctctcttgtctcccaggctggagtacaatggcacgatctcggctcactgcaacctccgtcccctgggatcaagccattctcctgcctcagcctcccatgtagctgggattacaggcatgcaccaccacacctggctaatttttgtatttttagtagagatggggtttcgccatgttggtcaggctggtgtcgaactcctgacctcaggtgatccacctgccttggcctcccaaagtgctgggattacatgtgtgagccactgtgcctggcccattatgtcatatttaatactatttcagttatttacagcattggtcaattatagaattttagttttttgttggtatgtttgtttttttgagacagagtctcgctctgtcacccaggctggagtgcagtagtgcaatctcatgtcactgc

SEQ ID NO: 71140 - DNA, 1056 bp, Homo sapiens
ttaaacctaatttttaccatagttgagctcttcaactatgaagaaatgaaacttttcttccagtgccattcacattagtgtttcctgtttgttttcttttatccattttgaggggagttataatttagaatcctcactcttaaccactgtgttggagttcttccattctcagatttcttagagttttcttatttctttgattttcagaaccgtggacagaattgtcattatctgataagatttttgttcctttgagctgttttgttttatttttaacacattagaacattgccctcagctagagtcacaattttgggcttccctgaaaaaacggaagattttgttctccttaattaataatggtaattaatgatgatttttaactgaataaaattgcaggactggaaaaatacctgtcacagatgaagaacagaccaatgtgccttacatctatgccattggcgatatattggaggataaggtggagctcaccccagttgcaatccaggcaggaagattgctggctcagaggctctatgcaggttccactgtcaaggtgagtgttgtgcttgttgcccattagatactgttgtcagtaatactcccagttccttatttagggggcagttgggaagtttcgcagatcttgaataatttagttattttggtgatggcatcctagatgtcctttattagttgtattccagacaagatattattaaggctgctgtacattgtgactttattatgaagatcgacactccgccgggcacagtggctcatgcctgtaatcccaatactttgggaggctgaggcaggcagatcaccaggtcaggagttcaagaccagcctggccaacatggcgaaaccccatctctactaaaaatacaaaaattagctgggcatggtggcgcatgcctgtaatcccagctactcaggaggctgaggcaggagaattgcttgaacggggaactgggaggcagaggttgcagtgagccaagattgtgccactctactcctgccatggctacagagcgagactccatctaaaaaaaa

SEQ ID NO: 71141 - DNA, 1060 bp, Homo sapiens
atcgtactatatatctatatgttaaattataatatctataatcttattatagatttctaaaggtgggattattgggccaaaaggataaaatgttttatggctgttaatattacctaattgatgttttaaagaaatcttttaattttttatcactgataatccaaaactatcagatttgggtacaccagtattatttttggctgctttattaaggggaaaaaagtgtgtcattgttgataacatcagttggttgatggatggagaagctgcatgaatctttttctcatagtcttaccagacttcacacttctatccactaaacttttcaaataagttaatggttctcaatgtagtagattaattaattaatatctcggattgagacttcacatactttggtagaaatttattactcttatatcctttgtcaattttgacttttttgaatacctttttttttaagttataactttgcctattataactccttacctccatttttaaacagtgtgactatgaaaatgttccaaccactgtatttactcctttggaatatggtgcttgtggcctttctgaggagaaagctgtggagaagtttggggaagaaaatattgaggtaagttcttttcctcttttctcctatgttatatcactacttttttttcttcagaatttaaaatatatagaagacttaaaaaatagtacaaagcattttcatatacccgttatccagattcatatattactaacattgtgccaatttattttatacacttttagtagtctctcattctgtgtgtgtgtgtgtgtgtttctgtgaatcatttgagagtaagttgaattctcctttacccctaaatactttattgtgtatttctatgaacgagggcattttcttatatagccgtagtgtagttaccactttcaggaaatttggtattggtgtaatatttttatctgatttaattttcattttctaattctgtcagttgacccaatcgtatttccttttactttttaaaatcacatttattgatttctctgggttaattataggaaa

SEQ ID NO: 71142 - DNA, 1411 bp, Homo sapiens
aggaaatgtcttttggaagcatttagcaagagaactagataattaccttaattgatcctggcaccttatttgtttcttgcccaagttgtcattcacagtggataacaagatagtattgagtttgggtgtgtgtgtgttttcaatgtatgacagcaggtaattaaatggcttatttctgtcattcccttgctcttttttgttattagttagggtgtactattttgaggtagagatatacataattaagggatgagcttatagcaaaagtgcctgacagcaaggagttgaaagtcatttaccttttgaccagattcctatttattccatgaattttattatttaatgaaagtctacttattaaagagtctctactgtctttcaccatatatgtttgacagacttaatgtttaaaataatgggtctaaattttgcttttgtatcttcttaggtttaccatagttacttttggccattggaatggacgattccgtcaagagataacaacaaatgttatgcaaaaataatctgtaatactaaagacaatgtaagtttaattctcaatcctttccagtaattttatttagttgttgttttttgttgttgttttttttttagatggagtcttgctctgttgcccaggctggagtgcagtggcgctatctctgctcactgcaacctccgcctcccgggttcaagtgattctcctgcctcagcctcccaactaactgggattacagacttgcgccaccacactggctaatttttgtagacgggggtttcaccatgttggccaggctggtcttgaacacctgacctcgtaatctgcctgtctcggcctcccaaggtgctggaatgtacaggcgtgagccaccatacccggctttagtttttaatatatagcttagttggtcacatggtgcagatggcattccttcagtatttcgcgtgccagttgtctcagctgatagatatcagcagctggcaaggaccttggctgcactgcctgctgccccctcatcttcactggcacagggccctacacttagtcaacaggcagccaaaacttactgagtgaaggaaccaaaggcacaacttgagaactgtctatgtttgtgtttatagaagaggaacaataaagtcatcgactatctaaatataatgaataacaaaaaagaacaggagcaatgcacgtttgatcctcagcagctggcactactaagaaagagctcttaattgagttctaagatttcattgcctgatgctacatgtaatgctagtctggtgttattacgtgtaaatctaatgtattttaagtgctttttagtagtcctcccacagatatactttattcataccataaacccccaactgtccaggtgaataagagtacaatatgcaatatattacagtc

SEQ ID NO: 71143 - DNA, 1008 bp, Homo sapiens
ggtcattttctttttttgagatggagtctcgctctgtcgtctaggctggagtgcagtggcacgatctcggctcactgcaagctctgcctcctgggttcacgccattctcctgcctcagcctctcaagtagctggaactacaggcacccgccaccacgcccggctaattttttgtatttttagtagagacggggtttcaccgtgttaaccaggatggtctcgacctcctgacctcgtgatccacctgcctcggcctcccaaagtgctgggattacaggcgtgagccactgcgcccggccagtctctggtcatttttgagttggatttttaagaaacagactggagaaatgctctaagctgtgtaggaagaggaggggagaaaaatcagcttaattgcattattgtatttttttttgccttaggaacgtgttgtgggctttcacgtactgggtccaaatgctggagaagttacacaaggctttgcagctgcgctcaaatgtggactgaccaaaaagcagctggacagcacaattggaatccaccctgtctgtgcagaggtgggtcatctacacttatacagtttaaaatgtttaaaatgtgccacatagaagcacaccacccagcttatacatggcagatgtaggaccctgagtttgatgatgattcctcaaaagagggctttgtctctaaaaattagtttttgtctttcaatactgattgctcatggtatgaactggaggcttccgtcatgtcgttaagtggtaaaaattatgagagtgatttatagagctgtgccttaaatattttatttatcatatcttctaaattattttcatggcaatcagttaataatggaagagcttcaatcttagttattccacagctatcttgaggctaattgatactgtctgcctcttcagcttatggtatcagtgaatgagatttgaaaatgatgctttcaaaagatcaaatgacagtagaactagaaattgaccaatctaggcctctg

SEQ ID NO: 71144 - DNA, 1452 bp, Homo sapiens
gctcaagcaatcctcccgccttggcttcccaaagtgctgggattgcaggcgtgagccacggtgcctggccagttttttatttagactgatcaacgatggcagtttggcttcctccatctttttaacataagaacaacatcaatatgagaaaaaacagataagagctcattttggtggatttagttttgtatccacatctcctacaagttctatttctaaatcagtttctgagaaatagaacccaggcttgcaaattgataagcctggaatttgtttaaatgtattctttggctctttatttttttcctcattataaaaatggaaaagaaagcatgtttgaattgcccttaatacccctttctaacacagttatttttattatcatgtattgtttccccgtcctcatctgtactcctacattttttttaaacaaaggaattttattgcctttccaaaaaagttgtactagtttataatgtcaccagcattgcatataagagtgctaattaaaatgttgcaaaattcagtgtcaatgttttttctataatgagtataaaaaggataactattggccaggcacagtggctcatgcctgtaatctaagcactttgggaggccgaggcaggtgggtcacctgaggtcaggagtttgagacaagcctggtcaacgtggtgaaaccctgtctctactaaaaatccaaaaattatccgagcatggtggcaggtgcctgtaatcccacctactcgggaggctgaggcaggagaatcgcttgaacctaggaggcagaggttgcagtgagccaagattgtgccgctgcactccagcctgggtgacagagtgagactgtctcaaaaataaaaataataataaaataacgatttcaaggattttagcatatctttgctaacaatgatgagcctctttcttcttataatgatttttttttttggatatgaattatccatattttctaatgcatttgtattttaaaactttttaagatactggccattagtatttggtctggatttttttgagaagtaaaggctttgtcaccctctgaggctaaaacagactaaagacttttctcagtattgttcctcccttacacaaaactgttttcccccttattcacaagtatttttgtttttacgtacaggcaatcttgagcagtagcaagtaaagattgtctaaaactgtcaagtccacaaccatcaaatgtttgcaaggatatgaaacaaggagaacttgttagtcactgcaaatgagagtataggttggttcaggtaccttgaaaatctagtcaagccaaagtttcacctgccctctgactcagcagttgtactccagctctgtgtgcaaggagatgtgctggaatgtcacagcatcgtattgcaaagagcatattggcaacagcttggatggccagcagaaggagcccaaatgtgtgat

SEQ ID NO: 71145 - DNA, 2130 bp, Homo sapiens
gttgtgctttctcttcccctgcaggtattcacaacattgtctgtgaccaagcgctctggggcaagcatcctccaggctggctgctgaggttaagccccagtgtggatgctgttgccaagactgcaaaccactggctcgtttccgtgcccaaatccaaggcgaagttttctagagggttcttgggctcttggcacctgcgtgtcctgtgcttaccaccgcccaaggcccccttggatctcttggataggagttggtgaatagaaggcaggcagcatcacactggggtcactgacagacttgaagctgacatttggcagggcatcgaagggatgcatccatgaagtcaccagtctcaagcccatgtggtaggcggtgatggaacaactgtcaaatcagttttagcatgacctttccttgtggattttcttattctcgttgtcaagttttctagggttgaatttttttcttttttctccatggtgttaatgatattagagatgaaaaacgttagcagttgatttttgtccaaaagcaagtcatggctagagtatccatgcaaggtgtcttgttgcatggaagggatagtttggctcccttggaggctatgtaggcttgtcccgggaaagagaactgtcctgcagctgaaatggactgttctttactgacctgctcagcagtttcttctctcatatattcccaaaacaagtacatctgcgatcaactctagccaaatttgcccctgtgtgctacatgatggatgattattattttaaggtctgtttaggaagggaaatggctacttggccagccattgcctggcatttggtagtatagtatgattctcaccattatttgtcatggaggcagacatacaccagaaatgggggagaaacagtacatatctttctgtctttagtttattgtgtgctggtctaagcaagctgagatcatttgcaatggaaaacacgtaacttgtttaaaagtttttctggtagctttagctttatgctaaaaaaaataatgacattgggtatctatttctttctaagactacattagtaggaaaataagtcttttcatgcttatgatttagctgttttgtggtaattgctttttaaaggaagttattaatatcataagttattattaatattttgaacacaggtggatgtgaaggattttcatttaaaaaccaagtggttttgactttttctgttgaatgaacaactgtgccttgtggaatttttgcagaagtgtttatgctttgttagcatttcaacttgcattattataaagaggtattaatgcctcagttatgtgtttgtcaatgtactggctgaggattctatctcagctgtcttttctaactgtgtaggttgagttttgaacacgtgcttgtggacatcaggcctcctgccagcagttcttgaagcttctttttcattcctgctactctacctgtatttctcagttgcagcactgagtggtcaaaatacatttctgggccacctcagggaacccatgcatctgcctggcatttaggcagcagagcccctgaccgtcccccacagggctctgcctcacgtcctcatctcatttggctgtgtaaagaaatgggaaaagggaaaaggagagagcaattgaggcagttgaccatattcagttttatttatttatttttaatttgtttttttctccaagtccaccagtctctgaaattagaacagtaggcggtatgagataatcaggcctaatcatgttgtgattctcttttcttagtggagtggaatgttctatccccacaagaaggattatatcttatagacttgtcttgttcagattctgtatttacccattttattgaaacatatactaagttccatgtatttttgttacaaatcttctgaaaaaaaacaaaacaatgtgaaacattaaaattaaaaggcattaataatatccacgtgtgccttcttactgaatgatggtcttgggagtctttgcaagagtattgagtagatctctgatattgtgttgaaaagctagctgctgagtaggctccaatgatgctatgctgatttaagtatagaagaactaatcagttcattgccatttcccatcttctggcagtat

SEQ ID NO: 71146 - DNA, 1049 bp, Homo sapiens
tcccctcgccgggggccgcgagttgcatttggtaaaacccagccccggaatatatagatcgttggagcgcaatgaagtagcctttggagagaagggagagggcccgtcggacagccacagcggccagcgcagcggcagcggcggcggcaccaccatcaccgctcgcaccccagccgcccggcccgcgaccaggcagcggcggccgccggcgggatcggaggaggcggcggagcggcgaggaggaggagcaggagcgcgcagccagcgggtccacgcatctcagcacttccagaccaactccggcaccttccacacccctgcccgggctgggggctccgagagcggccgcgaagcgactccgatcctccctctgagccttgctcagctctgccccgcgcctcccgggctccggtccgcgcggcggggtccctgctcctgcgccccgggcgcgcttcccggacaccccggtccccgcagccaggacaaagccatgaagccagcgctgctggaagtgatgaggatgaacagaatctgccggatggtgctggccacttgcttgggatcctttatcctggtcatcttctatttccaaagtatgttgcacccaggtagggggcgcgttagcgtggttttgttggatattttcttctctctcgcgctctagctcgctccgcctgatttctgcctcttccaaccctacctctccgccttcggcctcttcggggctcctggctgcccagagctcctggctgcccagatctacccgggtcaccgcgtcgggatggggaggagaagggaaggtgtgcttcgccctcttcttcctaccggctccgggctggaggatgggaccaggaggggcggtagtttttttttttttttttttcttcttctttttttctttgtgtcccttgtctgtctgtctgcgaggtagcagggaaacggagaggtgtgggaagcaaccgggggtgaggggctggtttgaggagaacgaaactccctccctgctgctgccgaggtcggaggatgaaagagttacccggagccggctg

SEQ ID NO: 71147 - DNA, 1027 bp, Homo sapiens
ccgagcaacgggaatcccccgggcggcgtgggaatgaaccccattcctccggtcccttgtggctcaggcaaagttccacgtccgaaatctggactgggggagggacgaggctcgtcgcttcctaggggtgcgagggaaagtttgggttctggagagggaggggcgccctcgagcgcggcggccgggggtgagcagctcggctgcgaagcccaacaggtagaacgttccgagaagccttccgggtaacgcgggtctccccgccaagccgtggctcccctgctcccttttaccctcccttagcagccccctgccgggccacgttggctcagaaatccattttctacgcctccgagttgcctttctcagcgtagtcacagcaataatttgcttttctaattgcaaggaggagggaggtggaaacgcatttccttccagggaagtggggttggtgtttttcatttttgcctcccgccttctcctttcactgtgtatctaacactttaaacagacgcagtcccgaattcatcaagcctgcgtttgggtcgatggcagaggaataaagctgttctttccatcaaacaggcagggctgcaggctgcagattccttgacagcgcagggacagacggcccctttgccccactcggtctggagcagttgttaaggcagccacactgccaaggatatggtccgactctaccacatgtaacctcaggacgtccgagccagccctgttaaagatggcttttgtttgcagctgggtatttttagtttaatgtcagcaaactacagcggtgtttgtctcctcacccaaacctgcggttgtgaaacttataaaggaatttaaaaatggacctggcttgcattccggcaggcaggccttggttgcagtgggcagggccagacagccaggggtatctcagagtgccaagctccagggcccaccggagaccgggccagactcaccccagagcgccaggggactggtggtgtacagatacactcgggttcaaacagtttaaacaagg

SEQ ID NO: 71148 - DNA, 1096 bp, Homo sapiens
ccaatgcccctccttgagaaacagctcaaaactctatgtgtaaacagcatctggcgtagtacttggctgcatcccatgacttgggcaagtgcctggcaagtgtaggggcttaataattgattgaatgagtgactgagtgaaagtcgcagacaagagatttggtcccctcatttgccaagtgaaggtagtaatgttacctcttttatgggtggcggtggtaaagattaaatgagaagttagatgtgaaaatgcattgggaatggatgtaaacctatgtaacaaaactgcatgtcctgcacatgtatcctggaacttaaaattaaataaaattaaattttaagaaaagaaaaaatgaatgtaaaagcagtataaacatgttgttgttatgataaattacctgtgtggttcctcgttcaaggatgtgaatctccatgtcaacaagatgctgttctatttaattctgtttgaaacctgagcaagtttttatccttttaacatgtgcgtcctacactgtaagatttactgaaaggatctgacttctataagtgtgaggctcctgtgaatatcttctctctgtatgtgctcaccctctgtctgccgtactaacaggcatacccgctgccaaggccaaaactgtgtagcaatttgcaaagcagagtttatatttggtcagaaatcagccttgtgtttttttgctgaatgcagtgaccgcagcatttcctcccaattatgcacttaattactcctcaggttcccattagctttaactagtgacacttgggaaataacaggcactggtcaatgccatttctgaagctgaactccgaggaggatgaaaagcagtcatttcagaaaaataacagtggtagcatggcagcctgtatgtgagcagttgttgggtgggttagcatggctcattgcacaggacagcatcaattggccctatgtctccacattgggcttgttctgtgctgaggaggactttaagggctcttcctgtataggggtcagtccttcccactgcttaactgcaggtgtcatggagcttgctctgtggctggcatttgtagctggggcacagacccatttcctccct

SEQ ID NO: 71149 - DNA, 1010 bp, Homo sapiens
actgggtaatttataaaggaaagaggtttaattgactcacagttctgcatggctggggaggcctcaggaaacttaaaatcatggcagaaggcacctcttcacagggcagcaggagagagaatgtgtgcaagcaggggaaataccagacactgataaagccatcagatctcatgagactcactcactatcatgagaacagcatgggggaaaccacccccatgatccaactaactccacttggtcctgcccttgacacatggggattattgcaattcaaggtgagatttggatggggacacagtcaaaccatatcaaacccttatttgattcaacatttttctgatgctttatgaaaaaaaccagtaacaacaatgaccacttaccaaatacttgctctgtatcaaacagtatgtcagctgctgtatttggattatccatcctatttaatccccaccacaaccttgtgagatgcacatttaccaatcccattatacaggtgaggaaactgaggcttagagaggtgaaggagcctgcctaatcggaaagctggaacaggatcctggctcaggtctaactgacagcaaacactgtactcttcacctcactagtatgcccatctccatgttcttggtttcagataattaggtcaagaagtaattatttcataaaggccttaagctcagctgtaaactctgtaagtgggacattcaatgatagccccttctcttcttaccctacacgctatccctggtgagctcatcctctcttggggcctggggtatcatctgtgtttagatgacgctcatgtctttcttcaacttggatgtgaccttgggtcgaagtctagttcatgtattacctcttgtgttaccatccatcccctcttggtcagaatgaggggatagatgtccttcctgtcatccctgtggtactttgtgtgtgtacatctctaatattactcattctgatacattgactccttcagggaaggggccatgtcttgtttagca

SEQ ID NO: 71150 - DNA, 1197 bp, Homo sapiens
gtacaggcgtgagccattgcgcccgccccttccattttcttaaggggatgttgtctttcctgggttttagctataccctttgggaataatattgattatcttaaggctcaacatgttaaatacaagatattggctgcaaagttttatacacacacacacacacacacacccctctaaagtcatttcaggcctctaaggtatcttcagagtcttctagttaatcagtcgctatctgaagcttgattgtgctattgagatcttgacacagtctgccatgtagcaagagcaactgttactagctccattctacagatgaggcaatggagactcagaaggatttagggaattgcttaaattttgtttcaaatggttctaataccaacgtttagctgcaaagtctggcccaaggaacattcattctattagggtggatgtaaacacacatacttcactgtcttatggggccagatgcgattgctgttacaaagagagacaaactgtgaaggaaagggagaggagggtgattgattttggtggtggtggtgatggtggtggttgtggtggtggtggtggaaggaaaccttccagggaaagttgaggttggcaccgggctctgaaggatgagtagaaatttgctggcggaatctgggaagggagaggaaagacattccaggtgaggacgcctgccagagcagggagtggggcagtgaggagagtgatgtctgggaatacgggagcccaggggtggagaggtgaacctggatggctctgaatgctctaaagtttgagttttattcttggtaccagggagccacagaaggtttagtgtctcctgtttttcagatgatgaaatttaagctgaatttaaactctcttgtttcattagaaaggcagtagtttcaaactcactttctcaaaatgaactcggggccatttggaaatcgtttctattatcatcatttaatgggaggtaagattattcatgaacgactaaagtgcaaagtaagaaagagcttaaaggcactctgtagtgggatttgaaactcctctgttttgcattgctcgggccaaaattataggccatggaggttaaatttcagtctctcagttgctaatggtgccctagcttcaccctcagagggctctggaagcagtggcaggagaaagggaaagtgtgtaaatagtcgcagggaagag

SEQ ID NO: 71151 - DNA, 1819 bp, Homo sapiens
ggttcctgggaacaggcatccttggcttgagatcacaaatgggacagccccatcatgacgattcacgatcacattaacatactcagtgctctgggaagtcctgccattaagaaccccagttaacccagaatttcttaaacttacacaaccacagaatcttttttggggactggagaggtaccacttcatttattcattaaatagttactgagcacctaccctgtgcagatgctattcacacctgagatatggaggtgacaaggcagacctggcaaacttacaatgttctcatctataaaatgggtatacaggagtgtctaccttgcagggttatggtgaggtctacatttaatgaactaatgcagggtaagtgtttggcacagcccagggacattgtaagtggtcagtgatacatatgtatgattgttatcaccctagtggaggatcagatattaaacaattaaacaggtacctatttagtaacaatggcgttaagttatacaaaagagaaggacagggtgtcaagagagcacatagcaaggaaacctaatgaatgttggcaggtgggatggcggtagtggtcacagaaggctctctcctgagcaagccatgctgaagctaagacatgaaggatgtggggattgttggaaaagagtgggaagggagtgaggcctccttgccttgggaatcatggcccgaatgtcaggggcttacacacacgggtgccgtctggggagttaaattctctggactgtctatttcagaattagggaggtaggggcaggctctagtaggctgtggggtccagaaatgaatgtctttaaaacttaccccagaaatttggagcacccttgggaatattttttggaattgctgctccaggacagcgggcctcagaggttcatgtgcttagaaatcacctgagtctcactcaaaatgcagccgtggggcctgggaatctatttaacagacacatcctgaggcgattctgctgcaggaggttccccgaccttgctttgagaaacacatctctggaagattgactcttataaaaaatcgggaacacgaaggcacgacagcaaatgattccagcagagaatatacaggggcacctctagagactttgtatttgatcttagaaagtacacagtgggcaagaagagtggtatgcaaccccatgtcaggagggccacagctgcagggagcggggctcggaggagctgcagatcctaagaaggatccacgacctttgggaacctcgctgtttctggccttctgctcaccgcagagggtgaactggccatctgacacccagctccaacttcagggttgttcaatgtctgtgtgcagttgtgacaatggcagaaacaatcggtttagactttctctgcagaaggtagactgactcgggcacttctctatgttccctgacattgccagtcttaggaattggtcgtggggagccttgaattcaagcccaaagcaactttaacattcataaccacaacgcatctgtaatcagcgggacttatcatgagttcttgagctgcaaatggaaacggtggaaactgaacagacctcctaccacagacttcctgctgatccacctgcctcctcccttcagggccccttgggttgtaatcactgatgcaccattgttaggcggcagggtgatttaaggtgaattgggcctttgcacggcctgcttggttaaaagctggagcataagtcatcgcaccattctgtgtgcgtgtgtgtgtgggcatgtgtgtgcatgtgtgcacgtgtgtgcctgtgtgtgcctgtgtgtgtgtgccca

SEQ ID NO: 71152 - DNA, 1054 bp, Homo sapiens
tcaccagaactgacatttaaaaaaagtcagcgtggcacgttttagtatgtgtggcagatctaaagagacaatattttgatctcaggagtgtttattcttgaaccattttcagaactctaagatttgagaaataataaaatattgaccatccttcaaagagaaaaacacagggcgatctttggcatagcctgtcattttgctcacatttcacttctctctctccaacttcagagcccctgctgtggaacaggtgctgtgctgggtggcaggggaggtctctggcttttttttttttgatctccgtcttaacatctagcctactggaggaagtgtatttaatcatccacttatctgttaacaattatctctgagggcccgtcacattcagagaagattctaggttctctacaagtatcctctcactgtgtacatactaaatcaacatcctgctggatttcccccagacatctcccttcatcaccattggagagtatcctctaattgccagccctattcaccatactcatctcatttgatctggagttttctgagagtgaccgggggtgggatggacaggataatttagcaagagtgtataagtaaaatctatataataaaagttatctccctgtgccccccatgatctattctttatgtagcagtctgaatgagattttcagaaacaagaaccactttaccttagtctcttcttcttcttcttcttcttttcttttctttttttttagtattatggggatctgtttctgttgcccagggtggagtgcagtggtatgatcttggctcacagcagccttgaactcccaggctcaagtggtcctcctgcctctgcttccctagtagctaggactacaggtttgtgccaccacacctggctaattgaaaaaagaaattttttttcaatagagacagtgtcttgctatgttcccaggctagtctcaaactcctggcctcaagtgatcctcctgtctcatcctcccaaagtgttggaattacaggtgtgagctactatactcggccagtacccttctcaaaa

SEQ ID NO: 71153 - DNA, 1037 bp, Homo sapiens
gagacctggagaaaatgtgctttgataaatagatacaaattcatcctggtgggtcatgagtggaaagaaatcattattatgtaaatcaaatagacacttaagtctggacagcaggtagctcaacgctggaagagttcacaccaaaaaaaaagaaggaaaaaaggcaggaagggaaatgatcaaaaataggggtgggttttctgggcctggggctgcctccggtcctcagtgctaccttccctcattctgcccctctgttctcttgctgtcctccttctgccccctgtggccatgggactgcccccacaggttctggggacattttctgagccccctgcacctggtacagccagcccagggctcagtgggggaagtgctccatcagtatttttttgatggtggtaaataagattcatacagctttgcagtgtttgattgtggacttttaatctggcaccccaggtgacccttaagctccttctatttttccctgtagctgtcttttgagatgcatttgctgggccttgttaatggtttgttttttcccttttgatttattagattagaagctcagttcttggcctcccccttcctgggagaagttcttgcttcatctccataaaacgttgctcttgggctttttcctgttttattacttagcattaatacctggcagcttatatctgagctctcattttattttcgtaacatataatattgcctctcctctggcagccttggtgcttgcgaagggtttagtggcctcttgtttttttacattgggaggtaagaatttagatttattagtcccagcttggcgatgagtggcacagagaattttaaatgatttgttttaagccacgtagctaatcaggggacaaaatgaaccaaggatactagaaatgaacgagcaaggaagaaggcaaatgaacttctgacttcttctaccctttgatgttttaccaacacgagacttattcgttttttagtttggtatttctctgtgaaatgagcagaaagaatgacatgagctaaga

SEQ ID NO: 71154 - DNA, 1056 bp, Homo sapiens
tgtttcagggacctaggctccttccatgttgagaatcttccatctttaacacaggctttcaaggccacggtgaaggtcatctacttttttggcatctagctggaggggataaggacattgagcttactgaatcaggcccagaagaggtccccatcacttcttctcccattccactggccagaacttggtcttggggaggctgacaaatctagtcagccatgtgttcattttctgtttagtaagacctcacacatcagtgtttatgcaggagataggccaaaacatttttttttacacctctatctgtttttctactgctaaaccaatcttaaccaaaccctgcttccatttcatgcaatattggctctagactgcagccatgtgactaaaagggggcccttgaaccagaaatgggggaagggttggagactgtgagctgctgtttgcaatttatgcatgatgaagataagaatgttacttcgtgctgttcttagaacccagttcatttttagactgaatgtttatatggctgagagctgcaggaaacaccatgcccaccttgcttggtttaaagcctttgagatctatggtggctgaatgtgcttccaggagcagaatttaatgtgcagggagtgggtgactattaaattcagtgactgcagcaaaactttgctccttgctcctctttgtggaaacactgtttgtacagcatgtctttcataatcaatacaagggagacattaatgaagagaatgtcttgtttggcagacaaagccttccctttgttcggattgagatgctcagttaatttcctgggagtgtatttatgagaagttggttagtgattcttgtaagtgtatgtgagtttcttgttttttctttttttaagagaggagtcaacaacccattgtattactgtaaaatatttgatagcttgtactttgaggaatgtactcatgagagcctagtcttatagatttgggatatttatacatactttaaaatgagtaggttggaggggaactttaaatatgtatattttacttaaaaaaataa

SEQ ID NO: 71155 - DNA, 1084 bp, Homo sapiens
ctgaagttatagaagactgaatgtactattaataattattaagatatacaaaatcactgttagtgagagatttaaaaacatccagggtagaaagaaaatgaaatagactatcagaagcagtaattttctggtatgattttaattagtagcgctctacaggatcctttgtggaggcaaatgcattctagttagtagtatctgtgatatcatttagggctcctgttttatagattcagttccacaaatatttattatcgagtgcctgtgttatgtcaggtgctgtgctaggaactgttcagttaaataggtagtacagttaagagaataagtcagggtgttctccctcccaggccttagagttggggtgattgtgtgtcccagttttccctggacaatcctgtttactgctcttgtcctagcataattattcacagtgccccttttattttaagtgtcctggtttgggaaactaattatagggtcatcaatataggctattattgaggtagagggagtttctccagaaaaggactatggaagttctctaaacaagaaggagcatgatgaaaagtattttttagggagttgaattcaggctagatggtaggaccagtgaagaggtgggagaggggaaagcattttggagatagagtaaaccaaatactaccaatgtgatggacagaacccaactggaggtgccatctggaattccagagtgtgaagagcagcctcaggtgcgcagcctttttaggtttcaccaatcagcatatctcagatgttttcttggagactccattaggctttaacaattgccttaaaaattccccagcaaaagcattgtgggaatagggaacaactccaggttgcacatgagatgcttagctaggtcattggtttgtatggccatttccctcctgagtctaggtatgcaggtcttgaggggtggagctcaaggctacttttgcatttctgccagtgcttccaaatgtcatgactggggggggggggggttgggggtggggagggagggagaggtgggccagggtagtacccttccttgacttagtgtttgaaacttgaaaca

SEQ ID NO: 71156 - DNA, 1057 bp, Homo sapiens
gttgggaaaaaaaaatcaaaagaagaacaatatttcttgacacatgaaaagtctatgaaattcagatttcaatgtccttaaataaagtttcgctggaactcagccatgctcccttgttggcgtactttctgtgccacttttgtgcgataatggcagagttgaatagttgctccagagactgaataggcctgtgaagctgaaggcacttatctggccctttacaggaaaaaatgtgccagcccctgatgtaggacagtggttattgttcatcttgtagcaaggtgaatcgcgttctacacagaggtctttccctccgatggtgttaaagcttggggaaagctaaggctctcaaatttctgaggaagaaatcaaagctagtttgttttttcattcattcattcattcattcattgtttcaccaaatattctttgagttcctgctgtgtgccagacactgttaggggtggtaaggaaaatgcagtgacacaggagaaaatgcctgccctcctggagcttacagtctagggggaggagtaagataatacacaaataaaaactcctgacccgcctgagggtgatggatgatatggaagggcagggggagagagtggggactattaggaaaggccatactgagaaggccataggtgatgtgaaggaggtggggtgtgagccctgaacctacatgatggggctggggcagcggggagtctgcttaggcagagggcgaagcaagttcaaaagccttggggtgcaagcattggagatggtcaaaggagagcaatgtgcatagagcatttttgtgtgtattttaatttcagcattggctacagagctgtggtaatctgatatgtgatcctgttttaaaaaaattattttatcttcagaacaataggaaacacgaagggagaccatgtagtgcagtggttaagagaaggagttccaggcagataagagttgaagctcaaccttggcagtattgacatttagggctgaacaaaatctttgttgctggaagctgtcctgtgcaatggaggcagtttagtagcattcctgg

SEQ ID NO: 71157 - DNA, 1083 bp, Homo sapiens
tgagttgatacctaagtcaccactgggcatgctgaattaaaggcatgccttgctgtaaagaggaacggaagctcagggcaccaagcagaaggggcacattaggagagcctagcagaaatgtatttttgaatttgtgtgccctgttgggctcatttggattgatttcctccactctaccttctatcctatgcctaagttgatcatggagcaaaatgttcctgtttgttcttccttctagagttacgaatggtaaaaaggcaataactgatgtttactgagcacttcttatgtgctctaagctctcttcatgcattctctttccccccttccaaatcctctccatcatagctgttactgccacttaaagatgaaggaagagccttgagaggtttagtaacattcccaggctgagtggttaagtaactgggggaagctggaatttgatctctgcagccttttttgtctgtaaaatcttgggtgcactgtaagagaagcccaagaattgtccagcgaaattaaaactgcaccccaaagttcagcgcctgggctccatcctcagagccttttattgcacccgcgcttggatgggtgtcttgaagccgatttaatcctggtctgtctacacaggggagcagcaagctgttgacagcctcattttatggtcatcagtgccctcttccttctgaagcttgtcaattttaatgtctggagaaccagggggtggtgtaggggcttccagacccctgtttgcaatcatcacttgtacaccagagcttctcacacttagatgcatgtggaattccctggggttggagttaagttgcaggttgtgattccataggcctggcctggggtctgatcctgcatttgtaaccagctcccgggtgatgatgtggaggtgggtgtcctctggccacactgaagtccctagttctagatgccatcaccctcaccctacttcagaggctgtaccaaattcttagaagagaaattttgcctcaaaagcgacctgggaacctgacctcaggaagaatttcatctctgtgggaatgtggaatcggagtgatagaggtgaatgacaag

SEQ ID NO: 71158 - DNA, 2177 bp, Homo sapiens
tagtttctttatctgtccaatgggcccaatggcacctgctctgctcatctctcaggatcttacatgccacataagctaatggagaagtaaatgctttataagcctaaaggaatggacatgggtgcattcagtgagaggcagtaggactaatggttagtgattagtttgctaagtaggagcagcagttgttagtgtaagaagggcgggttagtacatgggtggtggtcaggaggagcaccactgctgctgctacttagccacttgtgtaacctttttttttaaacaaaacaaaacaaaaaaaaacaaacctctcagtctgctataggatagattgttccagcatctgaaattgcaaagcacttcttgaaggggattcttaggatggcgtaattttgttcactcataggatcttcttcctggggcatgatcctagccatgttcaggataagccctgagcatcaagctggtgcagtgaagtgttctgtggctggaggctaaatctgtcccaggctcacagcatgggagcggggatggcaggggcttttgaattcccttgagggcacttggcctttgcttgtatctgctcaggaagtcagacagtctgcagccagtggcgtgtgcagccaccccttctgttctctgaccctggaggcttgtggtccatttgttttaaaggtgactgtctgatattcctttggaatacgtgagtccggtgggaaagaatagaacatattctgaatcttaatggtggatttaaaaaatctatttagagaatctgagcacttaattagacatgtctttttttccccagctgccctaattaaatagtaatcataataaggataaggataatagttgatctcagtatcctgtctcccagtgaagttgctcaatacatatttgtagatgaatgacttggagatccaaaggaaggttcagagatttgccattgtattcgagtctaccctggtgggacctttaaggtgaacattcttcttctctgggcctccaccttttcccttcccatataactattttctccttatctgcatgcttttctgcaatgcatatccgcaacaggtgagcctgggtgaatatgattacatgcaggttggtttttctcccttctttgtggtccgcgttttgggattaaatccccctgcagacttttgtctggtcagcctggttgtgactgtggatcttggtttcgtatactgtcagagatggcaaggaattcaaagatgatgtcgttttacgtctttattttataaactcgggcccaaagtgaaatgacttgcccaagaatacactgagtgagtgaggtggtcatagagagctagctctcctgacgcttagctcagacctaattccaggaaggtgactgcatctagcttctgccccaacacatcctgggaagaaatggtatcctgctaagagaatgagggctggatggaggtgtcctgcgtaacggtgtcaaagtacttcactctgtcctctggggatcccacagtgattctttgattctatgcccactgaggaaaagttgatttgagtctactccactgtttgattgaaatgggcctcttctgtccccagcctggtgagtcgtatcttgtttccctgccagtgggcattttctgcctttatccccgctcatggctgctgaatgggtcacccaggctggggcaggctgaactacaggctaatgaaattgtttggcctagttcctgcttggtggtgaaatctcagacaggatcttatcaccctctctgtgcccggaaaattcgactctcctggagcttataaaattgggatgtctgtttccactagcatttctttcccagttatattaatcaataatgtgaaattaaatcaagaaattccttatgccggcactggcttctccaatacatttatctctgtattctagtatttgctttggctctttttctcagaaggggatttttccacacaatttaggagcacagagcgaacttcctgggaaagcctagaaattcaaacatccttagctgcataaacttgggagtatcagtatatctcactgagccgtgttatttttaatctgtaaaatgggcatcagtgtgccacccttgcagatgttgtaaggattacatgagattgtatggtgtgtaggatacacctcacttcgtgtttgg

SEQ ID NO: 71159 - DNA, 1047 bp, Homo sapiens
tgcatataacctatgtgcctcctcccatatactttactctctagattacttaaaatacttaatacagtgcctatacatcacttcgtttgtgtgactcagtgtagcactggttgtgcagcaaattcaagttttgctttttggaactttatggaatttttttctgaatattttccatctgaggttggttgaacccatgagtgtggaacccatgaatgtggaactcatgaatatggaggctgattgtacaggacaaaaagtcataaataaaatgaatgaataaagcctactttaaaattgatatatatttaaaatttttaaaattgtaatttgggagccataaaaaagaatacaggtagtgtctcagatttaggaaaagtcattatttttagctaagaaccatcaattctagacttgttaatcttatcttcactttaatcaatagctctggcaggccactttttggggagagccatattttttgtaaaggaagactgaaagtcagaaagagtgtgtatgtgtgcaagagacaggaacctcgagctattgggccacaagggcacatccccagtgacctgaggcccctctcctgtactcctccaccctcacctgggtgatcttgtcttagattggtgcctcagcagaatcagaacgattgattacatgtcaaggaccaccagggaaacctgcagatgggtgaaaccgcagggttcagtctgggaaagccacggctccaatctctctaattacaaaattaatgagggctggaggcaaagcctccagacggcccagggtgagccagggagcattttgatgccctaaaacagctcatgtttatttcgtggtcttacctgatcgtgtgtggattgaagtgaaggggtgaggtagaaatggagcttcccctctaagattttgcttcttgagttaaggttggggtcaggtcagaaaatgctttttcatcgctagtgttttgatagcaaaagcaaagagccagtggcagaacttttcaaatgactcttagaggagatgacccagcgtccctgaggtatc

SEQ ID NO: 71160 - DNA, 1057 bp, Homo sapiens
acacacacacacacacacacacacattttaaaagctttcatgtgccctgatcacgctgtgcttcttttgtgattaattgagagtctttggctttgctctggagatgcaaaaatccttgaggtgacctccacagagtgatgtaaacctacaaagtgattcatctcgtgtcagtgaagttgacatcttaaatgacagtctggcttgacatcccttttgggggtatttcttctcagagcctgcaagacccttttcatgaaacgtggtctgtgttcggtttgtatagtcatctcggtgcagctttttcttttcactataacaaaataacgatggtgttttctttttaattcctttagcttccttgcctgagtatttaggaagcaagtactcttaacattttttaaatgtctgtggtgggctagtggatattctgaaatagagttttggcatcacctctttctttcaaatccccctgttgggcataggatatttactttgaatgaatttgtctgaattttagagactctcttgctttgctccatctcatggggaaattgggaaaacaaatgagaaaaagggcagtgcaaataacttcaggtcagctaatctggaggggaaagaagtgtcttaggagtaaagatggttattagttaggcacggaggcaggtgcctgtaatcccagatactcgggaggctgagacagggaaaattgcttgaacccaggaggcggaggttgcagtgagctgagattgcgccactgcactccagcctgagagacagagcgagactccgtctcagaaagactgtcagctaccagttgctataccagaggtaataactgaatgataatacccctgcattttactttctagcaactttcatgtccactatttcatttttaacatcttggatgtgtaggaccaagttatgataagcaactaacttcatctttcctcaattgagaagagtgaggcatgcttctaaatgtagtgttgaacattgtggaggatatgctaacattttagaaataatccaatttagccactgtgggaaatggtat

SEQ ID NO: 71161 - DNA, 1048 bp, Homo sapiens
tttgaccagaagaagccatgagaaggtgcccaggtacttatcaaagggcttggttacatgcccctgtttccttgttacccttaagcaatgagagagagatgcttgaagaagagcagaagctctgcttgctctttaagcttggcgagggttgggtctgtttcccctcctccattcctgggctcctagtaccatgtggttgctcagtgaatatctgctctttctttttagccttcatgtgggaggcagttgttgtgtagagggaataagactagacttgggtccaatttacctgggttgaagtctttgccccaccactttgctcttgtccctggacaagtcacttgatgttgcccagcctccatttttgttgcatcaatagagtggagatgccagcgattgatcttgtgaccttgggggcatcacttaacctccctgaccttggatttctcatctttaaaatgagggacactgaagatgagtgtggagcacatgtcggaacagacaatgaaacaggcattcgttattatcattcccatgtcagaaatgggctactatcttactgttttatctcaaatgtaatttcaagagaatgatacatggtaacgtgggtaactttcatttgtcaatgtgtggatgcgccgcccctctccccggggtgtattcctcagcagcccggcaggggagggcacatccacacattgcctgctttaaatctgttgcccgctctaattgtgtagacccactacacccaaccagcttgtatcccacagatggaaggtaatttgaataactgtttaagccaaaatgtaattggagataaaagctaaatgtctaaggtctagcagtatcaagatgaccagaagtgatgcattggatcctctgctgcttctgaatcatctgggttaattaccgtactctccaccagctttggtcatcaaggagcacacagaatcattgcttataattgaagactgtggacaatgatcacataagatcatccctaagttaccagtcccttttattctaatggacatttgaagaaaaaggc

SEQ ID NO: 71162 - DNA, 1840 bp, Homo sapiens
tttatatgtgtatgtgtgtttacacaaccaaggtcccgacccacataatattttgaattctgttgctttaacttaaagcagcggtttaagtggttaatttaaactccattttcatgtcttcatgttattttaataacagtagcattttttgattggtccaagattataggaataatttcataaatgatagttcatatcctagagtgtttccaatttttggccactagaagggaaattctatagcaaacatctttgcgcgtccatcttttagtttctgttgaattaatccctcggtgtaatttcccaagagggaaattgctggatttgaagggtgtaaacatcatcatggctccagtaatgcagtgcacgtggggagatttttaaaatcagtgttctctctgttggcatcttgtgccagaaaaatgtcagaagaaaataatgcgaatgaacaattaaaaagctaatcccctctttaactcttaaaaatatggaaatgaaataggggttttggtccatggatgctgcctgggaagccccagctctgttactgcaggcatgcctttccttgggggagagatcgtctttccagctatctttgcttctggagaaaagatgctcacagtacttgttcaacagccgcacttcagcctcctgcacttgcctcgtactcaccttcagcaatgccaaagcgcttaggcctccagcatacatcatcaacgccttctgtctgttaactgtgcaacagctcctctctgatttgtgaaataattgtgtgtccactgattaatgtgtatgttttaaaacagtgagatttgggttggaatagaagagggttttgagatactctcaaataattagaaagacaagggagtggacaattagaaatgggaactaattatggcttattgagcacttaccttgggccaggccctgctcgaaacacgtgacatggatgaacttattcagtccccacaacaactctactaggtaggcaaattgttctccccattttataggtgagataactgaggccaagagattgagtatattgtcaaggacacacaagatgggaacccatgtgtatcagtttgctagggctgccatgacaaattcccacacactgggtggctttaaaccacagaaatttgttctcccatggttctaaagggagaccagaggtccaaaatcaaggtgtcagcagggccgtgttccctctgaaggccctagggaagaatccctccttgcctcttcctggcttctggtggctcccagcaatcctaggcatgtcctggcctgtagctgcatcacttgaatctctgcctctgtcttccatggccctcttccctgtgtgtgtctctgtgggtcccctcctcttctcataaggacactagtctgacctcacttaatttaactcattatatctgcaaagactctatttccggaggtcaccttctgaggttcccagtggatatgtatttggaagggacactgtgcaatccactatatcacggtcatagcacgtcacagtggattgtacactgcaatccatggttgcaggtccctagtggatatgaattttggagggacactgtgcagtccactgtaccatggtcatagccaggacctgttcctgccttctaggacaagagtggagaaaagggaaagaaagcagaagcctgggtaggctcagggtttgcccaggtgctcttgagatggacaaagaatgggcgaaaatcccttgggcttttaaaaggttgtgtggccgggagggactggagccctgggcgagatgcctgcctgagtgaggtggggttgctgggcacagtcagactgtgtgaag

SEQ ID NO: 71163 - DNA, 1033 bp, Homo sapiens
cacatcccacatattaaagcccagtgatgccccacctcactgtgccagtttggcaaactcccttgcgagcggggaccttttgctaagtgactgcctcagtaaatctaactcgttagtttaatgaggcagcaaacgtggcctctgtgccatcaattatgaaaagagctcctctttgagcaaaagaaaagctccaaccaaggaaaagtgtcttctgtggaaagctagtgcaaagttaggaggcctggttgccatggcaacagcctcagtggtgtgtgtgggtcttgatgtggagactctggggctgatccttttgtaggaacattaattagcacttgatgcccagaactggtaagtgaacaactagcagcagcatcagtggaccttcgatagccgtagagaaagagggaaaaatgtactgctttggctacagtctctgactaaatttaatacttctttggaccaaggtacctggtggaggaagataatgcacgggcctcaaaggtgtcgaatttttagaactcttgtaaagggatgcacttgagaactatctgatgccccctaccccccttcccaatctctcacctgcactcccttctggaaaaatggactcctgaatttatgcatcatgggtggcctaattaggttaactcatgccctgtcttgaggtgtgacttggccagattagcccattaattgccaagtcagtattgcctgaggcttcctgtactgggttcggtggtgactcagtggggaatttgatagttgggttccctttggtgcccaaaaaatctccatattataggcaggtctcccagcctgtccacacacaccctgtcctaaggaagaggcagaactgtgcttcaacaaaggataggatttctggtaacccgtgtcaaaaacaacacaggctcctcagatgcaaaccattcccttctttttgttgatatcctctgttctcagatgattttctccttcaaaacaaaactactgaaacactgctgcaaattttatgggtaacatatggtgtcatggg

SEQ ID NO: 71164 - DNA, 1001 bp, Homo sapiens
ggtctctgaggaccaaacagtgtccaagggatttagaggaattctggggaactctctggggcggggggcgggggggggaatggctccaggaaaactgagaatgacaagatcttggaggcccccactgaaatctctgttacatggtggcgcctcattggtcaagtcttcagggtgctaaagtaaacttacttctccatcagttagactccaggaagcaggatgaggaggaggatgaggagggagaaggaaggtcggaaggaaagaaggatgagagagaaaaaggaagacaaattactatttactaaatgtataatacatgccagtgaccattctacatatttttcacacgtctcatggaatctttacaacaacccgaagaggaaggtctccagtaaccccgttttttagttaagttaactgaggctcagagggttgagcaatgtgccaatcacacagctcctaaatgggagagccaggcctatgaagcctggctaggttgcaggatgaggagaggctggtgctttatttttcccgggtgaaaacatgcttccttgagattctctttcccagtgactcaagcgagacctgaggtatgctcaggaccagttgcaaaattcacaaaagcaggggccaggacttctggaatggcatggaatggacaatagctgtaaacaattacaggctgggcacagtggctcacgcctgtaatccaacactttgggaggctgaggtgggcagatcacctgagatcaggagttctaaaccagcctgggcaacatagtgaaatgtcgtctctaccaaaaatacaaaaattcgcccggcatggtggctcgtgcctgtaatctcagctactcgggaggctgaggcaggaaaacctgggaggcggaggttgcagtgagccaagatcatgcccctacactccagcctgggtgatagagtgagactctgtctcaaaaaataaaaataaataaataaataaatatataaataaaaattgcaga

SEQ ID NO: 71165 - DNA, 1472 bp, Homo sapiens
ttgatcttcattctgaaaatggcaaatgaacagaatgaccatgatgaatgggggctcctgagaaacacagcactcgttctcagtgtctcaggctgggggagtgaagcctgcagccttgatggagggaaggtatgtggaaaatgaattgctgagcggaatctcagagaatggctgctgaagaaaagcatttcaaggagcaattatgcagctcattaagatgcactccattccggcctctgatcctaggggaattgtcagagcaattatgtgcaaacctcaattttgaggtctgaaaaggggttggtgcataatcggcaggagaagaaaaagaagggagacggtttgaaacaatgggtattaaatgattgtcacagcaaggaagacagggatggaaggagtggacaccctgggtacttaagactgaatgtgtggtctcaggattgcatacgggccatgtgggcagtgcatttggtacccttaataggacttcttggaatcaaagtggtttgctttgtacaaagttgtaagcatggtgtttgggatatgtttgttgaatgaatgaatgatttgtgcttgccatatcaaatgaatgaagggaaaaatgaatgaagaagttaaaaaggttaagaattcatgtaaaatgaagataataatcatacataccttacacgactactgtgagaatgaggtggtataatgcacttaaagctgtcagcacagagcctgacagtggcaggctctcaattctagctagtattgggattacattttcccaggtgtgttagtcagctcagactgccataacaacataccacggactgggtggcttgaacaacagacatttgttgactcgggtcttggaggctggaaacccaagatccaggtgccagtaaggttggtttctggtgagcctctctttttggctcacagacggccacctttttggctgtgtcctcacatggtctttccacggtgcccgtgcactcctggtttctcttcttataaggacacggtcattctgggttagggtcccgcctttatgacctcatttaaccctaattacctcttcaaaggcctcatctccaaatacagtcacattggaggatagagcttcaacatacaaattttgggggacccacctcattccataacaccaggtgaagaatcagactttgctattgaggttattaggcctgatcttgtgactaagcagctatgcaaaaccttttaaagccactagaatcactgtttcctgagatgccaaactggagatgccccagtgttctagaaaagcaaatagacttccagtaacttatgtccttctgtgttagtgcctgactctgctattcagagatgccagtgaccatcctttttctttttctttttctgagacggagtttcgctcttgtcgcccaggctggagtacaatggcttggtgtcaggtcactgcaacctctgcctcccgggttcaa

SEQ ID NO: 71166 - DNA, 1020 bp, Homo sapiens
ggcatgagccaccacgcccagctggccatcctttttctttccactgttaagacaaacaggcaactcactcatgctgtttttctgaaaaaagcaaaatttctgaactgtcttcttaaggattccataaaacaggtgccctgggagttgaaattgaccatgtgaacctgtgattttgtgtcagagtgagcactactaaatctcattttcttccctgtcttctttttcatttccaaatctgcccagaagacagtaaaagctcattaatttgaaccctgctaatttagaatatgtaacatttcctccaagctcaccatgaaggaggaatttgtgaaacaaattaatagtgtgaacataattagaaaagatgagtcttgtagtgttgggaggtacctggaggtgatccagtccttttcattggtggcttgtttcttttcaaatgaggaaatcgaggcccagtgaggttctgtggctcttccacactcacacagggggactgtttaacctccttcaggacaccagcctaaaacacggagtcttatttgtttgtgaaagacacaggctctttattagctgtgggttccttttacaatgtgaacctcaagtactaaaagtgcatttttaaagaaatattctgcatttcaggtttcccactaattatgactggccttctcccaagttagtttgagctattttggtgaggttttatagtgatttaataagaaaagcttttttaaaacctcataaaaccttctgtacaattcattctgaccaacattccctcttacaattatgtcattaacaacttctttttaaaagaccagaacttttgtctattcatgttaaccttaaaagcagcattcaccgaacccctgagaaacaaggagagctataatactttacaggattggggcagagcacatgaaatcatgtgtgagagagggttctgtacatttgtttttcttaattgccatttctgacttgggcagcctccccacccaaaaaaaaaaaaaaaaaaacatg

SEQ ID NO: 71167 - DNA, 1079 bp, Homo sapiens
cttgcatgtgaactcatgtcttgtactccgctctgatgaacctgacttaaggccactgttgaggcacaatgctgaggggctggattctacagtagatacaacaccaacccttccctcgaggggccgactctttagcagggaagacagatgtaggcacagatcatcctgtcacagactgtgaagcagagccccgtccccgaggtgtctgcaatgtggggaggtgatgctgcctgggaacacgagacctcctggattccaggccagggttccgtcttctgccccaaatgatggatgaatagaattgggggtgatgatatgggggaaggatggggcaccacttcagaagagcacagcgcaagcagaggtgtagtggggggacttccatttagtttgcaggagcctacctgtgctcagtacagaagacttgaatttgaaaagtccaagttcctgcccccaggtggttcacaagagatgcgtacaaccagctctggtggaattctgtgcaagggaagtgccgagctaacggggatgaggcgaagtgctagatacaagaggagcctggtctcctaagaagttcccactaggtgttaggagtcctagagcttctcatcaaagaaaagattctctaactgtggaatttcagaaattggcaagctgtcagggttggtctgggggaggagggaacctcctgaaatcactttatgtgatgggttcctccatccgctcaaacgggtttcttagttttagcccatcagtctgctgaggtgaaattaagttctcttccaagtttgttatctgaaatgaccctgggtccgtcagtactgcagctgcaccctgacctgggctggtgacagtgctctgcaggaggcgcccactcgttcccggtcctcctccgggaggagcccacagacaccacactggtttcccagtacactgaagctatcgctgacgttaaggagcctcttctaagctgggaaatgtgggcagctggctgcggtcctccctggagggggtgagggaaggtgttggtgaaacgcttgtggttctcaggggccctgggaaactcttttctttatcat

SEQ ID NO: 71168 - DNA, 1063 bp, Homo sapiens
aggtctttgagagacagcaaggcctttttgttaaggtttagacacattttctcttggtgtgttctagagaagcacggctttatgtaaaaatgtaagatttatttttgccagtaaaatataacacacagcccagcccagcaacagcatacatcctcactggatgccagcaacagtcactgtgaaatgttacaagtgcaaacagccccagtccctcctcagacagagcatgctgcccatgccggcaacagtcactgtaaaatgttacaagtgcagacagccccagtcccctcctcggacagagcatgctgccctttttccagggaagtggggttatttctttttatggtgccattttgacttcctaagactaccatagatttataaggaaataattcctccaatgggcctaagtgacatcctaaagttttacacgagccggttatgaaattgcaagaactgtttcatggaaacatttccatgtcaccaatgtaggcccatttattaaatttatggaacttgctgtatgtgcttttttaaagataccaaaatatatttaataacctcaacccggaggcaaacctcgagggttaattacagtaatgaatgtggccaacacccgggctattcaggaagagagagtggctctgtgctctgcctgagtgcctcaccttgtgctagcagactcagggggtaactccataaactttcatcatccaacctcttcccactttcacctctctaggtaatctggtcactcttggatgaatagcagatgtatgagaataaccttgagatttgggatcgaaaggcctgactctgagatctgattctaccccatttattatgtactgtgtggccttggttatgtcactgtcctactctgggcttatttttacatctataaaaggccagcatactaatagcactcatctcaggatttgaggggaaacagaactttgggaggagcaaggagcagcatggaagaaaagaagagagtctagtcttaaaaacgtttacaaatgtatcatagtccagaaagtcttgtttcaaactgtgccatctg

SEQ ID NO: 71169 - DNA, 1038 bp, Homo sapiens
tacgaagtctacaaactcgattttttaatgttcaattactcagtgccaagctacctgaaattggaataaagggggtggggagagggagagaatcatgctttttaatttaagatttttatttgtcaaaagaattatatggatattgggttattttgtaaattaatatttctttggggatgatgctgcgagcagcatagtgagaattatttaaaatccttcgtagggaaggacagctgtctttgcaggggaaataggatgggtcgtccttgtctgtagaagtgaatactgcaacactgtctcaaaggtttcttgtgttctggtgaattccatgaattgtgcattccataaattctaattaatattatttatagttatttaaacatggtctcattatttctttttgtggcagcaaaattctaacatctttccagaagaaatctatgattcctgctttgcttgctacagctcatttgggggcatgaatgttctccttactaacctctcatggagtcatgtgataacagccattgtcatgtgtatggatgccaccattcttgaatttctgctagaaataagtaggttgctattgcacttagagtcatctttgcaagggactcattccaaaccaattccaatcgacctgaaagtcccttgcactaaagaaatgtgatttttttttaacccaaggagaaagttggttgtaacaatttttcaccagaattagcaatctgatagaataggcttttttaacaggaattttaaactggcggtgccagttgcagtgaaggtgaagtggctattgctttatattcgacaaatatttattgagcatctactatatactaggccctgaagatagagcgttgaacaaacccaatagtcttggccctcaaaaagctttatgtgacatagagcatccagctcgacaattagcaaacccctgatattattcatggacttgacatgaggtttggactattcatgagcaacagcagaaggtccatgacccctacaaatttacatttttctatggcccat

SEQ ID NO: 71170 - DNA, 1945 bp, Homo sapiens
tgtggaagagtgctgtggttgattagcaatgtctgccttgggtgaggaaaggggaacactcctcaagtgcctcctactgtcatctccattcagcctagcaccacatccccatgtagaagtgttgtcttctactgcttgccacgtacaagtgtgaaatgccaaggtgagactcgtacacttggggatttgcaatggtttttacccctcatgaaggtcagaggtggactatttgtacacatacacacatgcacaccctctcacgtcctccagaggctgaaagactatcagcatcttggtaactgccatgcatgagcagcaaggacagccttccataatccatgccccatttcctctggaagcctggaaacttttcatttcctgttccttgctaattaacatctaaacatgcttctcatttccagccattgctgatgcttctcagttgaagtttgagccacatccctcttacagctagtgaatgagttggtagcagctactgtatataataataataatagttttaataataggggagggtgggatggggtgtgggtaagttttgccttttgttttgtttttgatgccgtatatagtgaaggggtgaggatattctaaacaaacaaaaattgaataatttattcacagaaactattaagattgtattgtaaagctcacagcaagctcagtgggcagcagctgcaacatctcaccggggaaattattttatttaacgtgagtgagatgtgggccggagaaggtagctgaagctatttataaaacgttgtgtaccttcttccgagctctctcccctttgtgaagggcgcagcaactatacccttgatggatggagatttacgcaatgtgttttactgggtagagtgacagaccttggctgtccctggaattgagaatctggaccttatttccaggcagagaacactgtcctcagaaatgggacttctgataatgaaacaggttgtccaacattttctaatacgcattctacagaacacaggttccaggaggcatcaggttggtgtgatgcagactaagggttttgtggtcaaatatccttaagaaacaaagttaagtcagtttcctttctgcaaggacttttcagccttcaatgtgtgctgtgcatggtgaatccccaaaaataatccttgagtctgtagcatttcctgaacttacatgaccaggatactctattttgcagatcaccccacagagctagggttccaccgagtatactttgcttaggttgacttagcatatctgaggtcttcaaggataaaaactgccaccccaacacccttccattaaaaaaaaaatacaaaatagcaccacagtctccatctggtttatagcaacagaggtactttatttaatgaagcaatggttctaatcctggatactgccacggactacaattctatccctcccagagggagtggaggaagtcttgggtggtgtggacagaaggaagagaggagagggtgagtggggtatagggcccagggtggctccctactcctcaggctcaaaaggatgctcagtgggaacagatgatctcttgatgagtgcttcttcagtttcatagtttggaatcgttcactgtgtgctttttggggggttttcaatggaaattcacgttgctttgcatttctgtgtccgtctttggtcagttgtgcaagcctgctcactgtcatgtgaagatggcctttcatctggcttctctctcttaagtgagaaagattgtccttcaggggacatgacatcaataggtttctggaatgagggactctttctccccgtgttttgctttgtgttcacattttcttttctaatggcattgaaactttaaaaaaaatggattcaactgtttttgcagaatgtagaaagtattctgtgtccttggttaaagaaatccacttgtgaagtgtgc

SEQ ID NO: 71171 - DNA, 1077 bp, Homo sapiens
gaggtggtctgctgacctgtggtatctcagaggggacgttcctcctcctccctgtgcaccaggtgggctgcaccctcctgcctattcaggatgtggatgccacaggagagcagcaggcagtggaaacttcagttgcactggttctcctggtggcaaaggcatgaagcacaggggtcgattaatccaggctactagaaagctccagagcaaagtgtgcgggtcccacaaatgcttggctggtggggtctggatcagtgctgagatagagttggcagaagaagcagaggcactctgcttgctttcctagccagtcctcccctacacacacacacacacacacacacacacacacacacaatctcagctgcgccattctgtgcaatcccagtgaccaaatcccttccttgcccacctctatgtcagcaggactgaccacatcactcccccgagttcccaccaccagcatttcctccaacctttttccatcacaaccagttagaaccctacaggcaacaaggccttctagaatccgcttaacccttggctgataacaggcaaatttcagtctgctacactttgttaggtccagaaggagctgcccatactactttcttatgagcatgctcagtatggcatatggacatgtaatgtcacatctttgtggagtgtgattttcttttttcacatatttgtatgcagtagagagcctgttgtagaaaacgctccctgtatcttgctgtactgttaaagaaagctgaattccacattgccaacaaaagcgtgaaaatgttcatgaaccttcctccaggaaaagccattcaagcctgattatttttctaagtaacttcaattaaattgaagaaaaaagaagctgctttctgtgtatggtttgctcatggctcattaacaaaagactgtaggggtggggtgggccgtggaccttagcatgcggggggccctgctcatgtgtatcaaaggatggagatgcaggcttcgttggaagactcagccctggtaaaaaccgccatagatccaaattctttctgttcatcgggtgaatggaagcttttcttcttt

SEQ ID NO: 71172 - DNA, 1097 bp, Homo sapiens
cctctttcttatgtactcttttttgaaatacgttttacttatgtactcttttttgaaatacgttttacttttttgaaatagtaaatcctgtaatatattgttattattttttgcttcagttatttttaaaaagagactaaaaatgaaaaatatatcttttagattttatcatataaagttatatttccagcactctttcctttgtgtagatccaggtttttatctggtattattttccttctgcctggagaaattcctttaatgtttgttgtagggcaggcttacagagaaaatagagtctttaggcatgtctctcccagcgtgctctttcctttcccttcacctctgttcgtatctctaacaatgtctatttttaacttctttcacccctatctcagaagagctgattcttttgcccaggactgactagttgacctgtgccctggatactattccattacaattccaatgggagccttactccatcaattattttaacttttccggtatctcccatgtcttcctctcttacatcttttccctttagcttacaaatgtgcacaagttttttatcccaagtcacctttcccatagtgctctgccttctcaagcttctgttctgtctcttctactctctacaatcaaactttcccaagtgtagtctgtattttttcaactcattatagtatttttcttccttctcactctacaaaactgcttttactaagctctccagtgacctcctaattactttatccaataacttattttcagtcttcattctattcagttgtttaatactatttactataccctttttgcaattctaccattctcatcgcttctctgaaaattctttttcattttccttcactggttccttctttctacctgtctctttgtattcttcaagaccctgctcttgagcttctattcttagttttcaccttctttatgggcaatattgtctcatccagagattttcaaagtgtggtccccagaccagcaatatcacttgggatcttattagaaatgcagatgcttaagcctgaatcagcagctcggaggtagaactcatcaattgattttgatatatg

SEQ ID NO: 71173 - DNA, 1032 bp, Homo sapiens
cagagcaaggctgtttcaaaaagaaagaaacaaagaagaaagtagaatggtggttaccaagggactggagtaggggtaaatgggtataaggtttcagttttgcaagatgaaaatgatctagaggtctgccaccactgaattgtacaactaaaaatggttaagatggtagattttgttacgtgttttttcaccaattaaaaaaaaatttaataaaaaaggataaagaggagggaagcctaatgttatgctctttatgcccgaatttggcgaaatcgagccttgcccgctgttttttcctatgacagtgtctgaacctttctttttcccaggagtaggaatggcccctgctcccgcgcagcctccaggctgcaccacgctcgccccgcctctctctccgctccttactccgcccaccgcagtttcctccaatcgcggccctctccccgcccccttacccgagcctttttcctgcatccgggcctgagagtgcaggcttgagggaagcatggaggtccatggcaagcccaaggctagcccgagttgttcgtcgcccacccgggattcctcaggagtcccagtgtccaaggagctgctgacggcgggaagcgacggccgcggaggtgacggacgggtgacggcggcatgggccgcacacgtgcggcagaggaggcgcggccggtgcagtttgggagccggccggtggctccctgcccgggctccgtaccctcgaggggagccccggggactgctgcggggctccggcgtgccctgcccgcggcaggggtgggggctttggggcgggcacccggctgcgggcccggaatggtttccccagctagtggttcttatattctgcaaggtagtgagcgcccaccctgccaggcgccgctgccaggcatctgccctgccctggaagctgggaagctctcgagttcttttggggaagggagggcttttggtttggctgcctgggtcggagcagttggctgatagggggaagcggagtaatattatgctaacagtccctacctc

SEQ ID NO: 71174 - DNA, 1037 bp, Homo sapiens
ttttgctctacttgattcattagttggaaacaaaagcagtaccagattttctatctgtagcaatatatttaaatctgaggacagagaaatacctttatttgtattagtaatttctctttctgtaatctgaaggggaatgagagctaacattcactattacgtcgggctttatttgtgtgcatgctcttagggagtccttccagcaccttattttacaaatagaggtcgtctacttgaccttggccactattttcttttcttcttccatacgctggacattttagtcatctgttatgtagccatagcagttacataagttttgagagtctgttatatgcgtggttatgtgctgggcctcttttgagagagaaaataaatatccttgtttgttgactgctctgtatttggcacagtgactgacagttatcactcctcttttatggattagtacgctgaggtttcaagaggtagaattaaatgtattaattaggattcttggttgcaaatgactaaaatccagctcagattgccttaagcaaaaaaagaaattatgttggctctttttattgggggaaaaatactccaggcacagtagatttcaggtgcatctggatccaggtgctcagtgtcctcagaggtcagccactctgtctcttagttctgctttcctgggtattggcctaatctagagcgtactcttcccccaggtgtggagagttgccagtttatcagcagcttcagccttatattcagccaactcagtcattcactcagaaagatttctctctcaacagttccaacaaaaggtcctgagtgatctattattggcccgactagagcagcgtgtcactgtgatgccactaaagcatggtacagtggccaaggatatggaggatgtaggcatgtatggggtgaggggcaagagtgactaagagtgacacaagcttaaaaggaaagccagggttatattatcagaagaaagggaacgtatgttgggtaggcagaaataaccactacttaattaactggcccaaggt

SEQ ID NO: 71175 - DNA, 1058 bp, Homo sapiens
ggatcatttgaggtcaggagttcaagaccagcctggccaacagggtgaaaccccatctctactgaaaatacaaaaattagctggatgtgatggggcacacctgtagtcccagctactcaggaggctgagaggcacaagaattgcttgagcccaggaggcggagggggcagtgagctgagatcacaccactgcactccagtctgggcagcagagcaagactctgtctccaaaaaaaaccaaattcttatcctttatgtttcaatatgtttgctgaatgttggttcttcccaatattgttttattacgactttttaaggaactgctctgaaatagatttcctgtccactactttttgcaggatgtggctttgtttgagatgaatcagtcggattcaaaagaagtggacagttcagaagagagttcacaagacagttcagagaacagttcagaatcagaagacgaagatgacagcatcccatctgaagtcaccatagataacattaagcttcccaattctgaaggtggaaaaggcaagattgaagttttggacagtccagcaagtaaaaaaaagaaatagtcaaataaattatctgaaaagaaacaggtgacatatgtctgcaaattctgtgaaaaagaatgtgattcacgggttcttttgcttttcaggcacctatggtgcttttatatgttaaaaactttagacaagttaaatttgacagagtttctttgggcaaagaatgattaatgagttaggtagcattgtaaactgaaaggggttcagagacctccgctctacagcaaggaaagtgtgcttttatcagctgaacacagaagtagagtacaggaataacttgatgggttacagctaggtgtttgcctaaataaggcaaagaggagacctaaggctgcctgatgtcccataggtatggtctgatctaaggagatctaaggctgccttgtccgatgggctgaggcttggctgtttgtgattggccagacttggctatttgttataaaaatacactcctgagttaggttttggtgtgtagagtacagga

SEQ ID NO: 71176 - DNA, 1076 bp, Homo sapiens
aattggctatagttccagatggaggagttctagactccatggatccagatgaactcatgattccctgtcttcttgtgacttatcataggccttctactggacccagtctctggaccctgtttggtaaaagaattgttcaagtaaatttggagagctcaaaacacaaatctgtgtagctttaatctgaaagggaaatcacacacaacctccagttgctgtgagagaggaatggttacaatagacccagcaaatacattcatttggtcactagggtgctcctgggcggttgttggaagtcgcctttggacgccacttctgacaccaaaaacttaattgttaaaacctctagacaaattaaatttaacagtttgtttgagcaaagaacaattttatgaattagcactcaaaactgaaaggttcagagtgttccactctgtggcacagagagtatgcttttataagtataaattgaacttggaagtaaactacagaaataactggattggttacagctaggcatttgccctatttgtgcatggtttgataacttgactgcctatgactggctgaagctcacctgtttctgtctggcttaaacctagctattcgttacaaaagtattctgctaagttaggttttggtttgtttattactgaggtagattgcagtttgttatataggaactacaagtaccaagggagtctcaggctaatggcctcctgcttatttaatttcacatatgtaatattggatgtattttgtttctcagagaaaccagagctagtttttaaagagttgggatatatagcatttggatgtcttcccagggtagaatgatctttattctcttctatggtagagtttagaaagcttaattttgtgcatggtgatgagtgaatttgttagcatcttttttcttcagcatggatttcagaaacatcaattttattttaaagtaaaaataaaggccaggtgcggtggctcacacctgtaatcccagcactttgggaggccaaggtgggcagatcacgaggtcaggagtttgagacctgcctggccaacgtgaatccccgtct

SEQ ID NO: 71177 - DNA, 1024 bp, Homo sapiens
ttttgaagcaaaaatctcattctgaataaatctcccatctgttccaataacattttaattgcgcatcaaatatggtacttatttttaaaaactgcctagcaggatagtttgtgttactctgcctgtatccatgaccgtgataagaaatgtaagaaaaggccaggcatggtggctcacacctgtaatcccagcactttgggaggccaaggtgggtggatcacctgaggtcaggaatccagacaagcctggccagcatggagaaaccctgtctctattaaaaatataaaaatgagccagatgcggtggtgcatatctgtaatcccagctacttgggaggctgaggcaggagaatcgcttgaacccaggaggtggaggttggagtgagcgaagatcatgccactgcactccagcctgggtgacagagagacagactgtctcaaaaaaaaaaaaaaaaaaaaaaatgtaagaaaagaggttgagtcttattttcatttgtatttctctcactgcctagcatagtgcctttcactcagttggaatatataataaatgttcattaaactgactattgtttccttctctttatgtcaacaaaataattcagcttaaacatcagttcacaatcctgggtcaaaatcctgaagcaaaaatacaggatatgtatgatctgtagacttttcccaaaagttttaatgttggaatctttgtgtttgactccccaccatctgttcatggaaaactcttgccagttactggtttaggaatgggcacgtgatgtgagcctaaccagcgaggcatgtggaaagtctgtagacttttgggaaggaaagtgcagtcatgcactgcgtaatgatgttttggtcaacgatggaccacatatacaacagtggtcccataagattataatgctatatttttaccgtaccttttctatatttagatatttttagatatacaaatatttgctgttgtgttacagttgcctacagtattcagtagagtaacatgctgtacaggtttgtag

SEQ ID NO: 71178 - DNA, 1126 bp, Homo sapiens
gatatgatggctggcccccacatagtttaaattttagtaaatagcttttgaagcaaattttacatatgatatagtagaaggctgatcctggtcgtatcataccatcttcctatctatgtaactttgggaaactctcgcaactcctctgagcctctgcttccctatgtgtaaaacagggatagtaaatgccttcctcaggacccttaataggagaattcattgcagtaatgtaagtaaagcacctcacattaatgctttgctcatggtaagtactcaaatttaactctgatttcctccgtcaccattcttaaaagatattgagatagtttaattaactagatgaattcatttcccacaacccttttcaatcatcaattcctagatatttttctcatccattgttctgacacaatgcctgatacagcagcactgaaaaatgccacacaatgaaaaatggcaatagtacaaggaaaaggggtgcttttctttgggcagctcgctcgtccttcatgggacatcttactttccatttttctacctattggttctgctgttcactggctgtgtgatcttgggcaagatagtaatctaatatctcagagcctaggttgagtatctataaaatgaaaatcaaatctctatctcagtaggtgttgcaaggattcagtgagataatatacataatgcacttaacaaggcgtttggaccatagcattgaagaaatggaaactattaacagcccatttcccattggcagacagaagtagtcaggtgagtaaattttcaccatctatgtgtgactagaaggcggcaaatttctgaatcacatgagtctccaaaagatagccagaaagttaaattctattaatcctcctttaaaaataaaatttcagtaaacattcctttttctttggctttgaagaagccttagggaatatttgtcattttggagacttggcagaataacatgaggggattgtagggaatcaataaaaactaaacaacaaaatcagagtcagagaacattttcaaaaggaagaataggaggtttgatcccagcatgataaacagagcgaatttggcctggaagcacttttgattatactatagctcatttaccatccca

SEQ ID NO: 71179 - DNA, 1069 bp, Homo sapiens
cgcctgtaatcccagcactttgggaggctgaggcaggtgaatcacctgaggtcaggaatttgagaccagcctggccaacgtagtgaacccctgtctctaccagagttacttttctaaaaaataaaaaaataaaaaatagaaatacctatacatcaatcttcctctttctcttgcattcattcttccccattcaccgttttcaaaagcatcttttgctgctgctactgctttatcaacatccgccaaagaagcgtaggatactttgcatattgtctatttcaaggtaagtaaaaataggccccatgagagatatgaaaatatggttcttggaattaatattgtattaatagaaaaaatagagtattactgattttaaaaaaagttatgataagaaatgagtatatctagtactacagtaaagaaaaagaacaattttaatatgaaaattgtgaaccagaaatttagtacttctcatatcatactactttatggaagaacacatttaggaagattggaagactgtagttcttccagtgctttaggaaagctgaatttcttgccatgagtcttcaaagtctggaaagttttttcacatatatctctatgcagatgagtgcctctggtgtgtataggtaaagctacctgtctaaatttatcataaatgttctataaaataggttactacagttaatagcagctggtaccagaattgagtcattgaaagaaaagcatgaagtacatttgtgtgaagtacttagaggcagagtgagagaataaaagggcttcttaagactgcctcttttacaatggtgtattaactaaaaatccatgaccagtgatcactactcacactaaagaattactcacagatccatctgttgggttgatagtgtcgtaagtctttccatcgtctgcatctgtgaactgtccatttatgaaacactggtatggcatttttaccatgatttcattgacctcctttgaaatctgagagaagtatattaatagattcaatggatttccgtgtttaccaatttgatgtcaaacagcaataaagaagcatattcac

SEQ ID NO: 71180 - DNA, 1032 bp, Homo sapiens
taaaacctttgtttgctcaatacctagtaacagtcaatggagctagtactccataggctattcttggtaaatgctgtcctggttcacgctgtatgtctagatctcaggggagttcatgcaacagtagtaaccaatcaggacctcacaactgttcaagcatgcctagtttcttgtcttgatcacctaggtaaaaaacagaaagaatataggcaattgaaatacactcaccctctgtgtaattaaaaaagtctcactgggtgttctggcacaatcctgaaatctcagctacttgggaggctgaggcagaaggatcatttgagcccaggagtttgaacccagactgggcaacatagcaagaccccatctcaaaaaaaaaaagtaaaaagaaaaaatctcaccaattgatagcagaggctcctctgtgcctgggcaggatggatgggtgataaatgatagagccgtgctttggactatcaattatatccatgggaatgaactgagtgcagaaagggagcacatttagctctgcacccacggatctgtaggcttctgccacttctttgatggtcttgcccttgaccctccatttaggaagcttgaacacaggggtcccatctttctctgcagccaaagctgagcataaaaaagaagattttttttttagaagttagccataattttacatcactatgaattcatatgttgtaattttacagtttcatgaaatatttacaaataaaacatggtgaagaacaatttagattgtgactagaatttcacctgttgtaattggatcacactaaggtgatacatatctatatacttaaggcataataaattagaactgaaaagtttttggctagatgatattttaagattttaatgaaagctttttcttttttagatcaaaaatggtacctttattactgatacaacattttaagaacatagctttagatttggaggcatgtgccaatacttcacccaccaatttaacatactcacctctggcacagctagaaagccatgaaa

SEQ ID NO: 71181 - DNA, 1585 bp, Homo sapiens
tcctctcgcacagaacgtcttgactaaaaaacaatccgtacagaatgtgcgggagagctgtaggaactcctacggtggcgacagagagggaaacaggcttgttggaagaagcgcctggtcagcgttatcctcgaggatcatgccttcctgttaattccccaccccatcaattctacctttttaggttagactggggagtaactttcccaggtattaaaaatcgtctagagagagcagggcgaaattagagtgccgaagtggcttgagaagcacagtgaatggtggcgaagcccgagccgggtcgcaagacgcccgctggcactgccggcgccatggcggccgccttcggccacggcggaggactcgctttcccaggggcccccgcggtcgcaggggcaacgagcccggccggccctcgcgagcggaggcggggccggggccggaagtcacgtgctgtgacagtagctggggtgaggccgtcgtcgccgcacgggctggttggggctgtgtctgtgggaggcgccggggtgatggcggtggagactctgtccccggactgggagtttgaccgcgttgacgacggctcgcagagtaagggagctgcagggcgagggctgcgggtggacgctccttcggcccgccgctgttctgggctgggcagcgctcctgcgagagggacggctgcgcagccgtctggtgcgggacacttcagagcccttggggtgtgcgagggacgcgctctccagcgttactttcggggttggggtcccagccacggcgggtcaggctgcccgttcagggctcggcgtgtgaggcggagactctcctggggagcctgcggtgccccgcggggagcggcgtcccccttcagctgccccggggcttgggcggggcgcgcccgggaggcccagcggccccgggatcccaggctgcttctgtctctggcctcttggggatttcgccagattctgagcgttcagctctggaggacgctgatgtctgggttcctgtttcggtttcctgtttttcttcttttcctcccaaatcaacttttgcaagtttgggtgtctttcccatcgcgttgctataaccgtagaagggagcgaaaaaagaacttttcaccctgcgaaaataaacacgtgaatgtcattttatcattttccaggccttttatttatgctaagtgatatttttcagtgatgttctgcagtttccatcgcagttataaaggcttcaaaaattacagcaaatcttcaaattttgcttcacaagatcgaattgtctgattttaacttagaagtctatcccgaaataaacaaattgtgtttctttcagtaaaatattgaggccaaattaattgtagtgaaactctacttgaaataaatacaagttggcaatctgcttcttatctttggtcatagtaatctgtgtaagtgatctaagagagattggagcatgctgtttgtgattttttttttccctcatagttttcccaaaaggtggaacgttgcttttaaaaattccggatgaattttgcttgatttacgaagagagactaatgcctacaatgttagatgaattaggt

SEQ ID NO: 71182 - DNA, 3826 bp, Homo sapiens
gttagaacgttctcagcccccaaaaaagaaaccatgtaccgtgtgataatcaacccccagttcatgccatggcatacctgccctaggcaaccaccagtcaatctactttttatctctatgtgtttgtctcctctgtacacttcatataaatgaaatcatacgatatgtgctcctttgttgctggcttctttaacttatgttttcaaggctcatctatgttgtcacatgtttttagtactttctttttttgctgttgctgaataatattccattgtaaggaatggataaccacattttatttatccattcatcagttgatagacattggatttttctactatttggctgctatgagcatttgggcacatgattttgtgtagacatatataagtatattgtatataaaatgtgtgtacattgtgtgtatattttatacatatgtatatatgggagtggaaatcctgggttatgtggtaactatgtttaactttttgaggaactgccagaatgttttccaatatggctataccattttacattactaccagcactgcatgagggttccagtttctctacatccttgccagcctttattgtcttgattatattcttcctagtgaatgtgaaagctcattgtggctttgatttgcatttctgatggctaataatgttgagcatcttttcatgtgcttatggccatgtgtctgttttctttggagaaatgtctgttcacatcctttgcccatttttaaattgggttatctttttagtattgcattataggacaagtattgacttttaattcccaccacaatcctataaagtagatacaatgtcatctccatttgtaaatgagaaaactaaggcatagaaaagttaagtaacttagtcaagtaagtgacacatttagttaaataatgaatatcaggcagcttgactccagagcctgtgcccttatccaataccctgaactgcctcacaaatactttatatatttgtaaactgaaattactttcctttgacttcttttcttgcaggctggatagacttagtcttactttaaaaatcatccccccccaaatttgtaattgtctctttttgttcctcaacacttctgtgagaatcattgtatgtaagttataggaactctactaggaaactgtcattctcaacctgtactatctctgagggtaataagtttcatatatctgtcacttggcattaagtaatacatgttgattttttaaacagatgctgttgggctttctcgccattaagtaatacttgttgatttttttaagacttgctgttgggctttaagggcctcttctagataggattataaaatctgttttttttctcaactctcagattttataaaagggtgaaatcatctcttagtttttatcttcccctacagaagctttctaatctttacaatcttattatatgacagactccatctccgcagttgctctcttcggaacctctgtttaagttctattattgggcagttattttattgtttttactatacaaggttcttagtattttgggaaaaaccacaaactcagataaaacctctgtaaacaaaaattacaacctaatgagaaagggtatataataacttacttgcataaatagttagttagtatgtaaccagaagggagatctgagatttcacttgataaatagatcacatatagtcaatgatcaggaagaggtggaaattgaacgggctttaggagtgaactccacatactattttaagtgtttctgagcatggatttatacaagaaaagatgtattttctgtcttgtttcattcttaatttattttgaccctttagctacaatatcttattaaatttgtggctgcatagaaaattcaaaaatgatgaaaggtttttccccatgatcataactaatggagtttaataatgttactattaccttattaccttgcattttcttatactgcactcataatcagccaccttatgctccataggacaagtagagtcgtgattgtgtcatgttgggccatttctttccttacgtgttgtctaatgagattgttttggatgaagtagttgatatggtgctaatgttgagtacaggatctaacacaagtttaagtcgaataaagctagcctcaatttgtgtttttaaaatttcagttatttttcaaattaaaagaaatgttcttttcctttgtttctgtagcttttgccttatgaacagtcctctcttttggaactcataaagactgaaaacaaggtacagaatcctaaatctaaaaaattgttttaaaaatgttttagttatctgtaacaatttactttttattttgtttttactcatgaaactaggtcttaaacaaagtcatcactgtttatgctgcactttgttgtgaaatcaagaaattaaaatatgaggtaattatttgaattcttgtcttaaaactttaaaaacatcatttagaagcaagtatgtgtttatatatgtacagtgtgcaataaatatttattgaatgttgaatgaattatttatttaacgtaatactaatacggactaccattcattgagtacttagtatgtacaaaacaccaggctaacactgtaatccttatagtaaccccaggaggtaggtgagacattgatgaggaaactgaagcttaaagagagtgtcacttgcataacatcttactggtagtcaacagtttgaatctaggtttacaaacctccagagtttgtgttacctgccatatatactggctatctagagaaaactgatttttttttcttaaaatgcatttagttttgtgtttccttacccaagaaccattaaaagtctggtagaagttgacaaacttcgtattttcttctcctgctttttgataccatgtggttgctctttatttcccataaactaatgggaggatgtgggacagtgagggtggtcagataagatgaagtaaaggctaaaggaatcaagatacagctttgagtatcagtaatatttttgttactctaaagatgaattgctttataaacagattttgaatttaaatgaatttgtatgcaaatgatgtagccctctgtttattactaagtatacagatctaagagagcataggaatttggaaacaaaacaacctttaaaattattttaatttttttcttaaaaacaggctgaaactaaattttacaatggtctcttgttttatggagaaggaggtaagtttaaaattccaaattgtgatgcctttttgatattgaaatgaacaaaaagttaacagacaattttaggactactatgattatataatagtgtgagaaaaataagtattcatattttttgttggtatgtttggtaaacaggtaaaaaagctgaggaagcagcagcaaatttgtgatatctttgtactttacgaagtactgtaggtagatgagaattttccttgaattcattaaatagtgaagcaaatacttctaattatttgattaatgattgtctgatttttctctttggtgtaaaaattctgttttcaatactatgcagagtaaaagatgtcctaatgaaaaaaaaaaacttttcccccttttttggtattgattgagtttaaatttaaaaaatgaaatatgcttattcatgttgccttttacagctacagatgccagcatggtggaaggtgattgccaaattcaaatggggagatttatttcattcttacaggtaactgatttttactttctactgagcttttacttcaaaaagtttgagtaaattacacaacacgtaaaaagttctgaaaccttcaaat

SEQ ID NO: 71183 - DNA, 1071 bp, Homo sapiens
acttcagatacacactgtttctataggtttaaaagttgagagcttctgaaaatggattttcagaaagtctaggatatgttagatatgagctaattatttaatgacaaacatatccctaggataagtgatacgacatttcacttgctgtgtgccaagcctgcttatacatacgattacaggtgatcagtgtttgaagttattttacagtgacttctggaaaccccttcctgccatagttgtactttctatactggcagcttttgagctccttcactcactcagatgtttattcatgtaatagggtagaaatttattgagaagcagttgagtgttagtcactatgctaggcagtggatattcaaagaaggaatgagacagcacctatcatttaggagttatataagtaactacaatattagacttgaaataggagtatgaatgaaatgcagtgggaacaaagagataggaacgaccctggagtacaggaggtgagttaagtattgattgcttgagggatgcttgaacttgtctggcttttggttaactggaggctttattggaaaactgttttgtttttgttagagttgttaccataaaattcagtaaaaaatggtgagatttaaagagtaactttataatatatacccaccttctcgtttcaggaactgtcttgctttgttacgaggtgctatgaagtggtgatgaacgtagtccaccagttggctgccctctatatcagtaacaagtaatggattttagaaatatttttgcttttataatagagatgcagaaaatgttctttctaaaattaataacttgtaatagtttttctttcattcagcattctttgaacacttatgatatttcaaacactacttgatgtgtatcatacgtaggttagtaagatgcagtttccaccatggtgagcgaacccattatctgtctgaatgacagtgtctacagaacaatcttcaagaaatttgaccatatagaagaaggctaacatggaattagtacatgttctgtgttctctctctttattcctttcctctacacgaatggttgcctgac

SEQ ID NO: 71184 - DNA, 1609 bp, Homo sapiens
ttctcttcttgggaaagtggacttgacgctcttaaattttaaataactagagccttaataaagataaatattaaaattccaagatcatctgctcctgtatgtatttgaaataagaataaactatgacaaaaaggaagttttttttaacttggttgttattttattataggattgcacccaaaattatagagacaactggagttcattttcaggtaaaagacatttagcttgacctgtaaaactgtaattattactatattttactttggagtttgtatggttggagagtatgacagtcataggaacactcttaaagaggcgtgtgtgtgtgtgtgtgtttgtgtgtgtttgcatttgttctctttcatctgtgaagttgatgagtcattattgaccattatcagtgtaacttagtttttcccagtagtgccgtaatgcagattctctaaatgatgtctttggacagtgaaataaatctgcagtattgcaactaaggatgaaattttgttcatcttaaaaagagaaaagtattctctatttaagactaaaagacaaatagtcctttctgaggatccaacctgtagctgaataaattgatttacccactacttttactaattcagtaatcagcccaaatgattttactttaaacgtctacatgaggcttaacttctaactagtgactaaatgataatcattaaaggttttttgacagactatgtatgagcacttgggagaactgctaacagttttgctcaccctggatgaaattattgataatcatatcacactgaaagaccactggactatgtacaaaaggtacaccaattaaaatattttaaaatgtttcttactttggttaatgtatttgtgttagtaaaaagtaaacagatataaataatacagattttctaaaagacctggggattgatatttagaaggagctcatatcaaatatttttatgactacagtaaccattctttaatttcacatgagtttgttgggacgagtataatacatctgtataaagcatcctaattcttatagtagtagaaagttaatttgcctagcttaggactcagatttattgttttccttgggttctattcaggtgacagttttttcttctttttctttgttgagacagagtctcactgtgttgccaggctggagtgcagtggcgtgatctcggctcactgcaacttctgcctcctgggttcaagtgattctcctacctcagcctcccaagtagctgggactacaggcgtgtgccaccatgcccagctaacttttgtatttttagtagagacggcgtttcaccatgttggccaggatggtctccatctcttgacctcatgatccgcccgccttggcctcccaaagtgctgggattacaggtgtgagccaccatgcccagcccgacagtttttctttcctgagcttggttttattttattgtataccctgaattttttttagaccatggtttattttattcatgttctgagtacttattaaatgtctggtatgtacagattatgaggcattttgattgaagatgatattaaaaagcgtaagaaaatctattaggattgttgtgttcaaatt

SEQ ID NO: 71185 - DNA, 1017 bp, Homo sapiens
ggttcaaatgattctcctgcctcagcctcccgagtagctgggattacaggcgtccaccactgcactcagctaatttttgtatttttagtagagacgaggtttcaccatgttggccaggctggtctcgaactcctgacctcgtgatctgcccacctcagcctcccaaagtcctgggattacaggcatgagccaccatgcccggccaggttaaggtttttaagacaacccttaacaagtctgtttaattcttcctaggcccagggaatgtaatttgggtttgcacagtctagtatggtagcttctaactacatgtggctatttaaatgtaaataaattaaaatgaaatacaaaattcacttttttactcacgctagccacatttcaagtccttaatagccacatatagttaatgactagttatatcagacagcacagatacagaatatttccatcatcacagaaagttctgttggagagcgctgctttaagcaggttccactcgaaattgcattatattccatttataatatacttcaaggttacctttagtttatgttttacatgatcacagtttttaaccgattgatctcaactcttgtttacagttgaccctttgaataacatgcttttgaagtgtgcacgggtccacttatatacagattgtttttcaataaatgtattagaaaattttttgaacattagcaacacttttgaaaaaaacttgcagacaaatggcatagcctagaaatattaaaaaaacttgaggaaaagttaggtatgtcatgaatgcataaaatatatgtagatactaatctatttatgtgttaattgacttatgttatccataaggcttttggtcaacagtgtgctattactagttaagtttttgggtagacaaaagttatatgaagatttttgactgcacgagggtcagtgtccctaactttatgtttaagcgtcaactatatatcaatttaaatgttagttcattaggttaagaagataatttttttgtta

SEQ ID NO: 71186 - DNA, 1680 bp, Homo sapiens
ttcaattttattactttcacataactagtacccaaatatataaatacatatatatttttcattcacaaagatctaaatattagattagattaagaacctgagctttagttttagtaaaatttaaatgatgaatatagaaatttatcatacactgtatttagtgtatgatatttaaatgtttaatcgtttattattgagagtctgaatttctctttcaatgtttcctgtctaggcctgtatagaacaacaatttgattctctcaatggaggagtatctgtgtcaaaaaatagtacttttgctgaggaatttgcacatagtattcggtcaatttttgcaaatgtagaagccaaacttggtaatgtaaatcgcattttttggtttttgtttataaaatttgcatttccttaaaagcataattgaagtatatttgttctgctttctcttatgttattgatttgtaaggagaaccttctgaaattgaccagagagacaagtatgttggaatttgtggactctttgtattgcactttcagatttttcgaactattgataaaaagttttataagtctttattggacatttgtaagaaggtaagaacttgaaacttatttttcaatttgagcagattaaaaagattgcagataaaactaaatattttaaaatgcattttattcctgtttacaaaaataatttaaaagtattcacttgtaaaattcaagtattccagaaataagtaacttagtgaatgaaaatacgtcgtatttctacatcatattactacatattggtagatggtgttcagatttgttcctgtacaacttctcttagtgctactaatactacttttttcttttccttttctttgccactgattttcattactgaagatgaagaaatttaaaatatatttctttctatgtctttgctattttcataatgtggtatctgatttcaaaattgaaagattagtttgtgtgtaacatcaagtgatagtaactatgataacccagccaattttttaaaaaacttatgtacttaaatagaatgaaactaaaagacatgaagattcaagtttctattgttgcatttttttatctgacagtccatgaaagggtgttttgtgtgtgtgttatttaatattcaggtgaataaaattgtcatgctcaacaccagatgtagaaatgccttaactctgccacagtgaaagatatttgtctcataatatattaataagtattttttgtggttattttttcttgaaatcagttgtcttccatgtgtattatagaacttttaaacagcttgttgtttagcctgcatttaatgaattttccccttttcccttttctgtttcaggtaccagccatcactctaactgctaatattatttggtttcctgataattttctgatccagaaaataccagcagctgccaaactgctagacagaaaaagtcttcaagccattaaaatacacagggatacttttctacaacagaaagctcaatcacttaccaagtaggttttataaacaagtataatgaaaatatttagatatcctttattttcaaagattatactaacacttaatgtatagtaccatttgaattataagattaaatgtacttgataagtaagggtcaggcaatctccaggagatttgttttctagaagtttttt

SEQ ID NO: 71187 - DNA, 1317 bp, Homo sapiens
ccaccaccacgcccggctaatttttgtatttttagtagagactgggtttcaccacgtcagtcaggctggtctcgaactcctgaccttgtgatctgcctgcttcagcctcccaaactgctgggattacaggcgtgagccaccgcgccaacgcctggctaatttttgtatttttagtagagacgaggtttcattatgttgggcaggctggtcttgaactcctgacctcaggtgatccgccacctcggccttccaaagtgctgggattataggcgtgagccatcacaccaggcctctttttaaaattgtttttattttttatttttaaacttttaagttcaggatacaagtgcaggtttgttacataggtaaccatgtgtcatgggggtttgttgtgcagattacttcataacccaggtatattccatggaatttttattggtcagatcatagctggtgtttggtggtgccatgttttgagagggtcacaaactgcagcatccctagatgcagctgatcaggatgtcagaaggtctgagaaccatgccttcttgtttgtcttctctttgttagtgtctgtatagtttggcctttaaaagagaaatctgtggaatgatgtggtgggtttctttaaatatttgagggacattcagaatgaagagggaacagatttgatctctgtggctccagtaggctaaactaaaaccaaaaggtgaagatgacagatagtaatgataataattgccaacatcatgaagctctcaactctatggcaggcattatgctaatagctttaaacataccatgttccataaagcatgtaacagccttccggcagaaaataataaatgtaacaattaatgtttatggagtgcttactatatgctagtaggtattccaggaacttgacacatacctcctgtaatgatcagaaaattgtatgaggtagatacttttgttgccattttgtagatgagaaaaccctacagagattaaacttgcccaagtttaaacaactagtaggtggcagatgcaggcagttcaactctacagcccaggctgttaactactactataaaccatttttatcccatttttagataaaatgagtcttagagaaatgaactttgccaggtcacacagctaagtacatgtcagagagggcattcaaaccagtgccaatcctattctggtgcctctgcagcaggtagcattgtgtaggctgctctgtagtctccttcactaaagctgtgtaggcagaatatagataactgtcagtccaagatctgtgggaagtgagtcttactaagtggacagttg

SEQ ID NO: 71188 - DNA, 1662 bp, Homo sapiens
tgcctgcctcggcctcccgaagtgctgggattacaggtgtgagccaccatgcccggccacatactaagttttttaaagaaaagtatagcttaaacagcttgtgaatgtaaaaaggttcccatctggaatgagactgagttgggaaacattgatggagagatttagtatttgtaatcatcccgaatagtagagagaattacattttgtattgccctagtctttctgggaggggaaagcttcctggatgtgagcttgaatcttggctgaacttatgatcttgctgcctacttaacttctctgtgtagcagtttcttgttctgtttggaggttgtagtacctgcctcataaagttaatgtgaggggtgaaagaggtagtgtgtgtgtgtgtgtgtgtgtgtgtgtgtgtgtgtgtgtgtgtaaagtgcttggaatggtacctgtcatgtagtaagcattcaataactattagcttttatagtccgattctgaccacttccactgttcctattctggttcaggctgtcatcctctttcttctgcattattacagtagcttttaggtggttttcctgcttttaccattgcctcctctgtagtttattttcaactcatcagatcctcttgaaactaaacttagatcaagttactttgctcagatcctctagtggctttctgtctctctgagtcaaaatccctactccttgtaaggccttccacaaatcccttccccatcaccccactccctccctctgtatctcgctcatctaatccctgctcacagtgcttcaggtatactgacttttttgttattacctgaacaagccagacacatttccaaatgtcttaggattttgcgtttgtctttcacttttctgcacttctcgtatatttgcatgaattactcattcatctgcttcaaactttggctcaaaatcacctactcaatgagcctactttgatcatgctatataaaattgtacctccaccccagtccttatcctttttcccctgcttttatttcttctgtagtatgtatcttttaattaatttaaaattttacttactgatttcattattatacagctctcctttctagaatgtaagcatcatgggaggagggatttgtattcattttatttactgctgatttcactgttgtattctcagtacctgtactgagaaacagtacctgggatgtttgttgaatgagtaaattatatatgtctatgtaatatttatcttttgaaaaccagaaagatgaaatgactgctgcagggaaataatgtactgcaatcagtatcaagaaatggaagtaaattttctttgctgagtaaccccaatattttcctttgttagagatgtacagtcttactacgtctttgtgagctcatggatgatgaaaatggaatctattttgtctaaagagcagagaatggataaatttgctgaagatctcaccaatagatgtaatgtttttatacaggtagttgcatcttatttcggggaatcatttttttgttaatccaacttacagaagttaaactttgaaaaaactgaacaaagggtagagtatgtttttgtttattaaagcaagttgatttggttatgttgggatctgtgtgacttattaatttaaattttctaacaacccattcaaagctc

SEQ ID NO: 71189 - DNA, 1411 bp, Homo sapiens
ttcctttattccactgtttcactgagtttaatagcattaaaagaattttaacacctcacaagacctggcttccttcatgaatagaaggggagggagaatctgttctcattgggctggaaggagagaaagcctaatgcagcaccaaactaggcaaggatgagatagcagatggactgtggggattggtctaggtgaataggaaagggggacttggcttggaactcaaaaatttctttgcctatctgtattgactgaagaacagccctctttctccttatttttcaatttgtaactcctcagagtcctcagctcttgccttaagtggcaacagataggagtctttattctcttccctggcaggtaagataaggatgaatagatacctttctaacattcaaattgtttcactcaaagcttttttaagggaaagattcttaagctgtaattatacactattattttgacagtacaaaacttctggtatgtgacaggataaataaacggttagggctgctttgaaacttaaccaccatgtataacattgtctctgtgaggaagagtatttccaaatcttaagagctggctttaagatgaactttagaaacattagttattggtaagttgaggaatagctgctgttaaatagataatgaaatcttgaagaaaatctttccttgtgattataatcaatgttttcctttacagggcttcttgtatgcatatagtattagtaccattattaaaaccacaatgaatctctacatgtccatgcaaaagccaatgaccaaaacctcagttaaggcattgtgcaggcttgttgaacttctcaaggtaggttttagattattttactgctccatcataattgagaaatgacccaggcttaaattaggataatcttgtaaggtttgactacatgattatatgagaacagaaaattgtgagaaagtacttctctctcaattgaataaaggaactagccatttaaataaatttctgagtaactacttatggctggtcattatatttaaactttattaaataaagttaatatatccagtttacacagtaaaaaaaaaagttaatgtagtgagagagaaaagaaagaaaatggaaaagttaactttaatattatcagtaaagctttactcttggaagttttaaaaaggttgcatgagttaaaaaaaaaaaaaacagcttgtctaccattatccattatagtgtttacatgcgtatgaggttagttaacataaggctatttattttgtaatttagatgaagtgctgtaatcttgtgatttgaacagtggactacttacagaggtggtcaaatgaattaagaattacagtgcacttatgcaagtatggtaacgtgtttcttagcttacttctgtattaaagaaaaaacctgt

SEQ ID NO: 71190 - DNA, 1816 bp, Homo sapiens
tgctcagttgcccaggctggagtgcagtggcgccatctcggctcacctcaacctccgcctcccaggttcaagcgattctgcctcagctacaggaactacaggtgtgcgccaccatgcccggctaatttttgtattttttagtagagacagggtttcactatgttggccaggctggtctcgaactcctgacctggtgatccacctgcctcgacctcccaaagtgctgggattacaggcgtgagccaccacgccaggactgtaaggtttttttgtatctcatttacaaatcccttccctagcctaaggtcgtaaagatcttctataattttgcctgaaatttttaagttgattgtcagaaaattatttctgattctttttaggcaatagagcatatgttctacaggagaagcatggttgtggctgattcagtttcacatataacacagcaccttcaacatcaggctcttcattctatttctgtggccaaggtatgcagcttattatgtatttagcataagtatgttatcttttttgtttgttctttcattgttttatatgtgttttctggtttaacctgtttattccattccttcaaacataatatgctcggttatttatctccatagtattttacaatttttacttcaagttattggcattatctttactgtgaaattgcagcatgtaatacattaatacacttctaaaaagacattgcacttttgaaattgatgcatcatttaaaaaatgatttcttagtaaattaacatggaaattttaaagtatgcctaatacatttgctgtttctgacagtactaagggatcatattacagaagtaaagtataaatgtcagaagcttaaatggggaaagtatttgtgtatgctctcttaaattgaatcatggaaaagataatcaagaagtttttcttctgagtcttttgttactgcctcagaaacaaatagttttcctgttttatttttaagaaaagagtgatttctgacaaaaaatacagcgaacagcgtcttgatgtgctctctgctctagttttggctgaaaacactctaaatggaccaagcacaaagcaacggcgacttattgtttctttggcactaagtgttggcacacaaatggtaagtgtattgctattacttatggaacagaaatgagatctgagatttcacagttcccttgttactgaccctagaaacctttgactgcaacttctctgcctttttttcctgtccctgatagaaaacatttaaagatgaagaactctttccacttcaagtagtcatgaaaaaactggatcttattagtgaacttagagaacggtaagtaggactgggatatgctgtggtactccaaagacagggttaatagaaacattgattttctttttagcatagcaagagaagaaataaaattcagatcgagcattagttcctttctgtaacttctttagcatgaccaaaatgagattgtgactagggatcatatttatttagctttgcttctacaggaagcatgtagcccctagaaaaactcacatgagaaaaagcagtgcaacctcagagcatctggccgactttgatgcatatcgtgattattatgttgggtatctttattggacttaaattgctgtattataacagggcttcctctatttgtgtgagacttagcaatccatgatacgtagtgttctatgattttattttaagacacgaatttgaattaacattgttgaattagtttttggaaggcttatttttgtagctccttctggctttcttgttttctttttgttgagtaagcgt

SEQ ID NO: 71191 - DNA, 1027 bp, Homo sapiens
ataaacttttaaaattgactgttttgtaaactgcatattcataaagtgtttatagtctgtagttaaattttatgttactgttaacgaagttaatttatttaatttcttccttcatgttcctaatcattttcatttcacttaattttagtttatgtcatagtaatctgacatttactcatcagcaaattacaatgcaaaagaaaaaatatttttaagaaatattcatatttttctttatggaaataagtgtgtttaaatgcacaagataggaaaggactagcgaatgtgattttttttgggtatatttagttaaagtatatgctttaggttctttttctttaggaaagttaagacagttgtggaaaatcatttttccttcagatcgaggttttgtctttcaagataattaacttttgcagtattgtttagattagagacctggtttttctaaattcatgtacattttaattttcttcttagtacatgttcagtgctttgcgcgactgtgtacctgctatgatgcatgcaaggcatttagagtcctatgagatacttctggattgctatgacaaggaaattatggaaattttaaatgaggtaacatcatatttgagattgaaaagcttaaaacatgtttggaatgtagtgtttggaaaaaaaatgttcgattgaagcagactcactgagttaaaattatttataaattgctgggtagaacaaagaactatttttagttacaatatcactgttgtgctaattggtctgtaattcatttatttagaaatcacactaggaattaggagattttaaatttacttttgtaaatagatattttaatttaaagttgtttattagaagaatgcaaatgtgaaatggttttgaatgttgaaagctgctaatggtccagttaaagcaacttaaccattaatattttactgaattttatttgcagagctcctgagagaaggaaattatatatttaaaagatttagtgtgtaacaaaagtaatttgaatccaatatgtatg

SEQ ID NO: 71192 - DNA, 1166 bp, Homo sapiens
gagggaggaattaaaaatgaggaaatttcacaatataatcctacctgggtttgatgaaattgtgaaaaactttttataatttcttgtattacgtattcttatttaggaaataaaatacatgcctggatagtaatttagaactccttggtagaccagaaaagatgattaattttattacctttagcacaatgaattttgtgattttttttttaacagttattacaaggaagcttttttcttttctctcttgcctgttctcatgccctttcctcctttgttgctggtttccataaattttatgctttaagttgcatattcatgttccttatgatggtaccatcaatcattagttttagattttcttttcaagagtattaaccttaaggtattggtgaaaataaagacttagaatttatgtaactgcttctgaccaaaaaactattggtttaaaatggagcatagacatgtagggaaacaatacaattgcaatatcattttgaaaaattaaagtatcaaatcttttgtgaatagcatttgctggacaaattatgcaaagaaatagagaaagatctgcgactttctgtgcatactcatttaaagctggatgaccgaaaccctttcaaagttggcatgaaagacctggctctttttttctctctgaatccaattcggtttttcaatcgtttcattgacattcggggtgagtgttttgctttccttcttagagtcatattctcttttttttttttttttaccctactgttaaacaaaactttgagggtatatttaaattttgtgttgttattctttaattacattttgtttcttttctcatttttattaataccttattttaaaggaacaaatctgatgttcaaggacaagttgttgttttttccttttaggtttcatttcttttccttttctactgtttcacaagttgaattttttttttttggtagcttacgtaactcactacctagacaagactttctacaatctaacaactgtagcccttcatgactgggccacttatagtgagatgagaaacttagctactcagcgttatggactggttatgacagaggcacatcttcccagtcagactttggaacaggtatagtataaaatgttttttttagcatactgtgactgttggctgtaac

SEQ ID NO: 71193 - DNA, 2432 bp, Homo sapiens
aggattttaagcctggttatagtatataaaatttagtatcttaggaaaaatggttaaatttacatgattacaaatgtgttttttgttcttaaaatgaggagtataggaaaacatttagctttgctaattcaattagttaatgtacagtatggcattgtctcatgaatgtaataatttatgttatcagataatttgcgtggagttctctttaagatgatccagataatatttaccaaaaaacatttattcagttctaaaatttgaggattctagttttccctttatcttgctgcatgtagggattatttctaggatcagtttgtatatcctttcatttattttgtatatcctttcatttattcatttatatatctgatatttattgagaacatgctaggcactgaactatgtttaggaatacaaagataaatataaatagtcccagctcatgtaatatcctctgggagaaaaaatgtgtaaacaaatttttagattagaatatgataaaagttataataaaaacttaaaaaggtattgtgatgctcctttgagctctaattagaaaaaactatggaacagtttatatgataccattgggtgttagagtaatatctatttaaagaatgaaggattcttaatagaaaacttgtactatttaaaaggggtctggtgtgatcaaaagaagcataacagtttggaattagactttctaaagtcccaaggccctgctgctgcctagctattttgcctcagagaacaacttccttagcttcttttttgtcacctgtggaatttagaagaatgatacctcatattttagaattacatataaggaaccttgcaaagtacctgaaaaatagtatgtattttatgaatgtcacagcacattctgactaccttttagaatctggctactagtttactttgtagaaaaaatgtagagaagattgttgaagagacaaatattctcaaggctggtggggagatgactgtgggtcatggatcttttaatatttaaacttaactgttcctgtctgcacaaaagataaagtaataagcagccaggtttccctaaggagatagtcttgatttgtcttttaacgtttgatcgtaccttttatatagttctttaaaataacttaaaaattattaggaaacagtataatcaataagtcattatgctgatacaagtttaactgattattttaatgaattataataaaacttgtatgtgtattatgttgtagggccttgatgttttagaaattatgagaaacattcatatatttgtgtcccgatacctctataatctcaacaatcaggtgagtagggtttataaattttttttttttaatgtaggtggagatagttggaaggctgaggggcaaggaattgatttttatgggtgaaaattaaatgaaacaaaaaataattgttttcgaggccttgtttatttttttgccttgattataccagttgtgtatcttttattcgaaatgtttaggacaagaagtgttttggatttcagatttttttttggattttggaatattcgtatcatataccacttgaggatccctaatctgaaaatccaaaatctgaaatgctccagaatcgtaaacttctgaccaccaacatgacgctcaaaggaaacgctcattggaacattttggatttcagattttcggattaaggatactcacctgtactgtcttgattgcattttcaattaaattgtctttaatgaaatagattctaaaattttctttggatacctgtttgaccagtgtttgctatgggttgcgttgttactgagcataaatttgtttcattgcagatttttattgaacgaacaagcaataacaagcatttgaatactattaatattcggcatattgctaattcaattcgaacacatggcacgggaattatgaatacaactgtaagaacttttctttgggggttgagtgggtaatagacccgtttaatagcttggaacgtggttttctcatagaatattgcggtaaacatacactactagtttatattttacatgaatttccattttttttctggttagtaattaaaatgtctggtcctaaaattgtgttggatgtgatgggagctgtgatacaaaagacactttagggtagattaccatctcagagccatcattataaatagtgctagatatttgaggacatcagcacattaatatatgtgtgtgcacacatatatatatgtttatctgtgttgatctgtgatccctgaaagtttacttttgaaagtcaacaatagatagtaatttacttaatgttatttatgccctttttggggcagggtttgctaattatttgatgtccatataaataggaacttactaaaaatatattgaatcttcttagaaatgggcattcaccgcttggcgtggt

SEQ ID NO: 71194 - DNA, 1029 bp, Homo sapiens
acacatcaaatccagattgattaaagatattcgatttttcagggaaattaaggaccaaaatgatcataaggtaggctacctattctttttaaggtatttgattaagctattgagtatatggcaaatgtgtatgctaaaattcattatttagatctctattggggttttagttttattttccctataatttcttactctgcattatctgtaggcttaaggtaaggaaaaaattaaatcataaatgtagccaggtgatactttttctttattttaaaataatataaaagcaggacatgcttattttgaaacatttaagcaatatagaatggataaactgaatatccaccttcatttctctttccattccattttctggaggcagttgctaacaatgtagtgtgatggctttcagatatctttgtatataaacatgtatatttacacacatatattgcttttaaaagcagtatagtaaaaatggagtaatattatacatagcattttgcactgtgctcatcacgtcagtacatacagatctgcttcaagttgatagggatacatccatgtatatcataacttatttaaccttcttctgttgaccattatttaggtttttctaatttttcattcttacaaacagtgctgcagtaacatctttacacatctatctctggaaatctcagactttctgaaaacttccttaaggagaaatttctaggacaaggaaatgtgaacatttaaaattgtggtacatattgcctagcactccaaaaacacttcactattgatattcccactgataatttatacgaatgctgctgttagcagggtgcagtggctcatgcctgtaatccagcactttgagaggctaagataggtagatcacttgaggcaaagcatttgagaccagcgtgggcaacatggcgaaacctcatctctactaataataccaaaattagccgggcatggtggcacatgcctgaagtctcagatgctcaggaggctgagtgtattagtctattctcatgc

SEQ ID NO: 71195 - DNA, 1103 bp, Homo sapiens
atattgtagataaggtgtttgttcttgatatattttgagataaaatatggaagaaaactattaattctactagatttttctcaaattttaagactgcagcagacttctgaaaatatttctcttaagttaatttatcaatatggtttatgaatgcatgtaaagattacatgattttaaggattaaaatattcatatctaaaattcaatttggaactaaagtggtgatatgaataatattactgaaatgcacagttgtttccaaatacatagttgaaaattttagagtcctgcagtaccacttttatatctgtgtcaattgcacatattttacttgacctaataaatgccttcccaaattcttatgtagatttgttcctgatcttgaagatattgtaaattttgaagaactagtaaaagaagaaggtcttgcagaagaaacattaaaagcagcaaggtaatctaaatttggaaatataaaaaagtgtgtttataaaaaacattctgaagagaagaccagagggtaatatgtaatttttatgccactgtttttattatacaaaattatggcctcagtttatgaagtataatttttaagacttcagtattctaagacctttccagcttctagaacatgctgtccagtatttcagccactagccacacatggctcttgagcacctaaaatttggctggtccacactgagatgtgctcaagtataaagtacataactaaccttgaagatttagtataaaaggaggaatgccaaatacctcaatcataaaattcatttcacctattttctttttactttttaaaatatttctcttcaccaacagtgttctagaatgccagtcctttcttatatgtaatctatagcagcactgtagccactaccatatatggccggtaaacacttaaaatatggcaaatgcgactggggaattgaagtgtaaattttatcttaatttaaatttaaatagctaatgtctgtcttattgaacagtgcaggacttgagtcagttgtgcatttgtcccataacacgagaggcatgcagaattggtaagaatatgtttagaaaactgtatgttttattcacactta

SEQ ID NO: 71196 - DNA, 3020 bp, Homo sapiens
gaagagctgaattttcaagagacgtactgttttgaggattcacacttaagaacatgaaaagaaatagtattttcgaatgaattaggtaggtgtaagtaaggactgtcttgcatatgtttttaagagtacttgtgctttgaaataaagcaggcctactttgctaactccagcattcacttaatatatgactttgggtgagataataaatctcccaagcctcggtgtccttctctgtaaaatgtgcataatattttataatgagatatacaaggcactgttcttgggctaagtagtgattgagggagtgcccatatttaaaggacttggaaaggagatccatgaagatacacttgtatagattgtatcttcaccaagagggtacctaaggcaaatgtttcagatgaaaaggacaggaatctagattctattctattctatttatagtgattctatttataatttttaaaatgtctgttataggaattctgaagattttcttagcaaaattgtttttctaacatgttgttacatctttttagaccctcaactttgtagagcattccattagttgcaaggaaaaattaaataaaaaaaataaaattggagctgcctttactgatgatggctttgccatgggtaagcttaatggaattgtttttccattaattttatattgaccttgtaatggattcttagaaacatctgcttgagaataggtctatatgttctttatagatttttctttcttttttcttttttatttttttgagacagagtctcgtctcgctctgttgcccaggctggagtgcagtggcacgatcactgcaagctccgcctcctgggttcacaccattctcctgcctcagcctcccgagtagctgggactacaggcactcgccaccacacctgcctaattttttttgcatttttagtagagacggggtttcactgtgttagccaggatggtctcgatctcctgacctcgtgatctgcccgccgcagcctcccaaagtgctgggattacaggcatgagccaccatgcccggcctatagatttgtttttcatgagtgttgtttaccgtgtttttagctggaatacatgattgacgatacttgttttctgtagtttataacttattgaatgccttcttagtattgctaatcacttgtccactttggcctaatatttaggctttgtttttgttggggttgtacagttttaacgtcttatatttagtttctctggtttccttgtagcttcctcaattgccatctttttagcagttgaagtgtttttttcctttctttttgaggcagggtcttgctctgtcacccaggctggagtgcagtggtgcagtcatggttcactgcagcctcgacctcctggacccaagcgatcctcccacctcagcctcccgagtagctgagactacaggcatgcatcgccacatctggctaattaaaaaaatttttgttttttttagagacaggagtctcactgtgttgcccaggttggtcttaaactcctgggctcaagaggtcctctagcctcagcctcccaaagtattgggattataggtacaagtcatggaaagttttattctttatgcttacagctatatcgtttctcctggtgatttatatggccatgttagttatttattttcttcttaattgacttgtctttagttatacttctacattgtttttaaaggaggaattaagccattttgttaaacccatcattcatttatgctgtaaaatgtaacttgaaacgggacaaacttaaaatgctaggaattattactcagaatgcttagtgttgggaattattggtgaaggagtagaataccacttctgtactcactgtaatttaaccttagttttgcttatgcctgcaggtgtggcttacattctaaagcttttggatcagtatcgggagtttgattcacttcactggttccagtctgttagagagaaatacctgaaggagataagagcagttgctaagcaacagaatgtacagtcagccagtcaagatgaaaaactcttacaaaccatgaatctcactcagaagcgactggatgtctatctacaggtagagaggagcctaagagtcacatctgctttgacttaccatttgatatccatgacttcttaatgtctgaaaagcagaagccatatagaaactaccattttcacaagtgagatgaatagtggcaaaaagattatattttaaaatgagtgctatttggaagccatttgactcacatcttaaaaatgggcgggttacttatttcagtttctgtatttatgatttccactagagcttttaaaaataataataagaggcataaaaatgcatatatttttggtattttgccataataagtatttttggtttttatttcaaatttttaaatttacttaggaatttgaattgctgtatttctcactgagcagtgcaagaattttcttcagagcagacaagactgcggctgaagaaaaccaagaaaagaaagagaaggaaggtcagtgagtggtttaaatttggaaagaccaataaatgtctttagtaatagacagtaatgcaccattttatctggtcagacatctagcttctttgtccttttggaaaataacacagacctagcattaagtcttttaaaaaaagtaaagcctgtatagatcttgtgtgaaattgaaaaggaatttatgtagtttatgcatttcacacttggtaaccctttaaaaccttgttcaggatcatctgcttttaatttaaatacacttttcacaagtttggtttttctttcatggctcaaactattagatttgaaggaacaaatagaggaggacagctaaatgttgctgaaggcagagctgctgatgactagatgttgactgaatgagatgggacagatgattaaagaactgtaaaatcataggggctatttagttgtagtaaatagcatcctgccttctttcatagtcaggccctggagactcaggcaatatag

SEQ ID NO: 71197 - DNA, 2708 bp, Homo sapiens
actccaccttcattaaaaaccagtggaaacaattgcagtgtttagcctagatttttaaaaattttaaagtgtaaacaaggtataatttgtgatgttagagaaacatttgatggatgcaactgtaatttgaagtttggcaatacagctcttctcaaatttcttttacttcttaatttattgtttaaaaatgaacataaatatccattattattttcactcatgctttcagaagaaactaaaacaagcaatggagacctgtctgacagcactgtgtctgctgatcctgttgtgaaatgatacggatggtattcactgcacatatgatgaaatcatcagaattgttaaaacttttgccagtggaatggataaactattgatgaattgtttcctgggtcacatctctggaaaatagatgttacagttcttaaaggcagtgctttaaagtgaagttcattctgtttccaaaggctctactttcaaaggttaagaatgagattttaaaattggatttttgcctggacttgagggtacaagatgtttctatttgaagtgaagttataaaagggcaaatccagattcataaactatcacctcggatttcttgtaatctacatgtttgtaatttgtatttgcatagatctttgatctatagttatttcaagtcatgggaaattcaatgcatatactatatacagccagtaaatacatgcttaacaaaaggaatgagcctgaagttcataaagaatacatatcaatattcttataaaaggaatatatgaagatggctttgatactagaggtgaggcacaagtgttttatgtactctcagtgtacagtataactgatgatccttctttcattgttaatttcatgtgactcacaagagctgctgatgtctttgatgagacattttataactagtttacattgctttgagaacatttaacctccaacagctgctttaaatttaagatttacttaatactcagaaaattcagataaagccatagagtcctgtttgaagcttcacttctattttggttgaaggcatgatgtatgatgtcagaaaaaaaattgaatgaattatttctacatccaaactcaggtttcttctacattagattgaattgaaattttggtgatggtttgggtagactttttttttatatcaagtataatttaaaacatcagattaaataattacactgttcaggcttttaaaaaaataccactgtgagaataaagcgctagcaagatacatcacttactgattttaaaaatacagaaagattttgagtaaattttgtgcccagcaagctgttagttttatttttgtaaaggtatgtaagttattaaatggttaatcatggccttttaaaaataaaataaagtgatacctttacaatgaagacaaaagtttaaaactttctaatacaaacaccattttgggaaatgcttgatttttttctattgcatttgtctgctaaacatttctttggataaatcctgcaaatacttctaacattattctttgattccagcttttagaatgggtgtacaatgccctgtttgtacttactggttagggtcagggtaacttgccagcccaagataaatactttaattgttaaaagtcagaagagacagaatatgtaggaaatgttttttgtttattatgtaaacatggcttacagaattatgaacagtggatagattaaaggcatttaatatttgtaattcataataactgtagaaatggccctaaagcatgctgcataattaataatttatattttcattattataagtgtttatattaatgatcttgcatttgattatatcaaattcgtcatttcatagcaacagtattgttttctctgtttttcttctctaacttctctgaaatcatctcctattaagggatagaaattgttactagaagagaatcacatgttctgtgttcattatccctacacatgtaaattaattattttatcaatactagatagagttcacatgctgactccctggatacctacagttgagaagaaaatgacagacaattatttttcctttaggtcaaaataatgtcactgctatctggataaattataagttcatatatttgaaataagatcctggaaacgaatttaaatggtgtcaaactgcagagcaacagggcttcagtatattcacatctaataggttaatatgtacatttggatgatgatttttcttgataacattaacattaattttattttttcagacatactgtaatttaaaaattaatgtgagcgtttgttttaagttcacagaaaacttaataattcaaattctcaggaattaaggactcaccataacattgtcagttctaatgaaattttgtaaaagatggcaagtttgttacctcacttgagtggggttttccttttcccccaattctaagagaatataatgtgtatactaaaacattaataaacataattttgaaaatttccttcccctggatgtttatgttcaaaattgaatgtcgtaaaccagtagttcttaatattaacctttttggggtcccccttaattgaatgaaatgaaatctgtggaatcatttttttataaaatgcatgcacataggtaaaaatttgaagtttaaaattggctcctgtcaatgtattccaggtgaaagaaaggtgttttctttcctttat

SEQ ID NO: 71198 - DNA, 1072 bp, Homo sapiens
ctgtgcctaacttataaactttatcataggcatgtatatataggaaaaaaccgtatatatacggttagatactatctgcagtttcaggcatgcactgggcgttttggtgtatccctctcagataagcagggactacagtaatgacaacagagccttcaaaatattacactggagacgaggtacaatcctgttaaatactacactgcagaaatcattcttggtaaagttaagtctggttgctgttccttttttcttctgaggcagtaaatttgtaaaattgtgggaaagatgagaaaatattggatacttcatgttattattttatgctgagtctgctaaatgtaaaaggtaggctttaattgattttaataattgtaacaggattttctttccagcttcacattgcagatgtttcagaagacggtattcgttttttaagggaagttttaataccacattttttttttaacaaaggctttcagatgttaggaatactttaataggctgtcaaagatgtgaagtttaaaaagggaatccagaataagtggaaatctgtagagactaagcaaaggcagtgaactcaagagatggtgatggcaaagttagagttcagtttataacacaggtcagcatatatataatgtataagaaaagttgggcaagtaagtattttcttttcagtagtttggctcctctttaccactcagttcacctgatacctccatttcccattagtggagatatactcaggaatgtacatcaaatttattcagtcgatgcagatctgataccataattcttggatcatctctaaggactataaatacattctgtaggtaagagtcaagcattctttaataatgccctcatttgatgggggaaggagttaacttttatacctagaagcacttgtctttatcagattagtattaaagtatttactcttttcagaatctgtacaaaaggtagcaaagtattaaggatattatgctttaggttgatactgctattgaataaatcgtcaaagcttaatgtattgagaaatatttggagattgcttagtatctggttc

SEQ ID NO: 71199 - DNA, 1589 bp, Homo sapiens
ccatattcaatctgcatattaaattgtgcagatataaatcatttccattattgcagaaagttctgtacattgctgaactagaagccccctgggggcagggactatatctgtcttgttcaattacacaaactaggctctcaaaaatttgctgaatgaacaaaagattaaaagctgctgaaagacagggaggtctcagaatcctcatttcttaaaagctcccaggtgacgtctgtcaatgctgtggggcatgtgatcatactctgaggagcaaggccttagagcagcacacggtgggtacttatctatcatcttaatctgaaagaggaaatctagccaactagtatgcaagcaagaaaacagataagcaggagctccagcagtgataagaagtcctcatgtgttaacagtgaacatggaactagctgatcaaaaacctctggtggttagaatacttttaaaaggaaatcccaaacttggccacactttccagtgaacatcacttttctttttgaaaagactcttggtatgtgtacacagatgtgttttgagtagctactaaaccagcgctagaatgcatcttaccttctgaacctcaataatttcttttcccaaattaatagcataacatatctgcaaaagacaagaaaagtagtgattggcaaaagtagagaaggataaaattttagaacaaatgtgatttgggagtacagtgaggtcactgttctcactgttcccacttgggaacacaggacctggctgcaggagactcatcacatagggcccggggcatttgcgtccaactgtcctgacctctgttgccaatttatgccacacaaaaaatattccaggtaagtgaaactcaggtaattccagtgttaaaagttcttaataggaatttttcttctctctcttaaatgtatttagccacgatatgtccatatacacagtggcaaacagataatttactgaaaggattggttaattgtgataaattctaagtagcagatagagtcaaaagtttttcatactaaaccaacagcttgtgtgtaacttttctaatatcttccttggttttctctctgagactaaattattctctattgtagcttttgccttaattttttttaaagaacaaatttgaggggaactgctttcaacatttccttatatcccgactaaataatatgtcttgccatgaaatttcttcctcattcaccctattctggttgataggtattttccacagagaaatttaaatcgagttttctttcagtgaggccttcttaggaggtattatctgaactcctggatggagacatgcagaataatcaactaaatatccaaggaagtaatgccagaaaactcttttaaaatggacttgtttggactgggatattatgggatcttcacatgaaaaagagaccttttcgccttctgagttgctttcaaaaatgtatgtactcagagattcttctccagtggattcaggaacacggatgacaaaaccaaccagtctcttgttttcttgatgagcagcaaattgtgtgacactggtaagttcaaactggggggtggaaaaaaaggcaaca

SEQ ID NO: 71200 - DNA, 1006 bp, Homo sapiens
tctgtttgggtaagttgcagaatcctgtgaagttaaatcttctacttgctatataatcttccattataggtaccctgagctttagctacacaggttccttaaaggcagaaagcaggacacgtggtcacacacagctatctcgcctcaccctctaacaggctttatctctatttcggggaatttgtatttattctggacttctacaaactcttctaggaatattaaatttatccaacatttgtgacataatgtatcttttaaaatttcaggttgatagatccacagactcaagtatcaagggccaatgtaagtaccgcatacaggttcatgttagtgattactccttaattcacctttgtatctaccttaaacacagcctaggcactttattaataaagatctgccactaataggactaataggatactttttctcatgacttttccagagagtagccttgtcagtttttaattctagtagttgtatgatctgttgcctttttttccaccccccagtttgaacttaccagtgtcacacaatttgctgctcatcaagaaaacaagagactggttggttttgtcatccgtgttcctgaatccactggagaagaatctctgagtacatacatttttgaaagcaactcagaaggcgaaaaggtctctttttcatgtgaagatcccataatatcccagtccaaacaagtccattttaaaagagttttctggcattacttccttggatatttagttgattattctgcatgtctccatccaggagttcagataatacctcctaagaaggcctcactgaaagaaaactcgatttaaatttctctgtggaaaatacctatcaaccagaatagggtgaatgaggaagaaatttcatggcaagacatattatttagtcgggatataaggaaatgttgaaagcagttcccctcaaatttgttctttaaaaaaaattaaggcaaaagctacaatagagaataatttagtctcagagagaa

SEQ ID NO: 71201 - DNA, 1050 bp, Homo sapiens
tgctctctctgtgatggccaagttatttaggcagatttttaagtttttttccattattttttataaatagtactctcagaaatgaaaaaaaaaaagcaaaaccaaaaaacttccattttcaagctctgagctataatatagagaataagtctagtgtgatggcatctttgtgaacaacagtattcactcaccactggatttttgaagataccagttcttgtctctaagggagcactttctaggctatctatcttatgtaaaaagtagtgggggcaaaagcaagagtagtctcttcattccagtactaacatttcagatgggtgcattagccttaaaaggggaattagctgaagccataagaaagtctgaaaataaaactgaacgtacctcaaagattgactggtgaccatcagatgggattctgtcatgcggaagatgttatgaatagcccgagcagccaatacttgtctcatcgcttcataaatcacttcagtagtgctgtctgttttaactgccattgatcccaaaaaccgaactataaacatctgctgcaaaagagaatctggaagacagcattttccactcaggatctcatttacttcctgctgctgttgatctgcataccagggtcagatgtgctagttttgcctgctttctgtggaggactttctaccaaaatttctcaataccacttttataagcccaatattgccaaagctctgcgtcttccatttgtctacatcttgtcagtttgtttggaactacttcattagactagaaaggcttttcttcatctataaaatgaaatgatggtggtaccagatgaacatccttctaatgctgaaactctaggtgactacattgtaccttttctctgaaaagagtgagttcactagacaatagaaaattcattactttggcccactgataaagtcctcttagaaaagaaattttatttgcaggatataagatctcatgttgggtctcatgcaattcatacttcatgtgtattacggaaaggcagtgatgatgtttcatagcctaaaggaa

SEQ ID NO: 71202 - DNA, 1069 bp, Homo sapiens
taatgaggtttgtcctctagcttacctgtcttaaggccaccaatggtagagtccctcatcatcccagtcaaatgtcagaaaagccaaaatcgagctgcattaaagaagaggggctgaccaggagcagtggctcacacctgtaatcccagtactttgggaggccaagatgggtgggtcacttgaggccaggagttcaagaccagcctggccaacatggtgaaaccccttctctactaaaaatacaaaaatgagctgggtgtggtggtgcatgcctgtaatcccagctgtttgggaggctgaggcatgggaatcgcttgaacccaggaggcggaggttgtagtgagcgaagatcatgccactgcactccagcctgggtggcggagcaagactctctcaaaatgaatagattagatagataggatagatagatagatagatagatagatagatagatagatacatacatacatacatacatacatacatacatacgtagagagtgggggaatatggaatgtccaagcccaacgttccttacctccagaagagagagaatcctgaggtgctcatgtggagaaacactggccccctgtttgcttctgattttaaccttgtggttgccgtgtctcctgtaacacagtgcagaggaacacctcctctaaattgtgatttctcagatggatgggccccgttgggcagattgtgtttaggactttgtaaccaagactgtcactagtgggtggggtggcctggtgcggtctagctcagtaggggaaaagggcagccaccatttccacacctcagcacacacctccatgaaagccaggggctaatgtcccagagccaggccatccgcccacttacccctgtgtgggcagcccttggcctgctagcctatgaagcctcagggcagaactatggctgttaaaaaaggaaaagcattgcctttggctttgttgttgcaccttagtaccacttcctggtcattttcctgtcaccaccactcctgcctaaaccaagagcaggggaggcatgactaccatttcattccttcctttatggaacttgc

SEQ ID NO: 71203 - DNA, 1053 bp, Homo sapiens
aaatttaaaattacaggaaaaatagcattcaaaacagtactttagctatctgaatcaagtgctgcaaggttcagtttggaaaccccatcagctgcctgtcaccccataactaaatacagcttgtcagacagagggggtaactcacagaaccagccccagcctgcacagagaaggccatgtagcccgggcgcagaccctgacgttaatgcccgggttgtggttctctcaggatggctggtgctatacttgggttggcctaataatggttaatggaaatgctgacaagaagggaagacagaggctctaggatctgcagaaagaggaaaccatggcaactcacacgcatgggcacaaatgtcctgctacccattcagaaaataatcaggtgtgtgaaaaaaattgaggcatagatggttcttccagaaacacagaagtgcgaggaattctgagagttaaagcaggatgaggaagagacagtgaaagatgagggacagaggatacttttacaaagtgaccatttaatagcctctcatcttctacctcctcctaacattcccaggggctaagaaccaaataaattaaaaggcaagaaactgcaatcagatttcacaagttggtttctagcataattataaataaaagctacatcactcactgctgccaattattcagagctaaacagctcagtgactttcaggtaggggtatatgctctcaacttgctttgcatctgtctcaatgctcagcactggtttttcttgggactgattatttttggagcatttcagatagacttctacctagatcaattcccttgtttagccttcatgaggtgtggtgaaatgcaacatcttcaagaaaatgagcaactttctcttcgtgtatccacatgaaataaaattcctattcattatttccattttgtctatttgtcaactacacacacacacacacacacacacacacacacacacacacacacacacacacacggacctatttctgtactccagaactcgtcgcaagcgcttgggaagcccatgctgtgctccgg

SEQ ID NO: 71204 - DNA, 1098 bp, Homo sapiens
atttttcattgctctaagacggtcccttttctccttttcagaagtaagcactttaaaggatctatttggactcgctagcaatggtaggcaccttctccattcctggtgtgtgggtgtgtgggcttactgtggcggggaggagacccccaatgaatgttcttccctttcgaccctgaccctcctgggtgttcagatgtctgtttatttttagagcatgacctctcaatggcaaaatacagcaggctgcctaagaaaaaggagaatgagaaggtaagaatactttacatgttgtttttcacttcatttacataaaggcctttcatgccttcctcttgtgaatttatggcatgaaagggtgcgtggttatttttttttttaactatacatggacttttaaaattgttcattccaaatctcataagtagacctccacttctctattctatcttttcaaactggtttattaaacaccagcttagagccactgtaagattatgatcacacaggggttttaacttcagcttgctgcctcgtctgactcatttatcacccaggtcacttgaactccttgccccaagtgttgactctgattctttaacccatgctttctaggaccttcgctactctagataatattgactattttcatgcatataactttttacttctgttacatgatttccttgggctaaattatttccttggcatacagtcttatgagtgaactagaatgtctgcagccttcttcagtacatgctgccatattgttatcctgaaggactgtaggactttgcactgctcccaggagggtacaggcttcacctcaccgcggcctcacaagcactgagatgctgtttcttgcatatttttaatttggattttttagaaagttgaagtgcagccttatctgtgttttgttatatttgtcacaaaaatggttataatgcataaacacacattttgaagcacacgcttttacagaattgtcacgtacagtagacaacttgaagttttcctttcaccttttaaccaggtgaagaccgaagtcggaaaagaggtggccgcggcccggcggaagcagcacctctcctcccttca

SEQ ID NO: 71205 - DNA, 1078 bp, Homo sapiens
aacagctttctaagcaactgctggcatatgaaaaacaggtaacttggtatttatgtggcctgtgatgctgctgtgttcaggactttcttaagtggaattatccagaggcatccttagagacctaaattatttgtttcattttcttcatagtttttttgtcctgtcttttcccttccactgatgtattgaaatcagtgattatcccaaagtctttatgaggtattctaattagcctctagaagtaattaactgccattgagggttccaagtctccaaggaactacaagtgaatcaacattagcaattccaggaaataaacactcaaataaagtcaaaaaatatgtttgacagaaaggaatggccagggagggtcagatgagtgcaccctgggggcaggacaaaggggatagctgtgactccctcttcaggtagacacttctgataggacgtgctcttggagaagaaaggacgtcggtgtggagggtcgtgttctgcaggtgatgcttcgtgctgaattccccagtattcacttaacacctgcttcttttattctttggtcttagaactttgctcttggcaaaggtgatgaagaagtaatttcaacactccactatttttccaaagtggtggatgaggtaagatagcaacatagaaaatttgtatttgattctttctcgaactttcttttgttgttattttggcccactttccatttttaaatttctacttaaatatctgagaaggtatctcaacttcttgatcttacaaagctcctttcctaggagaggttatacactaactattaatgtttgtttctggtttgaggggaatggcttcgatatatatgaagaatagaccaaaagaaagatttctgagaattcggtttctaaaggagagtatattagtttctcagattgccatagtaaattaccatgaatatgtagcttcaaacaacagaactttattccctcccagtgtgctgtaggccagaaggctgaagtcaaggtgctggcagggccacactgcttccgttggctccggggagaatcctcgtgcatcttttggtggctccaggtgt

SEQ ID NO: 71206 - DNA, 1048 bp, Homo sapiens
cctgatgtatttcatactgtgattatgaatttttgaaagttcagagagctcttctaacacaaattatacactgtacaaattctgtgttgtttttctttcactgagagcttttttaaacatgatgttacaatttccttattcattattgcacagtggctcttctatggataagcattggtactgaagacagtacattagtcctggtgtttttagcccggaagactgggcaaagcgggataagcatgcattgctgtgaagcgcatcagagttttggagcagagtctgggtagagcatgtgtggtgggaggtaatgatcccaatgcataggttcttattctagttttttgagggtgctttggggtcagttactgttcctttacctgaaataagttagaaaaagaaaaggaggaattgcaatttatttgcagggaaataatgagccttagtgagttgtatttggtaaagtgctttgatatcacctcaaaggcattcctgaaattattcttcattctatgcctaatgggttatattttgaagttgtgatccaattattgctaacatagtactttaaattcccactgtgctgggcacattaacgaaaatcccttgagtagatctgcctctgtgcaccttaattcttgttcgtacaccatccagtatgtaaatatttctctagtgctttttgtgttctgagcaccgtggatgaaaatgataggaaatgcctttcagcttatgactttgctcagctgctctctgagcactgaggagtttgtcttcctaaaaacggtaaactagcattcttattaagttgctatttgagttttatgtccagagctgctgctggtgggcccaggggttgtgaaatttcttggccgtgagtttgaaaatggttgaataaaatataattaaaaacaagcaggccaggtgcggtggctcacacctgtaatcctagcattttgggaggccatggtgggtggatcacctgaggtcaagagtttgagaccagcctagccaacatggtgaaaccctgtctctactaaaaatacaa

SEQ ID NO: 71207 - DNA, 1402 bp, Homo sapiens
gttgaaaaaatttggcagggcctctgacatgaatacttgatggcagaagacccagcatattgagggccttgctgtggttagaaatcatatattcccattggtagccatgatgagattttccttaggtcggaccctgtgaaataggagcaggaagagagagagcagatggacggattcatccagggatggagaggaataggtggtgaccagcaagtgctgcagaaatacttgactgcaagacatgtgctagggagagagggaagggaaacacgaggggctgatggatagggaggacggggagggatggatgaactggagctgatgttgcaataagaaagcagccttcttgggaatgatgggactatcgaaaggaggatttttttttcctccctagggagtgggattttctactctaaaatgtggtaaaatagttccaggaactatactccatggagcagccatcggagtatgttagcggagcagcacagaagttgttgggatagaggaagtcagcaaaatatgaggtgagaggttggatgggtggttttcacgaatttctttttctttttctttttctttttttttttcagagttttgctctcttgcccaggctggagtgcagtggcactatctcagctcactgcaacctctgcctcctgggttcaagtgattctcctgcctcagcctcccaagtagctgggattacaagcgcatgtcaccacgcccagctgatttttgtgtttttagtagagttgggattttgccatattggccaggctggtctcgaactcctgaccttgtgatccgcccgccttggcctcccaaagtgctaggattacaggtgtgtgccactgcacgtggccattttcatggagttttaaattgaccaagataatggtgcttagaaagaaaaactttgggtcagggtcaaaatctttggtgctctggggacagttatggcagggtttagactccagagaggagaggttctgagtgaaaatgaaatggccccacctgtaagagctctgtggggagatgaggagcatgctggctctgtctcctgttaggagaagctagggtaggtgagaacaagatgcatattcttgaggttttgagaaaagtggtgccagcaaggaaaagccaaatttcttaaggtaaggagatgaagagtgcacccttgccttatagcaaatgatatttttacaaccaattctgaaataattcctaacactgtgtgccccttagtaagagaataactggggggaggagagctagagaggacagggaatttgcagtctggctcttgatctcttgcttctggataaagagaagttgaaagcattcctttgaagtgaatgttactcatgttctccagtcatacactctggaagaaagaaaggga

SEQ ID NO: 71208 - DNA, 1135 bp, Homo sapiens
ggaaagtgaaaatatattttaaaaccttgaatatatccttaagcacagttaagcaaaaggggaaagaattaaaataaacggatatgtaaatggatgtgaaaagaatagtcatggccggaaatgtgtgtcataagctaccagttatatacagattcaagtgatttcttgagaaagttaatcactcaggaccaaagtaaacagttcttatcagaacttaccttgaacgagtttgtcctcatcatttctccattatctatgctaaaggattataaatccattttaattaaaagtagtgaacaactctctcttataccacatcaataagcataacaccattagtatgactttgacacttgaactaaaaaaacaatccagcgttaagaggtaaatgaagctgataaccatctagtgaatttaggttatatgctcagtttggatgaattaggtctcaagatggattttgcactctcttccagtattagctgttcatggccagcgttcaccagataattattaaatctacactttccttctttatagacttggacttactggctgttgcaataaagcaaaaatctcatgcacatatacagtcacatttgaaatattcacagcttttaagtgggtaaaatcatagttagacaatctctgaatcagaagagtcaatgacatttagatgtttgcagtctgctttttgctcaactgaagccccttagtgttacaagttgaattcagccagatacattggaatcttgttgaattattttttttttctttcagaaaagcaacttatgtatgccaactagtgcttcaaggaaagtgtcctgattctcttagaaatacgccaaggaattctggtagaatatggactccttttttttttttttttttttttgagaccaagtatccctctgttgcccaagctggagtgtaatggcgtgatctctgctcactgcaacctccacctcccgggttcaaggattcctgtgcctcagcctcttgagtagctgggactacaggcgtcaccatgcctggctaatttttgtatttttagtagagatggggtttcagcatgttggccaagctggtctcgaactcctgacctcaggtgatccgcccgcctcggcctcccaaa

SEQ ID NO: 71209 - DNA, 2084 bp, Homo sapiens
ttttagcaatgatcagtgtgaaaatgaaagctaatatttatgtaagtttatggcattttcatagaacagaaaggtaaatttctgtaatataagatgactgactgataagcaatctgctgtttaaaggaaaaataattgcctattgtataattaaatgaaatgaggcttcattttctgagttttaatagttagcaattatggggccaatgaagtccttttgactgatagatatcttcttgctcaaggcaatttttaagcgaggctcatggtaaacaatgctgatttataaaaccactgtacaatgtattgtctgatgtatagttttaaatgactattaacatgtttgctttatacacaaggctgtattacattattttgaacatactatatttgttcctcattgttctttctgtactttgtgatttagactagcaaatacatgtatgtcattactgtttaatgttctatagaaaattagaatatgctatttataatctgaacatttaacttttcttaattttctctttaagattagaagaaaataacatcatgactcaagaatcaagaggtgctgtatatttttctaaataattctatatatttagacttattgatgaatggactgtagatattatttgctctataaaaaatttctaagaaatcttgaactttacaatttaaaggaggggtttcatcctatggaattgagtgtgttttattgcatagaggtgaataatcagatcaattttctttcagctacttttttcatttcattttgttaaaaatgaatatttatttaataagagcaagctaagtgtctccctaaaacattgagatctcacccttcttcattgcagaaatctttgagggcctaggacttgagaaatgacagggagagaccagagaggctagaactggggattagattagaatcgattttaagtggtattagccagtggttaatatacagagaggagatgtgtcagtaccagaactccagtagagatgggcaatcggtcaattaagtcccaaacacttaatattgattctaatctaactgaacagagatgtagttatgcaggaaggaatagtaagaatcagagaataagttaacagattggttttacaaaacacgttcagtatggacatggcaaagagctaggagttagaattataataagaaacaagaacaacgacaagagaaaaatagctttcatttgttaactaccctacataccagtctttaaaagacatggagcagcatttccatacagacaaagaatcttagttcactgggtccaccaagggtccaacaacacattccatgctgggctctccactgtatttcactcctggtgaatgacacccaacctcttttgaggcctccagtgattaggaacgtcctatctcctgagatagcctgttctattctggaagtcaggttgccttggttatgaattcaggctctcatttactagctgggcacgttccttcccctttatgacctcagttttgttatctgaaaaatggagccaatacttagactgaagagttgttgttaggattaaatatgaaataaatgttagcatctgctatcatcatcgtcatcaccaccatactattaattttttttgataaccagaatctaaccgttggcagaccaaaagcaagactgatttgatactgaaccaacttcttgcccagggccagtactggatttgctgtttgggatggggtgggattacagactaatttcacaggtagagacaaacaaacttacctgctagagaaaggagacgcagaaactgtaaccagtttcttcctgacaagaactagaacaatctgtgggtagctacttctttgaagatttgctcatcaaggcaacattttggagttttatcccctcgtacccatgaacagagggtattcggtttcttcttgggaggtcactggagagtttctatttctagtatttttaacatagttctagccctccatatagatttctgagttctccgctagttttctcctgtgcagaagtacttttattatttgtatcaaatagaaaagataagttgaaacca

SEQ ID NO: 71210 - DNA, 1050 bp, Homo sapiens
tgctcagatgacaatggatggcctggctgcatcagaatcccgtgggggagtgccatgtaatgtggaggcctaggctctcccaggaggtttggaccaagtggggaagggatggaattgtgaccgaacagtctctatttttaatttggatgatgttaatatacatgcagctaggtttgggcattgcttatcaagatgtattttaattgtaagtttgtaagtctcttttcctacccaactttgcctctttatataattatcatcaatgcttggctctacactggccacctaagtcttaaattaatattgggtgaatattaaataggtgttttacttaaaagaaagtaaataacttgtaggcttaaggctaatacattttttaacctaagttgtacctgtttgctcactcttttctcctcttctgttgtctccttagcttgctcatcagtttggaaggaatttggctccgtgggacgttgtaatgtgcacagacatttccaaggaaattctaaacagtcacccttcccttttgcattcccccaaatcttaagtgtatacataaaaccctgggtacatattgttgtggtaatagaagggaattggttaaacagtacacttgtttatggaactttctgtggccacctacgaaagacaagttaacaaactgtcatggaggctgttgttgcccagccagggccgctgcattttgacaacatttccaccctggccactcagcacatttcatggaggtcatgtcttttcactgatacttttttgatagtttttatataacaaaatccttattctatttataacttaagatgataaggcactataaattaatgacctaaaataatatatttgtctgttatcttttgctatttctacttcactttaatttttagctgtaaaattggtaaatggattcttacaactatctctttccatttcttactatttggttttcaaatttcatttaaatgtcagaatttccttttttaggaacaatgtgtatttcattgcactatttaaaaataaactcaaatttgcatg

SEQ ID NO: 71211 - DNA, 1044 bp, Homo sapiens
tatgcatatctgattgcaaagaatcacagtactagtcttattatacacttaggtgtttaggcttatgttaatcattcttaacctgacataatccccgtaagcctattaaaatggtcacttttgtggctttaagtttaccaacacaatagttcatctaagtttcaaacaagaaaaacaatgctgatattcagagaaatggactcttaatgtcgctcagctagtaaatgattattaattggaaataattgatcaaacacttttacaagtatcctaagaaccattctctgtttaacctagagcaaagacctccctattcttcttggagcaaataacaattattttgcaaacaaaattagagaagatttaaaaatgggaaaatggttgcgttggactttgtttttgattatctgctccatcactgccccttcccctgcactattcaatctgtaactcagaaagagagttcagctggctgatctgtgagttattgaagttttggcttagaaaggaaatctgatctctgtctaagtggcactaatgtgtgggctgagagctgctactgtaaattcagcaagggattcattaatgctgtgagcctcctggagcactgtagatgggtgacctctgaaataaaagcataataagaaaaagataaggcttcatgcatgatctgcaagactgtttctggtgatcttcaagatatcttaagtcaggagtacttagggctggaaagccaggaattgtgagggggcgggggaagaccacccaaagtttcaatgatatcatacaattgattcttggctttttaacactctttggaaaagctctctctttttttctctctctcacactattttctttgctgagaaaaacagactgctgtttttgaaattttgatgatgcagttaacaaagcttgtaaattgcttatgggaagacatagctggaaaataccagttagaatcctacagggagacccagttgttggggtgtcagtcagctttgtcagattctgactttggcatgggttatggggttggggatg

SEQ ID NO: 71212 - DNA, 1033 bp, Homo sapiens
aacaacaacaataaatagcaaaattgatgatgagtcttctaggtgtcccaagtgcactgaggcctgacattccttatgtcatttaatcctcacaatgcccctgtgaggaaggggctattatagtttccaaaggggttaactgcggcacaacaaatttatgtaactgggaaacattgtagagcttggatttgaacctatccatttttagtctgggccctctgtatgtaatcatggcatcaaaatgtactattttgctgttaagttgggaggcttgagattactacatggaaagcctgccatacccagctcctagaaggagatcactaaggatcataatcaaggtacaagtgtaggagggggccaaggattcagcctagaggagtggaggaagggcttggtgtggtcaactttttaatctgtgaaattggaaatttctttctacctcccttcaccccaagtacctggcagagtctctgcccactgaaggcatttctgaaacatttgctgacttgtaattgtgaatggaactaagcaataaaaggatcaaggactagcgatgtactccagcagccaagagacttgaaagaaccaggaaaatactgctaaatattctgaaaaatattacttagtaagttgataaaagtaactagaagaaattccatgttggtactaatgacaagatgcagggagaaaggactttttttgagggctttcttttgcaaacagcttacaaacaaaagaaggaatcaatggacacatgatgtttcccctccacgggggagaaatgccaggttaatgactgcagaggccaaaccatttacaaaaatagcaatatttcttgcacaatcaagctctgaaaatgcaccagcaagcatgaggaggttgcgttaacagccagggacacactggaagctacttgtttcattaagtgacccagtcctctcaaggccaacacaagcaaagaattttgtggcctacctctgagtcaacattgagaggaggcccctaatgaatgaaaatgcattgagttctt

SEQ ID NO: 71213 - DNA, 1039 bp, Homo sapiens
attagttactcatctccttaaatgagtaacctcaaactccttaaacctcaatttcctcatctgttaaatgagtttttcaaaaaatgtgtggtaaagtggacataacataaaactgactattttaaccttttttaggcatgaaaggcattcacattgctgtgtaaaccaggtttttgttaagattagattaaataaagtgtttggagcagtacctgataattggaagttgttcaaaaagtggcaactaagtttattattattattattattttgcattatatattaattatcttgtgcttttcaaaatataatgcctgtaccagtgacaagtgtttcttgggtgtgggcaggtgctaagcagtggatgatacaaagataaggggaggatgtggaacctgccaactgcctcaggaaactcagagtctggtagggaaagcaaatatatatatgtatatgtatgtatatatgtgtatatgtgtatatttgtacatatgtgtacatatacatatacatatatatgtaaaagtgctgtcataaatgataacacataaaacacttcaagaaaccaaaggagaagagaatgactccaaggtgtgtggagtacaatgaaaacaaggctagatgaaacatttgcatcaaacttgaaggttatgaaccactgttacactcacggtgtcatcttatttttttttttgagattgaatctcgctttgtcgcccaggctggagtgcagtggtgtgattttggctcactgcaatctccgcctctcaggtttaagtgattctcatgcctcagcctcccgagtagctgagattacaggcatgcaccaccacgcccggctaatttttgtatttttagtagagacggggtttttccatgttggccaggctggtctcgaattcttgacctcaagtgatccgcctggccaaggtctcatctcgattgatttctttttcttattattctcatgatgatcctgtgagctagaacagggaagggatcatggattcccattttctggtgggtaaactgaggctca

SEQ ID NO: 71214 - DNA, 1061 bp, Homo sapiens
agccatgtagctcattcctctccccttccctgcctgatgttgatttgcagagcacacatctggcattggaaattatttatctggcactgcgagagggtgtggtttctaaaaatattcacacagtcggtcagcagaaagaatgagagcaatgtgctgctttgggctgcattccgtactctggaagcatgtctactaaaatagacaccaagcacagcactaatttgcaattaataaaaaacgggccaaattcacagcccactctctgggagaatggaatgctgacaattcccatagaaggctcctgtaaaaatgtcttacaatgagaagaggtccaggcaccagggtcagccgacctcctccaagagggctgggaatctggtgagctcccagggctcagagtagaggggcataggggaaatggcctgctgccccttaagacaatggaagcgcggctgctgtggataagaaaagaagctttgaatggccagggccaagatgagatagaaacctctgaagcttaataagaccaagtggggcagctgagagtcagcctctgggctttgatgatatgaatgggagagctctgtgttcatgcatgaattaatcaattcatgtgttgtgtgtatatatccacgcatacctgcattcactcatccattcctgcatttattcactgaggaattgaacgtcttttctgggcaatatttatttgatcagaaatattcattaaggtcctactgtgtacttgaccctgtgctggggatttaatagtgaactagatggccaaatttctgtcttggaactcaggatctcgcagttgttaaactagcagtgataatgagccgtgaggaggatacagaagtcagtgaagaagagaaggtacctgctctagtgagcttaaaattccagttggagacacagcagtaaacaaataaacacataatgtaattggctggcagtgaagaaaatccatgcaggatgagaatgaagaatagagttgctcttttacctagagtggtcagggaaggcccctggtataggacttgaattcctgtcatcca

SEQ ID NO: 71215 - DNA, 1046 bp, Homo sapiens
tacaaacgtaactggcttctaatgctaagtaaataaaagaggatagacgtacacttttcagtgtgtgatactaaggaaagcctaatcaagagaaaagaaagaaatctctggcaccatctcaaagagggacccctgtttccagtcaaaggaattccattctctcagcagggaggtaattgacaatatggaaaaaaaagctgaaaaggaagtgcccactggagctttcaactgggttgcctaggatggaagagataaaaacagtttttgcctgaggttctgatttcaggaccgaagttcaaacatcaaaggcgcactgtctcacccccacttcccctttgaaagcctaggagacccgatctgcaaaaccactgagaacaaacatctttagcatcccatctggtaacagtccggcatataaaattgaaaaggtgggtggaggggtgggggagattcggcctgtgacttccctttgacacccttggttttggtttctggaaatctctcctcttggccatgcaagattgcatctctttatgggttctttgcattgtgatgtgctggaactggccaaccctttcatcacttctcctattttagataagggtgatcctggctttctgggacaaagtaggaagcctctttggcatttgttaactgtgatctctcatccgttggaagtgtttctccaacttgaaaagaaacgaaatagacaaacacgtcctttgataagcatttgaatctgatgcccccaccctgtgagccttaagcatgctgcccacgagaagataagttataataagtctgtattctcaaatattctctgaattcccaccatgaagacactttggatgagtgcactatcagttaaaagctcctctcatcttactagagaaattgcactacaatatgcttttgcaagctacctgtgctccctgagatttggataggtctttctgggaggagataccactcttggcgaaaatcactgctctaaaaatccagagaagcagaagagaaatcaagagacaggggctgtggaaaagcct

SEQ ID NO: 71216 - DNA, 1137 bp, Homo sapiens
gggaagaagcaccagcaatcctgagaagggagaggtctgtgaaggcgggagtcagcagggaaggccctggggctccatcctcctccttctctgggtcacgcttccccttagcattgtatgcacagcattgccaggtgcttctcagtgacagcagctggagaggtggctcaagcccatcccaaacccatttcccactcttggaggctgctccaggcgggtagtttttcagagctcagcagcctcctcaggctgctctcacactggcctggcttcgttcagagtccagccctccatctgagaagcccaggtaatcagctctgcagagtgtgcaaggtttagatgcaaaatgcatctgcaaggttttcaaaacatttttttctgggttgtaaatcaagtactttaagtattgcaaaccggctggggtgcggagttaatgtatgtcttgaaaaaacaccatcatgatttgccttttaaatttgagaaaagaattccacttcccttacttttattagagatatggagatctccagggggaaggcgctaagtggaggctgtggtaggtgttagctccttccctggaagggcggggaatggtgagtggcttagggctcaactttcgtctgtttggctgaagggcaatttccctgtttaaaaaaggtagcagctgcttctcttagttatctccagcgggaccccattcacttttgtctgtgtcaggctcacgggccacaaaggtgcttgattgcagcaggttcaaacgaagccttgctggctgctgccatttcactatgaactgggctcagctcacgagtggttcaccccaactgccagaggtcactcatgtcccagtcttctacaggatcatggaagggaagtggaccgtccaatctatacatcaaaaagggaagcgggagtggtggctcattcctgtaaatcccagcactttgagaggccgaggtgggtggattatttgaggttaggagttcaagaccagcctgaacaacatggcaaaaccctgtctctactaaaaatacaaaattggctgggcacagtggcgcacaccagtaatcccaactactcagtaggctgaggcaggagaatcgcttgaacccgggaggcggaggttgcagtgagaga

SEQ ID NO: 71217 - DNA, 1049 bp, Homo sapiens
acttttgggggtgttttggaggctcaggtttgcttataaacaacaaatgactgcagggaaaaaggaaaatgagctgtcaaataaaatagcagcttagtattgacatgtttcttttgcatttcggcaggaacagttctgtgaaaaaaacatgggggtgccagtcagcaaagttcagtccccaaattctcaaatatctggatacccggataacgccctcccaacccatttctcagatttgatgtttgggtctatataacttcgtcccataacgttattttaaaaaaaaatctgttatcaattaattggaaatttgagatggcgtacatttctttttaaagctggctctgtaataaattctacagcaagcaagtagttgagaattcactctgggcaggtgccattttcgtaggatgaaattgttaaaggggagggttgtaagggtggcctctgatgaaggcaatttcaggtttgtggaagaagaggctgggaaacgtgcacttcattcatgcttttcttctgaggtgatattccccaggctggatgttgaataagcaaaaactaagcttagatccctgctcatgttgtcttaatagctgctgaagaatcgcactgggaaggtgggaagcagaataatgaaaaacagacgcagttcgagctgcaggttgagaatgtgaggctatgaggggttgttgaagtggtaagggtgtgtctagggtctgtgaagggaccccaaagtctaaatgctggggcactacctcagacctttctaacgaacgaacccttgtcttatggcagacgcctttctgagcgtcagtgggacttcctgtcaggcgttcttgagctgtctgatccacagactaggttagagtgaaagggatttgcatcagtaggcaggagtccgcctttctcttttgggggatgtctttctctgtatttgcagaaactgaacattccgtcaggatttagtcaagcggccacgagggggcgccctgagaacgagagaggcttctttaccagccgcaaatctgaagtcccgctgtgttattgtt

SEQ ID NO: 71218 - DNA, 2984 bp, Homo sapiens
tctgtcttttccctttttttttcttttttttttttttgcaacaaagcattaaaggtggcaccatgtgccacctttaatggttattaatccatttatttccaggttattaatcattgtgctgtgcagcctgattagtcaggcctgggttataaatcatccctggagcactaggaggggaccctaggattggtccttaaaaccatatggactatatgtggaaggatgtttctccaaaggaaaattgtggtgacattctggaaaaaaacaggacctggaggctgggcagacaaaaaaagttgtatcatgtgaaactcatcagctcttctcagcaattaacgtctggattttgattacaggtgcagtctttgcaagccacatttggaacttttgagtccatcttgagaagctcccaacataaacaagacctcacagagaaagctgtgaagcaaggggagagtgaggtcagccggatcagcgaagtgctgcagaaactccagaatgagattctcaaagacctctcggatgggatccatgtggtgaaggacgcccgggagcgggacttcacgtccctggagaacacggtggaggagcggctgacggagctcaccaaatccatcaacgacaacatcgccatcttcacagaagtccagaagaggagccagaaggagatcaatgacatgaaggcaaaggttgcctccctggaagaatctgaggggaacaagcaggatttgaaagccttaaaggaagctgtgaaggagatacagacctcagccaagtccagagagtgggacatggaggccctgagaagtacccttcagactatggagtctgacatctacaccgaggtccgcgagctggtgagcctcaagcaggagcagcaggctttcaaggaggcggccgacacggagcggctcgccctgcaggccctcacggagaagcttctcaggtctgaggagtccgtctcccgcctcccggaggagatccggagactggaggaagagctccgccagctgaagtccgattcccacgggccgaaggaggacggaggcttcagacactcggaagcctttgaggcactccagcaaaagagtcagggactggactccaggctccagcacgtggaggatggggtgctctccatgcaggtggcttctgcgcgccagaccgagagcctggagtccctcctgtccaagagccaggagcacgagcagcgcctggccgccctgcaggggcgcctggaaggcctcgggtcctcagaggcagaccaggatggcctggccagcacggtgaggagcctgggcgagacccagctggtgctctacggtgacgtggaggagctgaagaggagtgtgggcgagctccccagcaccgtggaatcactccagaaggtgcaggagcaggtgcacacgctgctcagtcaggaccaagcccaggccgcccgtctgcctcctcaggacttcctggacagactttcttctctagacaacctgaaagcctcagtcagccaagtggaggcggacttgaaaatgctcaggactgctgtggacagtttggttgcatactcggtcaaaatagaaaccaacgagaacaatctggaatcagccaagggtttactagatgacctgaggaatgatctggataggttgtttgtgaaagtggagaagattcacgaaaaggtctaaatgaattgcgtgtgcagggcgcggatttaaagtccaatttctcatgaccaaaaaatgtgtggttttttcccatgtgtcccctaccccccaatttcttgtcccctcttaaagagcagttgtcaccacctgaacaccaaggcattgtattttcatgcccagttaacttatttacaatatttaagttctctgcttctgcatttggttggtttcctgaagcgcagcccctgtgaataacaggtggcttttcatggatgtctctagtcagagaaaaatgataaaggcttaaattgaggattaacagaagcagattaacctcagaaatcctgtctggctggcagatttcaagtaaaaaaaaaaaaaaggtgggttggggggacccttttctttctagttgtctttaaggaaaattaattttacttttttttttgttctggccgaaatttttatgagatatctctcacttgtcttccactttgaaccggttaaagctcatagctgtcagctctgaatgaggaggggagaagcccctgggtctttctttgaaaggaatccgctgcttgagggctgcctccctcatggtgtgcgtgtcgtttctcttcctgacgcatcttgtgatatcagaggtaactatgcaaagcatccaggcggttctgaatgtgaagcactacacccagcagagtcccggtgccctctgtccccactgccggcccatgttctctctccggaggtcaccaaggaatgcacaggtttcgactaccagaaaggggagtccttgggttctttcaaaaaattcgtgaggagagctgtctacagtggaatagggggtctccctggggaatgcaggccaagtccttttattttaacatgatgtccatgaagaggtttgccgtctgggcagccctgtcggcaaggagcgtgcatactgcgtttgtgtaattgtttgctgtatctcccttccctctgagctgtattgttctttaatggctgtcttgcccttccaaaaaaaattgaaaaaaaaaaaaaaaaaaaaacccgaaaagtaaaaaaaaaaaaaaaaagttttgtttagtttactgtgaaatgaactgtatggcttatttacagtatttttaattcttaataaacacttgagctttgttatgacttttccagagtggttacattctgagaatttcgtaattatgatgtgttttattagcacatggtataaacgattagcaaataggtaagtttactattttaaggctgttttttcttttaattctgaaaccgagatggcctcactcttgggccggggacctc

SEQ ID NO: 71219 - DNA, 1042 bp, Homo sapiens
tgctttggggtttggggcctaaagcccagctaacaataagactctttctgggtgtcacctcccttcgggactgcctgggggaagtttcttcatttgtggaagctagtgataatgaaagtctcaggtgggatttaggtgttctcaggatctctggctgcattgtccaaaatactctggattgtcggtgacagaactgcagcccagttacctcaaggaaagttggtaaatgtttaacaactggcttgccaggaaaaaaaaaaaagaaaaaaaaaaaggcctgatttgtagtgcttagtgtttgcagagttccatgggctggaaactcccatcggtagactgagagtaaatacttccgccagggctgatttcaagctcccaaccatttaacaaccagtttacaaaattcctgaacatttaacaataggctgttgcaagccagagaatcccactctagcacactaaatgaaaaatgtaaaaaagagcaaaatgattcactcacttctgcaacatgtgggaagagcagggacacagaacgtgacctcaggaaggaagagaaccagggaaacgaaggccaatagggttctctctgcaaaccaacctagtttttcccaactacagatccactctctctgtgtttcaagagacgtcatgccagcagctgccagagttacagcctcaccaattcccaaccagagaagaaggagggcttcggtgctggtttgaaaaatcccagtgccaggttggccagtctttaattgtgtactctcccctggggtcagagggtaggtgcactgcctgaggatcatggggtctgtcaggaggtggggagggagggttgctggccaggaaaaaaaaaccactaatcccattacagtgaccatctcaatgccatcagaacctcgttcccatttctgctagtctccagagtggccgaatcaaggatagcatgaagaagctgtttcacccgtgttttggcattatattttatagttttcttttctttttttttttgggatagtctcactctgtcacccaggctgga

SEQ ID NO: 71220 - DNA, 1074 bp, Homo sapiens
cctcgcacttactgtgggggacgtattgcatgtttgcagtcttacagaggacacggggccagggagctcaggccatttgcatgaggcaccacagccggctgtgggggtaaaaccagatcgtctgaattccaagctagtcatctttccttttaacttgaagttccagtttgggttgcaggggaattttaaacgccctcaatatttactaaagaatttgcctgtgtgttttctgggggagagactccacagctttcatcagcttctcggaagttaaggacagctgccccacagcgagctgcccagtgaagtgcggctgtcgacatattttgttatctgataaggcacattttgtaatctctctgagcctcaaaatctacactgacgtggaatagggaagtggagacgtggccggagaagatagcaaaggagagatttcagggaaagagaacaggatacttgaaacctcctcggcaagaccattggatgtttttgaggaaggaaagtaaatccagtagtattagagtgaagaaaaatagaggagaagagataaaagacagggttaagtaagggtcttgattatgaaaagtttcaataaacatctgacagagcttggactttgtcttggagcagagcttttgaagggtttaagcaggaaagtgacatgatcagtaagtctatcggattataagaacctccttggctaggcgtggtggcctgtaataccagtagtttgggaggccaaggcgggcggatcacttgggctcaagagtttgagaacagcttgggcgacatggcaaaaccctgtttctacaaataatacaaaaattagctgggtgtggtggcgtgcacttgtcccagcaactcaggaggctgaggtggaaggatcacttgagcctggaaggtcgaggctgcagtgagccgtaattgtgctgctgcactccagcctgggtgactgagaccttgtctcaaggaaaacaaaacaaaacctctttataatagtttgacaagttaaggaagttgaattagcagttccaacagattcagtctataagtgcatgcaataggctgctgatc

SEQ ID NO: 71221 - DNA, 1018 bp, Homo sapiens
aactctcgaggatatgctagtaagacgatgcagaaatggaatgagaatgcattaatgaaaagatttattaaataaaattcatggattatttttctcattttgattttgataaaaatttgatgttcacctattattagattccattatatgatctattatttgagcatatcatcagtactctttgcacttttgctaacctgtttactttctctttctatctgtttaggtgaaaggccttgtgaaacagcatatagattcatttaactatttcattaatgtagaggtaagcatcagatgttagaaatagacataaactaaggattaattggaagccagagtctttgctaatgttgcattttccactgcagataaagaagataatgaaagccaatgaaaaggttacaagtgacgctgaccctatgtggtacttaaagtaaggaaccaacattcttaatttgctatgtgggttacatctaacattttttaaagtgagtgaagttgctatcaaaactcttttaaaatcattgtcttggccaggctcggtggcttatgcctgtaataccaagcactttgggaggccgaggtgggcaaatcacctggggtcaagagttcgagaccagcctggccaacatggtgaaaccctgtctctactaaaaatacaaaattagccaggcgtggtggtgcacatctgtaattccagatactcaggaggctgaggcaggagaatcgcttgaatctgggacggggagatttcagtgagctgagattgtgccactgcactctatcttttacagcagagtgagactctgactcaaaaaaataaaaaatgaaaaaataaatcattgtcttttattaactataaagtgctcaaattaaatttttaactggcaaattataatgagctatggttgggaaaattttgaaactattaggttttaaatatttaaatttttattttgaaataatgttaagcttaaaagaaaaattgcaaaagtagtacaaagaattcttcaatatt

SEQ ID NO: 71222 - DNA, 1057 bp, Homo sapiens
tctcactaaagcctgtatgcaaagtttaaaccaaacatttgagttttttgtttttttgttttgttttttgagacagagcctcactctggagtgcagtggtgtgatcctggctcacggcagcttccacctccaagttcaagcgattctcctgtctcagcctcctgagtagctgggactaccggcacacaccaccacacccagttaattttttgtatttttagtagagatggagttccaccatgttggccaggctgctctcaaactcctggcctcatgtgatccacccaccttggcctcccaaagtgctgggattataggcatgagccactgcacccagcctgagtttttatcatctgtactagacgagcagcgtgcctgagaaaatacttcattttgcttggcttccatgtaattgctatttctctgccttttctaacatggtgcatagatagacccttagtgaggtggtgtgcactgcatgttttgtattttttgcagcttttatcattgacagcctacatgtgatattttcttttgttttattttatacagaatgcccataatgctacgtagttcaaactgtgttcttacaggaaaaacgccagcagaatttgccaaactgaacgaatgtcccttagatccaggtatgtgtgaagtcttggatttgtcccactttccttattcttttattctgctgctgctgtggttttaacattttgtctcaaaaacagtaccagcttttctactttataatgaacttgttcacaaaacacccagaaatttgtctctagctttatgctactagtctgtatttctttctttcttttttgagatagtgtctcactctgtcatctaagctggagtgcagtggtgtgatctcagctcactgcaacctctgcctcccaggctcaagcaatcctcccacctcagcttcccaaatagatgggactacaggcttgtgccaccatacccagctcatttttgtatttttagtagagatggtgttttgctatgtcatcctggctgatctcctggactcatccaccttggcctccca

SEQ ID NO: 71223 - DNA, 1081 bp, Homo sapiens
agaagttatttcctttcctgccttcacacaatatatttcaacctgtcaccattagtgtgtgtatcagtctcttttgctcattagtattctttttgtctttaaaagtcacgctttgtagatatctaaaaagacctcatgccactttttatagtgcatctccccttatttttgttcaatggtattgctgattgctagagtgtaggggacctgctgaaatgtattatctctgctattttttcataagtttattatgtaggatttacttttgacttattagaaaaaatgatttcagatatctggagtacaaagaggtccatataaagccagttttcagatgtctaaattatgtctttaaagtaaaatagttgagcattttgctgtcgtttccatagcaatatgtcatttatttgtagctgtgactactgaaggctaaatagtcataaagtcagttcggtctttgcagctggtgtgctttgatgataacttgactgagttatcgcccctgtatttagtgacttgatataggaagagtttagtccttttagagcaaagctttggcagtaatcatgctttttgcacatatggtgtcatttaccatgtgcttggcatatctttgcttcatagcttagaaatatttggaaggcctaagcagtctgtttagatccctgttaggacatttgagaattttatgcagttatgaaatcaccacttagattcagcatcaagacaacttgaagtggcaatccatacgtcaaatgaggaaagactttttcgttacaggttgagcatcccttatctgaaatgcttgggaccagcagtgtttaggatttcaggttttttttttttaattttggaatattggcattgtccttatccttatggttgagcatctcaaatccagaaatccaaaatctgaaatgctctaatgagtatttcctctgagtgtcatgtctgtactcagaaggtttcagattctgaaagctggtcatggtcgcctgtgcctatagtgccagctactttagagggtaaggtaggaagattgcttgagcccaagaatttgaggctatagtatgcactgcag

SEQ ID NO: 71224 - DNA, 1047 bp, Homo sapiens
aaattccaggcaaatgtgtgaaggagtgagccctagtaccatatggaatctacaaagacttgcgttgctgctgccaccttgaaacacttaagtgggtttctgaaacctcttaagtgtattcctactttttttattttcttattttttttcccgagacggagttttgctctcgttgcccaggctggagtgcaatggcacaatttcagctcactgcaacctccaccgcccgggttcaagcgattctcctgcctcagcctcccgagtagctgggattacaggcacatgccaacacatctggctaatttttgtatttttagtagagatgaggtttcgccacgttggcccagctggtcttgaactcccaacctcaggtgatccacctgcctcggcctcccaaagtgctaggattacaggtgtgaaccaccatgcctggcccatgtgttcctactttttaagtctcctttgaaacctgcatgaagtttggtttgatatctttagaatagtgaggtaaaacgtgttttaggaaaaattcttttcctttttaggaaaaatatgagtgatttgacagttctcagaaaaattaattttgtgacaagactgattggggttctgcttattttcagcaatgcatcttttctgattcactgccttttggctgtttgtctttacagtttgcctttgtagtcatgaccagttgtctttaccatacctcccagcctccttttttcgtgatgaaactcttagaatatttaaaaattttagcagatagtacacatgcaaaaaatgtttgagaatgtttgttttccactttctaatcaaaatatctgtttcaggtttttctgcagcttgggcaaggctgccaatgccagatggcaccatttctgagagaagagctagcttttgcttagaagtaatacccacaaacaatgccaaattagcataagcaaatgtcagtgagttaacacaaagccaacactctttctatcttttctttccttcctaggccatgggtgttgagagtgaccaggaaattgtgcagatgattgg

SEQ ID NO: 71225 - DNA, 1527 bp, Homo sapiens
ttggaccctgggaattttagggcaagactcaaagatgaagactgagaaatacacacacacacacacacacacacacacacacacacaccccatagtaaaaataattgcacttcccttcccacatggagggagccccagcagccatacttaggattttagtcccatatttgcaagtgctttcctaagtataaatcaaagttaacatccctcatagccatcctgggaggtgggaattccccactatagaatcacaacagacagttcttacctatccacgtgtacattgtctattctgtgggttatgtatgacatatgtaaactctgggctgcttttttctcttcacccaggatgcttgtagagaaagcatttcccacttatatctgttagtgtgtattctgaaatcaaatcagtattgatatttttgtagactacactagatatttaggaagatcgaaataggtcagtatatatatataattccaaagcacaaatcagtaaggattattctcatcaccgtcttcctctttttctacagttaattaatagttgactgcagttacagggcaggcagcaccaggaagggtggtttggatttaggagattctatttttggcctttatcaaaaatgaaatatttggtaggcatgaatctttgttgtacactaaagttacattgtccaagggttccaagaacatgaagagaaaacattaagaaatatcaaggaggcagaaaatgtagaatctaccctgcaaacaggaatatttggttccattttgggagataccctattctttaatgctgtgtagtgccctacaagtttaccttaatggttcctcagtggcttcagtgaaatccggtatgcagtttatttcaaacatcatcattggggtcaaataaccctagcattgtaaagctgtttgagcagagcccaaacagtaggttggaaaatcattcatttatttctgttaaataggttctgacagaaaatgtcagctaactaaattagatcagattagtgagaagatggcaggaaaagatggaaggaagttaacataagaaagacaaatgttccttttcctcgaaagggaagtataactttgacagtgctcgtactctgtgtgcaggattaaggcacatattagctattgaaactaataaaaggatatagagatgcaaataacccaaaatagttggtatgtagaacatatattaacagttacgaaaacatgaatattctatgctattcaaaatgaagatgtagtaagtacactttatattagtctgttctcacattgctataaagaaacaccgaatcagcctggaccacatgataagaccccatctctacaaacaataaaaataaattagccaggcgtggtggcaggcaccagtggtctcagctgcttgggaggctgaggcaggaggatcacttgagcctgagaggtcaaggctgcagtgacccatgattgtgccaccccagcctgtgtgacagagtaagacctttcctcaaaaaaagaaatacctga

SEQ ID NO: 71226 - DNA, 1001 bp, Homo sapiens
acaccactgtactccagcctgggcaacagagtgagaccctgtctcaaaaaaaaaaaaaagcacattgttgttccaaaataataagaaccacatatgcctcttctttaaacattgttgattaggaaaaatttcaacatatacaaagtacagagaatagtgttataaatgctcatgtatccaaggcctaccttcaaaagttgtcaacactcttacttggttattttaagtaaatttatgtacactaaaatgtacaaatcttaattgtatgactttacaagatatagaatatttccttatcccacagagttccccctcatgccccttcctagtcaatctttacctctactctctgatttttttccccactattctgatttttgcaccgtagattagttttgccaattacagaactttatatatggaattaggcatcatagtttagtgatttttgcaccatagattagttttacctattttacagcattgtgtatggaattaggccatatatactcttttgtgtctagcttttgctgagcttattgtctaagattcatccaagttatttcttttcattcctttttatgtcagttatccatgtagttcatttctttttattgctgagtagtatttcgttatatgaatataccacagtttatcctattgatagacacttggtgtttcagtctttagtaattataaataagactgtataagcaaatctttgtgtggatgtgtggacattttcatttctcatgaatgtgtacctaagaatagaattgctgttaaggagccaagatggccaaataggaacagctccggtctacagctaccagcgtgaacgacgcactaagacgggtgatttctgcctttccaactgagataccgggttcatctcactggggtgtgccagacagtgggtgcagcgcaccgtgcgtgagccaaagcagggcgacgcatcacctcacccaggaagcacaaggggtcagggaattccctttcct

SEQ ID NO: 71227 - DNA, 1113 bp, Homo sapiens
tagtggtatctcatggttttagtttttatttttatggtaacaaatgatgttgagcccttatgtgtttattggctatttgtattttcttctctgtgaagtgtgagccaaatgttcatttttcttagtgaattgtctttttattattgactttaagagtccttttaaaaacaaatcctggatgtaacttccttgtcagcattatgtattttctcccagtccattaactccctatttgttttcttaattcttttaattttgaaaaaacttaggaggatttttttatttgtttagcttttatatttattgctctctgtgttctgtttaaagaaatcttgcctaccccaaggtcagaaatatattcttcaaagttttcttcttgaaactttatagtttttatggttaggtctaaaatccatcttaaactaatttttatatttgttttgaggtaggggtcaagattaattttttagtttatggatagttgtttcaacaccatttgttgagaagatttttccttcctcattgaattgctatgatactttcatcaaaagtcaactgaccatttagtatgtgtttatttctggactttttattctctttcattgatttatttgtctatccttgtgccagtatcacactgttttgattacttaggtttagagttaaaaatcaggtaatataatactccaacttttttctttcaatcctgttttcgctactccaggtcctttgcatttccatgtaaattttagaatctagaattttagaattagtcagtttttgctttttaagcctgctaagcgtataatgaacagttatgaatgtattggtcagtttggagagaattttaacattaaaccacttttaataccattgaatcatccagtccacgaacatgtcatgacccttaatttatttaggttttgttttctgtcagcactgttttgtagctttcaatgtaggggtcttacatggtatgattcatttttgagaggaaaaaagtactactataaaatttacctgtggttttctctgggtgaaggactgatggctgctatatgtctacacacacacacacacacacacacacacacacacacacacaaatatatt

SEQ ID NO: 71228 - DNA, 1040 bp, Homo sapiens
gaggctggatcatctggagccctgtgtgccatgggaagagacttggcattctacatgcagcagaagaccattgaagagttttagtcaggggagtgacatgatctgatttttagtttagaaagatctgatgtggagatgaacaggcgaagagtggaccggctagaagctgtagcagttttctagatgagagatagtgcggctgggatgatcacagcagatagtaccacaactaaaatttaaaaactagaattatgaaattatagtaactttaggttctagaaaaaaaaattagcatcaggactactgaggaagctctgtttggttaatggccactacttagcagtttggtttttggccaccttcagattgaccattgtgcaaggaattatgggtatcctcaccatcaatcccatttttactattttttacttcggaaaaaccatggtgttaaatgagtccattaaaaaaaagttgattgtttagaggaataaggaatggagtaaggagggggaaaggagagctgatcctgttgcttaaaaaattagaattaaaaagagggttcccatgtgcaagaaaacatagctttataaacaatgtaaagacataaaaggtattgtgttagcaaaaatgtgtaaaaacaatagctgctaatttcacaccccatgggatgagggagcataaatgtgcttcagctttagataacagagttgtctccactggccaagcgggttcacagagctttccttcagtcttgatgccacaagagggttggcaggccagccgccagtagaggtgttagcaaaacctaccgatttcaggcttaatctttcacctaccttttctttttcggtaatgtgttcattatttgctgagcattactctattctttgtctgcaaattttttgtttctaatgcagcttgctttgtatgggtgagatatggaatggcaccaaaatccggcaccctggaaagccagggatttctaccctatgacaaaagaatgccgtcttgacttcagagattgcctaatcccagctgtt

SEQ ID NO: 71229 - DNA, 1764 bp, Homo sapiens
tttcttccttgggttctctcctttatggaattccccttcaccttccagctactcaaatccagtagttcagatctttttcttctgtttcttcagtccagtaagactgcaggtctttctctgagtttcagcttcccagtgtggcttggaccctttttattaacgtggcctacccttaggtgaaaagccttaaaaatgagatgtgtacccagtgccattcactctcagtgtcctgcttttggacactccctagtgccttcaaaaagtttttaaatgttttgtccagaatttatgattattatctgcagatgaatccgtctgataggacctactctaccaattcgggaaacagagccacctagtctgttttcatgacttactgttctatcccgttgatttggcttccataatcactgttttaaaatatcactgtggtttaatagcatttataggtaatttttaacataaaaatttaaatgttacatttatatgttatgaagggtacaaataaaatgaacaacctcaaggccactactcaacaactagactattaccaatagcatttcatttacctatgtaccccctactccattcttcattttcccctaccatcctgaacttttgcattttttaatttcttgatttattatatcatttacatctttaattttaaagttttaaaattatttattacagtataagctttgcttacttttgaactttatagaaatagatccatataccgtataatttctctgcaatttttttcttctttcaacattaagatgtgtctatattgttgcatgttactgtagttcattttcatttctgttttccattgtgtcaagatgtgatacagtatgatgaataccactttattcattctactgatcaaggactttgtattgtttctccccatttgacattaaaaaaaaaaacacaacaacactggcattcttatttatatctcctggtttccatatgcaagagtttctctaaggaggattgcctagtcatggagtcagagtcaagttaaatttttacctgaactgcagaatgtcacactagtttgccaagtatttctacattacgttgtatatgaatttctgatgagctccgtcccatgacttactatcaaacttttaagtttttgtctaatagatgcaaaatggcatctccttgtggtcttaatttgcattttctatattactaatgaggttgagccccttttcatgtacttattgactattcctgttttctttgcaatgtcttttgggttgttcccatttttgttactgatttcaaggagatttttgtatattttgcttcctaattttttgttatatgtgttgcagatatccttttccagtctaaattcttgttttaataactttatatatatatatatattttttgagacagagtctggctctatcgcccaggctggagtgcagtggcatgatctctactcactgcaacctccacttcctgggttcaggtgatcctcctgcctcagcctcccaagtagctgggattacaggcatgcaccaccacacccagctaatttttgtatttttagtagagatggagtttcaccatgttggccaggctggtctcgaactcctgacctcaagtgatccacccgtctcagcctcccaaagtgctaggattacaggcatgagccacggtgcccggccaactttatagtattttaaagtgctactaatttgtgcttttagttgcagccatttgtcaacttatctaact

SEQ ID NO: 71230 - DNA, 1043 bp, Homo sapiens
tagtgccattttcttggtagaattctcatgagatctggttgcttaaaaatatgtagcatcgtccccttctccctcttcttcctgctctggccatataagacatgcttgcttcccctttgccttctgccataattgtaagtttcctgaggcctccccagaaactgagcagatggccagcatcatgcttcctatacagcctgaagaaccatgaaccaattaaacctcttttctttataaagtatatagtctcagttgtttctttatagcaatgcaagagcagactaatacagtgctctttattttttaaacttgtgtgtttagtatttgttcttttgttcatctggaatgaagtaaggaatccaatttcatttgttttctaaatggataactggttgtcccagctccatttattgtatagtctttcatttcctcgctgatccaaaatgcatctctatcatataacaagttttattgtatgtgcagatcttttctggactctttggtctatccattggtcagcttgtctatgtattcattagtacctttaccttttttaggagtgtcttggctatttcagggtcttagcttttccatataaattttggaattattttgtcaattttcatcaaagtaagtcttctagggattctaattggcattgcattggaactgtagatcaatttggagaagattcgtaatcttaaaatatgtaggctttttatccatgaatattttcttttcatttattttggttttctttgatgtttttcaataaagatttataattttattcatgagggtcttgcacctctttcagatttatttctaagtttttaagggtttttggtagacattttaaataaaaatatgaacattttcaaaaatatacaaaaatagaatagtaaaattaactgccatatatccatcacagaccttcaactattatcagtagaaggcaatcttgtttcctctgtacccttctcaactctttcccctccccttattccccaaattatgttgtttaaacaaattgtcgccatcaa

SEQ ID NO: 71231 - DNA, 1024 bp, Homo sapiens
aggtttttttcttagattcttttggattttctatgtggatgaacatattatctgcaagtaaagacagttttattgcttcttttccaatatttatatcttttatttatttatcttgtcctatggaactgaatggcacctccaatacaatgttgaataggagtgttgagcatgggcaatcttttctttttcccacattttctaaaggaaagctttcagtttcctgcccctccctgtggtatctggcccctgctgtgtatcagtgcaggatctttgcccaaccaggtttcctgctcctcccctagggaaagatgcttctccctcctcttctctctggcattgcaccttttcctggaatcagaggatttgctggacctcttccgggggtagactgttgttgctagttactgtaggtgcagagtttgttgggagagcctgggggattagggacagacagcttttgcttctgtccctctctgagaagaggttatttttgcctcctgggactttgccaggcaggagggtgtcctgcccccttcccagggacttaggtgttgcttcctatgcaagaaagcccagggaagtaggtaggtagggttttattgcctgttttccaacaaaggggtctttctcaggttttctcctcactgcagcctttcatgagcactccacagaaaggaacttgtgagtgggagtggacacttcttgtgcctgggcttcagaagaattctgaacttgtgtggcagtccacatttggcctttaagaagtccttaaaattttagctgattccttcaattacactatttgcatcctaacttttctttaaagtttaaccacctagttgtacctttctaaacaatataatgtagttgtgctgggttttgaaccttatataaatggaatcatgccatatatatgttgttttatgtctggtttcttttgctgagtatttgtttttaatactcagccatgattttgtggttagttattttttgttcattttcattgttttacagtgtttcatta

SEQ ID NO: 71232 - DNA, 1097 bp, Homo sapiens
cattgaacaatactataatctatggatcttattcaaattttgccagttgtcccactgttgtcttttttctgatccagaatcacacattgtttttagttgtcatgtctccttgtctcttttcatctgaaagagtttttcagtctgtctttatttacctttcgtgaccaagaaacttaagggcactggccagttattttatacagtctctcatttcaggccagaagttttatatttttatgtagctgcatttattaatgttttcctttacttattttatacaatgtcatcataatgactgtaatgttccaatgtctgggagtaattgttaatgtaatcagttttgttgggcatttatgatgtcgtcagcatttacaattacaaatagtactgtgctgagcatttctgtatctaaatctattttatatccttgcttgttatgaagagaaattcccctgagttaagggatatatatattttttaaaggcatttgtgcgaatcaccacagtatcccctacaaagttgtactgctttgcattgctgccagcaaagtagtgagctattttcagatgtaaactgtactttgtattactaatgttcattcttagaaatgaccatcttttgttttttaggcatgtggtttggttaaaaacttggcccttatgacacacatcacaactgatatggaagatggacccattgttaaattagccagtaacttgggagtagaagatgtgaatttattatgtggggaagagctctcttacccaaatgtgtttcttgtctttcttaatggtgggtatattatagagacatgttggtcctagatagtctgtgaagagggggagggaatccattattatcctggtatttaaagcacagatagactttaattctgggcccaggttgaccttcacttaaaggtagaaaatacaatgataacagaaacagttactttgttggctgggttatccaaggttctgagaggatatagctatcagagctaaagggtaactttgcagaaagtggctgctttctccccttttgcagttgctggcatatccttagtggaatacggttcaacatggtatctttaagta

SEQ ID NO: 71233 - DNA, 1049 bp, Homo sapiens
aagaaaaaattttaatactttttgacatcatatgttattcaataatatttctgaatatttggcaaaaagggcagaaaaaagtaacaacctataaaaccaccatccaaactcaaccaatgaggtcatttttgatgaatttccttccagtctgtttttctatacactatgtttttacctatcagtaatctatgctaactataattttctagttataattttgaataatagaaaagccactttaaggaaatatttagagtagtttatgtccctgcatctgcactggtatttcttcatttacacatttagcttacagactactttagaattttatccccctgcaaaggtatgactccattataattacaaacttgtaatgcattttgttgatgaaacaaatagcccttgcccttatgggtctcacaggctagtgcaggagactgacattgatcagaggatcatgcataaatccaggttaaggaatcatataggtaactatgaggccattttatagcaagagaatttgaccttgttgggaagatcagcatggctttcccgaggaagtgagctggaatctgaaggatagggaagagttaactaaagaagaggatcagggagcatgttctaagtaatgagaaaagcttgtgcaagggtcccagagcttggtagttgaaaggtctgaaagaagaccagcgtggctaacaagaagagagtgcagggaagcatggtgcacatgagttggtgggtgacgcaaggggtaggggccagagtaagcaagtccttgcaaccatgttagtattgtctttattttattttattaattttatttttgagacagggtctcagtctgtcactgaggctggagtgcagtggcacaatctcagctcactgcaacctctgcctcccagactcaagtgattctcccacttcaacctcctgtatagctgggacccataggcacgtgccaccatgcctggatagttttttgtattttttgtagagatgaggtcttaccatcttgtccaggcttgtcttgaactcctgggctcaag

SEQ ID NO: 71234 - DNA, 1404 bp, Homo sapiens
actattaagaactaggagttgagtctgaaatcccagttccactttgtgtgagtcatgtgcccttggacaagttacttaacccctctaagcatcagttttcctcatctataataagggaataacagtatggactgttgtgaggattaaattgcactgtgccttcctcataataaacgtgtagcattgtaaaagggaaattgtgaaatttgaatttaatgttaaaaaaattgaagtcatttttcagagcccaagatgaaaatgtcagaatactctatggtaggcatgaaatgaaatataacatgggtgagaagttcacaaagggcagtttgaaaactctgttttagtgactttctcttaacaccagctacaaaggagcaacagactcatatattgaaaaagtgatgatatcttcaaatgctgaagatgcttttctgatcaaaatgctgctgagacagacaaggcgtccagaaattggagacaaattcagcagtcgtcatgggcaaaaaggtaaactgtatcatttctcaacttgattataaaacaatatatgaatgtatttgttaaccacttaaataaaattcccccatttaaaaaatttactttggaaaagtattacattgttataaaaattaatcttgttttatttcttagattaacctgtttatatttaatggcatttaaaaatacatggtagacttgctcctctatgctgtctgtttcattctcctgcagttgctatgcccagaattataattatagatacagtctaggtgatgtgcctattgagatacatgtagctgttcaaaaaataaatagtagtacctttttttttttctgaaagatacatctttaaactactatatgttctgttgagtcatagtgtcagatgttagcactagaagacacctcagagttatccgtccccttgtttacagatgaggaagttcagaccccgcattttcagtggccagtcaaggatacacagctacttggttgctgagctggtgttagaacctgggtctcctgaccccagggcggtgctttgtgtgtgtcttacatctaatcccattggcaagcctcactcattcctttgatggttactgcacagttttcatctatttgtagttttgtttattttcaagaaacacgcactgtatcactgttaattttagctctgcctgccgcttagctttaagaagaacaacagctaacacttttgtagcactaactgtgtgcctggctgcgttctcatcactttacaggtgctgactcatttgattctcacacaattctggagggaggtggcatcattatccatattttatagataaggaaacagaggcatagaaagattaatagcttgcccaaggtcacacaattaatgggagaactgacatttgaacc

SEQ ID NO: 71235 - DNA, 1047 bp, Homo sapiens
aactgcacattgtgtttctgctgattttaagtttctttgccaagcgagtatatccatgttacggttttcttggtcaggtatacccagccttagttgtcattctgccagtgaaactatgtcagactaagatactctttcatcaaaatcatttttagttctgttgacagaggcaagattattttagcctgccaatatttttaagaaatgattggttccatctgttaatgtgaatttgacacctgtaatttatatagttccctgagatactaacccttaatgccctttgagtgtttttaaaagtatcttgagtttctaatgttttatatggcttgccagtaaaaaatcaaattctgtatattgaaactgtttccccttttatcttggtcttgacagttgctgagtcaattatggggtaaccttaaccttattcgctaggtcattgtggggtaaccttaacctcatttgtagtctctatcttacttggcctcctacttggacaagagcaaagttgatattcttcttgtaaaatattgacactggaagcttcacaagaatgtacaccataagagaatatcccccttctgaatcagtttacaagactaaggtaccccaaatccttatgtctttatcccatcagggtattatgcaaagagttgcagacttgcagatatttcagtggctatgcaatgtgctctaattccactaaactttttttttgttaactttaagttctggattacatgtgcagaacgtgcagttttgttacataggtatacacgtgccgtggtggtttgtacacccatcaacccatcacctacattaggtatttctcctaatgttatccctcccctagcctcccaccccaggcaggcctcggtgtgtgatgttcccctccctgtgtccaagtgttctcattgttcaactccgacttatgagtgagaacatgcagtgtttggttttctgatcttgtgatagtttgctgagaatgatggtttccagcttcatccacgtccctgcaaaggacatgaactcatccttttttatggc

SEQ ID NO: 71236 - DNA, 1018 bp, Homo sapiens
tttccagatttcctcttcttttgctgccattcacaatgaaggaggaaaaagcggactcctttgatgtggagagaaaaaaaaagcaatatatcacttccctgaaagaacatttctcagtctctcatgtgaaaaaggattagcacctccaacaaaggtcctgtggatcacagcatcgggcagcaataccaagcagtactcctaaggagaggaaaaactgtatttgagcaagagtgtttgtcctggcaaatagaagctttttaataactgcaaatctgagataatggcatacgctccctaaatccttaaggaccagacagctagtttaaatggagtgaagtcaacttttgttttacaatagaagtctagtcttatcaaaatatagttttttcacttaatggtttagtctgcctatctgtggttgataaggattatgcgtatatggataaaatcgtttggaagattcatcattgaccctctcttatacaagaaaagttccattataaggtcacttgcttccattttgcactaataagttattcaataacctgcagaattaatttattaagattttgattgaatgtttcttagaagaaaagaaaacctgccctgactttccaacacattaaagaatctttttacagtagatataaagaggcttgtgggaagtaagaaaatggtaattcatgtgtgatagaaaagccaaggagaaagtttatctgttaaacaaggtttggttttgctagaccttcatttgttagtccttttttctgtattatgctttctaaaattgagacagtgaaaagaacctgatttaaagtaataataataacaccttgtactcgtgtagtacttgagactgtctaaaatcctctctgcaagtccacagctttaaacagtctggatagctttggctgtctgctttgcttgatcctgcttgaatggaagtttctaagtgggaggggagaaggaggctggtagggctatccgtatgagccccatcataaggtgtatgatgcca

SEQ ID NO: 71237 - DNA, 1029 bp, Homo sapiens
ggctgataagaaaacaacttccccagaaggaagctctgcactaaatattcttaatcagatttcaagcaaaggtattagagattcacatttcagtggaacgagcacttttttcattttaataacataataaagttgaatttgcttaattaaatgtgtcgattaaaactgaaaacacaaaatgtaagtcatctctctccttacccacccccaatataagtatgtcatgcttccttggtcagtttctgcacctcctgcccctctctcccaccttctcttgatggagggtggacaggcagcttcctcctgagcagacgccagcctcctcctgcgaactgctgcttaaggggtgccgagatttctctttggttttgttttttcaggggtatagctgaaccctccatctcctcaccagccaaaattacattctcccccgagctcgtcccagaaccggcccctttagggattgccatttttaacattttgttcactgctgaacaatgttgttgtcggtgcacctagatttacaatttgatctctttcaaagtagatttcccagtagccctagggttttgtcagataatttcagtgtggataagatggatttttggagggaagaaagaaggctcacacactctgcttgattgaaattctaacacattgtagctgaatttgaaataaagtgaactgaatgattgtttctgttcttcatgtaggaaagcatatatttataataaacaataccattttaacccaaaagccaatttaaactaactacatgctctagaattcaactccacaatatccatattgttgtcagctacaataaatcagaatattaataaccagtattacctaggaaaatggcattctttttcttttgactttagctcctggtgattacaacaaatcgcaaactattgaaatagtttgaataattacatagaatcaaattgaatgaaatatttgagagcagtttctttgcaataggggcagatagttaataactttatacacagagaaaaggaattt

SEQ ID NO: 71238 - DNA, 1030 bp, Homo sapiens
gcacaggagggtgggcaggcagcccaacagcaccattgtgtgctatgccggcagcacagtccacaggctgcagtgcctttcgcaaggagagtcgtttttgaactgtttgtcaagcaggattgttgaaaatcacttttgttgctcttgatagaggccatggggaagattttagagcagtggaaatagagatagcagcggggagatcccaattaagtactgtattcttcctttctgccaacttgctttatgtggcatgaaatcttctctcccccaggtgtttgtggcttgatcgtcccccaggaagacatgccattttgtgattctggcatctgtccggacatcatcatgaacccacacggcttcccatcacgaatgacggtcagtgacctgtaggtttttcagaggcattgcctttaaggaagaagcaggcagttagtttagttagagtgagtggaggtgacgaggactctgaagctgttttttcaggtagagctcttctgccccttgccagataaacaggcttccagcccctaacgattctgggccactcccctctacataaagaatgaggagcacatctatacctccctttgagagtggagtcttctgagtgatgaatttacccctcagcaaaagagaatcccttgtcttgaacctaaatggatctccctttcagtgattatttttagtgatcctggctccacctcttaccagctgtgtggccttggacaagttgcttatccttcccatacttcagtttcttcatctgtaaaatgaagaaatataggacctatctcataggggtattgagaggcgtaaaattagatcacacatgtcaagcttaaatactgcttctattaatttattactgttattaatagtggtcgtggggaaatgagctggagataaataagcagagagagtgcttgtgccacagggaggtgctcacttaatttgttcacatcctgcaggtggggaagctcattgagctgctggctggcaaggccggtgtgctggacggcagattcca

SEQ ID NO: 71239 - DNA, 1146 bp, Homo sapiens
tattaaaaatgtggagtgcttttaaaaattgcctattaaaactataataatatggatttcttaggtgtatcatacctgagatgttatagaaaagcacattacaggaaaagactaatggaccatttcagaaatggttcaataaaataattgtgaccatttcagaaaacatagttgtcattgctaaattcattaaccttctcttcacttctccacccagaaataaggcacatttttggccaggtgttgaccagaaagtgcaaaaccataggatcaatttggtggaccttcgtgaacataatttgtactgaaagaattggatgggttatatcctgcttgccgtagacaatggttagtctatatcccagtccacactgccttcccctatgcccccagccagagttttcctttctttgccatttatttcagtgacaaaatctgagaagcactgtttagttgaaaattcccgagggcatttaaatatatcaccaccagctttcactttttgttcattcttgaacatagataggtaggaggaaaaattgcatatagctttactctgtggatgatggaatagcattgggtaaccgagtgtcataaattctaccatgagcaaccctaccattgaggaatagaatcattcactgttagagcaggaaagaatcttgttctgaccgccttcttgtacaactaagaacactcagctagagaggtcatgtaattactttactatgtgacaaaaccaagacaaggacagggtctcttaataccctctccattgtgccttccactccactctgtgtcttccaagaaccaggttgtgctgaagtcagcagaatggcctgatgaccacaaaagccttggctcaggatgctgagagtgtgatcagggacaccgagcaaacagtggccaagcttttcctttgcctctctgctgtgtctgttgtttcctttactttttctacttttacatcatgctgtaccccagagtttacttgttccaaatcagaccagtgttgcagggagagccctggatttgaaccctcactgcaccactcaccagttcttatctgacctgtcgggcgctctgtgtccatttcttcatcttcaaaatagaggtgacagttcttcctccctggatcgttgtgtg

SEQ ID NO: 71240 - DNA, 1127 bp, Homo sapiens
ctggcagcagctactggaggatccaggtttcccccacagtctattctgcttagtttttctgcttttaaataatagaatactgagactctttgaaaatacttaaagacattgtttcctgatttgaaaactctgctgtcctaataataatgatagtgatggtaatagtaatggtgttttctgtgattatatattaatatgttattacatcatatgatattatgcaattatatattcatttaaccataacaaccatcaatattacatcttttctcaattgaggctctttgggataggtgtgcttatgcacttttacaaatgaggctaagcagcgtgtccaaggtccctgtccagttattgatttggatccagatgagccctgctccaaagcctcgtgctctctgccagcatgtgatgctacctctttgtttgtttaacagaataataacacatttgtctaataacttgtttcaaaggcaacccactgaaggacggtctcgtgatggtggcttgcgtctcggggaaatggaacgtgactgtttaatcggttatggagccagtatgcttttgctagagagactaatgatttcaagtgatgcctttgaggttgatgtctgtgggcagtgtggacttctggggtattctggctggtaagtggataccatatgtctcccataccacaccccttgcctcttaaatcacagctcaagaattgaccctggatcctatccgcatattctccagcctctgtctgtgatcactaacataccctccctcatgcatgtattcctgtcattggggatactctgtgtacatgtctcatttgtctacatcatgatctacttcctacacaactagaggctaagctcccaaggagtacaaactttacctccttttaaatattctctcaggtactttttataacactatttgcctgtgaaaatcctacagatgcattgtcgggtgttagaatcgcagtgtgttaaagaaactctttagggaagattacatcgaatgctttcatttgtaacttcagacccaaagagccagggatgctgccccaggtcttatagcaaattggtgacagagccaagagccaagaccaagacgacctggtaccctgccccctt

SEQ ID NO: 71241 - DNA, 1903 bp, Homo sapiens
aagccacagcctcccctttttgctacctttgccctaaaaaagccgttcattttattgttgttcacgtcaagtttctacctttgcaaattgttcagatacaaggtaaggtaaggttttatacacacacatgcacgttggaacattttaaatgatggagaagtatttaataatagagaagattaaagggctttctggaatatgaatcagtacatatggaaatttaaaatagattagcttggatcggagtcattgggtaatgtactagtcaggagaagaagcgaaaggtacccccgttaaatgcatttccccaatttaatgaaagcatgaacatgattcctagataaattacatcaacccaagcacattaaaaacgtaatttttgaactcgaatgcattaaataggtctttagataatcttttaagaaaaagtaactcaccaagtttgtatttgtactgttaacggatcaaatacaggttaagcaccctgcgtcccctcatcataacatcaactgtgcatttgtgagggttagtcttctcccattctcctcctcaggaaactctgtctgcatagttaccaccaccacgtgcacattctcagcctcagttcttgcttttcttttctaaaataatacaagctttattttactgattgcaaaaatgatccctgctcattgtaaaacattcaaaagttaccacaaatataaagtgagtcacattaattcccaccacccagagatgaccactattaacattttggtgactctttcaagattctgataagggcagaaaaatacaaatatacacacaaaaaacttaaaattttacgtatgattttgggggctccatacacttacaaaacttgtttgagggcccccttgggaccatgctgatcaacaaactgcttttttcacctcacagtttgtcctatacaccttccatttcaataaatgtgtgtccacaacagcaggtctaatggcttcacagtcttcttctatctaaatgtcccagtggacatttgcatattctcaccttatgctgttataaatagtgtggctgtcagcattcttgtgcacatacctttgccacttttgggattacaaaatcaaagaatatgcacatttacagtttttacacacactgtcttactgccctccagaatggccaatcctttgttcactaaggaatcccccttcaattcctggtcagcacccgatcttccaagcctcagttgctattcttcttggactcattttcctcctcgttaactgtgaggacctagttttctacctgttaagagtcaggatttgtactggatacctactgtcctagctgctgcagacccttgaggtgtagggtaaggttgtattttggtctgaaacctgaaagaataattcactttctccccagggacccttctacagttgtagccattgattaagaactaagttcagtttaccagctcttccggaaagaagagaaattaaagtcctaattggaatatgaggcaaagtggttaggaacatggactgttgttgctagggttaagtgggaacatatgtgcacatgcacacatacacacatttcttagttttgcacaagggacaacatgttgtaagtatagtacctccaacactcatagaaatcaccaagcctgaagagcactagacaagttaccatttgattgaataccactgtcctattcaaaagtcttgtcttttccatcagactttacgtatctcagtgacagaaatcaagttataattgttgagcgccttgcctagaataatatactgctagtatagttgatgcttatcaaatacatggagattgattgaattggtttaaaactctttaaacaatgaaaaaaatttaaatctgagtaaatttcccaatggttcagatt

SEQ ID NO: 71242 - DNA, 1135 bp, Homo sapiens
taatagggcccaaccccctcgtttaatagatgactcatcaactatgatgataaccagagacgtggcttggtggccctgcaggccacctggacatatgactaccccatacatagcaaattccagcagcattccagttttgaagtatggcaagtttttggccaaatgaaaggtatttaagatacagacagataggtaggtctctagtagtagtcctcttaggagaagaaaacaagactgctggcagtgaggtcttcattcatgtgctagaagaacctgattcatagaaacctgatattgggacagttctataaatatagcctctacatttgaatagagtatgtaaatatccaggaccatgtaagaggactttttgttttctactttggaagttgggctctgactctttgatttcactctgtgggttcttgcagagaagcatgtttagtgggctgttcctttgttatactttgttcttatgtccagattatgttatataatttgtttctaatttttagttgtagaagcaatctgtgttcatgaaacagcacaacatacaccacgcaattaggtttattcccttgtagtagtgctgtttgagtgtatctttagaaatctatgaaattattcctagctctctaataggtcaatatttggccagatgccacaccataggttattcaacaataacagtagtggccattgaacactactgtgtgcaaggtgccatgcttataaaaaataaggaaaatttgataggtagtaaagttgaataacttgaccaagtttacacttttagtaaacagtaagactggactcaaactcaaggttgtctgactcctgatcctgagctttttagagcttattcatggagtatgaaacctgtagtgagagtcctcataatagtctggtgtgtcactgagctgttagcttgcttgatctctaaattgaacaatggtttaactctttttttttaaatggggttttatcgtgttgccctggctggtctcaaactcctggtctcaagccatctgtccacctcagccccccaaagtgttaggattacaggtgtgagccaccatgcccggccaatttaactctttatatttgattttttgctcctgtttctctggaaatt

SEQ ID NO: 71243 - DNA, 1744 bp, Homo sapiens
atatgaaccaattcttgagacgttaatctttatttctgggaagggaacagctatgattcaaactgattgtcttccatcctgatggtgaccttatatttcagtttctaacattccgtgatttaaaaaataataaaaaccttttctctctggatttttaactgttgttaagtacattggcagagaaacattctgtgttaagtcatttgagccaaataatgatttttgcatactcgttcttgtttttcagaaactctgtgaaggcatatttaaagtccttataaaggacatcccaacaacatgtcaagtgtcctgcctggaagtactccgcattctctccagagacaaaaaggttttagttcctgtgacaactaaggaaaatatgcagatactgctgcgactagccaagctaaatgagttagatgattctttggagaaagtatcagagttcccagttattgtggagtcattaaaatgtctgtgtaatatagtgttcaacagtcagatggcacagcagctcagcctggaacttaatcttgctgcaaagctctgtaacctcctgagaaagtgcaaggaccggaaatttatcaatgacattaagtgctttgacttgcgcttgctcttccttctgtcacttttgcacaccgacatcaggtcacaattgcgctatgagctccagggactaccgctgctaacgcagatcttggaaagtgcctttagcatcaagtggaccgatgagtatgaatcggccatagaccataatggacctcctctctcacctcaggagacagactgtgccattgaggccctcaaagctctcttcaatgtgacggtagacagttggaaggtgcataaagaggtaaggtagagaaggctatttttgtctacctggaatttaattggtctgggacatccctagagtttcctgcaagagaagaatacaagttgggaaatggaaaaagttcccacttctcccattaagcaattgtattacccaggatatacttcttaaccattgtaagtcttattctttccatttgtgtgataacacctatcagaataggtgtaaaaatggactactattttgtaagatgccaaatatagttttctgagttgcattattctctctttttaagagtgccgctttcaggaataaggtttaaattataagatttgaggggaaacaaaacaatgtagttgataaagctataggcattttcagtggctgccatcttaaagaaaagttaagacagatcaagccaattgaagttgatcaatcagaattggtgtctgctcaggagagtagaagatgctctgtgtatgcctgttgtcccagtctctgggaggtttctctgtagtgttagataactatcagaggcataggaccacaactagatatctgtgctcatatataagttctagaaaacaagctgattataccagagtgtgggaaaggttattttaaaccacttgacttatttctaaacaaagatctttcttcactgtggcttggacccttcagcaacccaaagtgacgcagatttgatagtttacatttgagtacccacaagaacaatatgctaaataggaaacttagtttaaggaagtcaacaaattaagtgaagtagacataagcttttttccctccttctagaagcataacatgtcacatttattctctttttagctttaaataactgttgaaattcaccccctcctgtaaaaagaaagagatttttggttccag

SEQ ID NO: 71244 - DNA, 1113 bp, Homo sapiens
cttgattaaaaaatgtaattgtttttctgtagctacaaatcaaacattcctttagttttcttaagacagtacctttaaaaaaagtcagattaactgcaataaatcatatcctaacaagattttattaaacattttgacccactgtaatttttttcgtaattaagagacactagaaatttagaccctaaaactaaaagaaaatgctcttataagcccaagagtaaattgattttttttaagaagtcagatatcacaagttaaataatcatacaaggatgtgaaaggaaggcactttgaccaaaattgctatactagtcacaaatacattgccaaagatttctccgaataatgaatttaatatcttgacgcagcacccagtatttgttgaaagagagcaaaactatgtaatagaggtttttaaaataaaatttttttaaagaagtcgtatttattttccttagtgatgctagcttttttccttaaatttgcttttgtcttaaaagttattttgataaaaacctatcggcttcactgtaaataaggagcatgcctagagccacagacaggatttatgagtatttctcagaggctttcctgggagattgaggttgctgctgacttaacagtttatctggaatggccttgcatgttcctttaatcagaattagagtgattagtatcattttgagcagtaatgactccaggctaatccatttaaattcaatgaaaatggcactaacctcaaagtgctattttaggaagcttctgtagtgatcctgaaaacaatttttctctgtgtgtgtgttttaagcataaaaatttttttaaaggatttcaaagtaacatctcaaattccatttttgaaagttattttctaagtttgtttttgcttttttttggacactttgatttgctttaaagaaaagtttaatgaaataggtaaccctgggtagcacagtgtatggttgtgcgttatcatcaaacccaaagagttgtgatggtgattaaatgagaggttcataaagcacctcttccctggcaatgagaaaatactcagtaaatggcacttgctgccgctgctgccaccactgccactgtgccactgatgtgcta

SEQ ID NO: 71245 - DNA, 1081 bp, Homo sapiens
ctccactccattaccatgtcctgccagtcttaaagcactcaaccctagatctgtcagcccaccttctttctccacaggctgctgagccctaagggaaagttttacctaacctgacagatggctccatcttctccactgcacacagaggtgtttttcaaaaagcggatttctactttaagtcctttcgtggctcttctctgtcttaaggattaagagaaaaaaaatttttttaatcactttgcatgtgtttatgatatgcagtcttatgtagaaaatctgtttcccctggtcagttcccactttcatcctatgtatatgattctaccaaacctttgcaactctctaaaggccttctgcacccccttgtcctcagaagataacatgtttttacttagtttttattatggatatttggggtggcctggcaacatggtgtaggggttgtgagattatgagagagcttaaagccttcaaatacatcttagcatggccattgaagcctgacatctggattaaatctaaaccctttcaacaagacttcagggcagaatatcatgctatcatgctaaagtgtcagagtctctgcctaataaattgggcaaaatgctgttatcatggcaatatgccagtaacttctgaatgagggaaaccatctctggttgcgttgtattggatgaatccatggaattggatctgaggcattggccttcaccttgggaactctctgccccgagagcatccgtctttctgttatcaagcaacacatttgcatggcatggagccacttcctccctttgcctccaggagcctaccattccacaatctgcatgactttgtattcaagctactctgctcttctttctcttccttagacatagattccttattagggcctttacacttgctctgtctactgcgtggaatccttttcccagatctttaagaggctgagtccttcttgacactgagaactcagctcaaatgtcacttcctcagttaggccttccctgactgcctaatttagattaagaactccctcccagccccctgccaccacacacacacatatcttgtcactatc

SEQ ID NO: 71246 - DNA, 1087 bp, Homo sapiens
gctgcttattttcagtgtttctcaaatgctttatgttgtaatctaaggaataataaaacaccagtggatccacaaaaggatttaaaatcccagggaagaaatgcaaagctagcattgttgccataataaaattaaggagctggcattaaagctcactaattcctattttagcatttcagaaagtgacatgacatcatgtgattgtgtctgtctattcaacatttgttttttttctaatttgtacaacatatatttgaaacagttttttatttcctatctcatagtaagtgtcaagtgtccataatggctcatttttggaaaagaaatattttaattgactcttaaaagtcacttttgaacttcttattatgtttgcattttaaaggactattcaatcaagttaaaatattgtatttttttaattgcttttcagcaatgcagtcaaccttttaagcaatgttccagtctcttgtttggatgttctcatttgtccgttaacccatgaagaaacagcccaagaggcaacgactctagatgaactgcccagtaataaaacagctgagaaagaaacagttttgaaaaacaataccatggtatacaatggtatgaatatggaggccattcatgttttactgaattttatggagaagagaatagacaaggtaaggctgataaaatggaagccctgggaagatgcttccaaagaatgtaaatgtgccatacatacagacacacatcacagagcatgatttttaaatctaagctttttttctgactgatgtgctgcataattgtttttactttggaaagcagtttattacaatatatgataaattgctgaagccatgttaatttatttgtttaatgctgaaaattatgttcatgcaacaccaaaattatgactagtgcttgaaaacaaaggaaaaagtaattactgttccattttgttactttgtgagtcctagaaataaaaaatatccccccaaaaacttgctaaatactcttcataatacctaaaagacatcttcccaaaaaaaagaaaaaagaagaccttgtcaatttcccatttgttgtgagctgtttatac

SEQ ID NO: 71247 - DNA, 1334 bp, Homo sapiens
gggagactccctctcccaaaaaaaaaaaaaaaaaaaaagtccccacctcaaaaacaaattgatatcctcagttacatgaaggaaagtaatactgttagaaacaaaactaacgtatttcaaaaacatatggtttttttttttatagggaagcagctatagagagggtctaactccagttctcagcttattaaccgaatgttcccgagcccatcgaaacatccgaaaatttctcaaagatcaggtaactgcttaatgcatattacattgcaaagttagtctttttatgtgcattttaaacatagaattaattgaattttctcacaatgattttgtttcagataatcagaaactcagtcttaatctttgaaatcttcttaatcaagaagtgtgtattttttgagtcattcattcagcaaatgctaccgagatctgctgtgtgtgctgtgttttgggcattgaacaacagatgaagtctttccccttgggaagtttattttgtagagagggggacaaaaagtaaacaaatttaaaatataatggcaggtggtgataagcattctgaagaaaggtaaagcattttaagagagaggagacactttaagggaacaagggaggacctctctgagatgacatttgaacagaaaggtggaaaagtaagagtatctctgagaatgattggaaaggaatgtccctgagagaacaagttcacaatccctgagacaagaggatgctttggtacacttaaggaaaagcaagaaggcctgtgtgactaggccacaatatgcaagggggagagtggtagataaagagaggtaacaagagccagatacagcaggcggtgtaggactttccattctcttctaagtgagatgagaagatattggagtgttttaagaggggaagtgatgtgaccttatttatgcttaaagatatcctggctactatttgtaagattgacatagtggagcacaaatggatgcaaggagacaagtccaaaagataactgatgttgcatgtttggagtaggatggtagtggttagagttcatacttggggatatgttttaaatattttaatatgtcttaaaagtagctcacagaacttgctgatagattggagtatgggttgaaaaagaaaaaataagggtgatttttaaactttcagattatatcttagactacaagtgtaagactttgattgtaacaatacctgaaactagcctcctctaaaatcccaatttcaagcaccttctcttatttagtaccctcaatccaacattctttcttcctcggaggattgtcagtctgtcattttttcccactgttcttcactca

SEQ ID NO: 71248 - DNA, 1036 bp, Homo sapiens
aacaccttcccttatcccacttctcaagctgcctttctatttctatgctcctctttatgcagtgtcctcagaagagttctctgtactcactctctctattctttttactcgtttttgactcctaaaccctctgtaggctacatgccttccgccccactgcaaaggtgtttatcagagtcaccaactcaactttgccaaagctaatagttctcaagtctctttttttaaattctccaatagaatttgatgtaagtattccctcctccttgaaatactttcttcacttggtttctaggacacaatagagaacctctttgttgatcttcctcgttttcctaaccctaaatgtttgagtgccccgaggcaatactatcttgtctctatctctgctgccatggtgatctcattcaagagtcatggttttgaaaatcatccatatatgctgatgactctcaaatttatatctccagccctgacctgtcacctaagctctagacttatacagtgaactgccgactcatctcctcctcttggatgtatagtaggtatctcaagtttaacatacctcaaactaatatcttgattttcatccctccaacctatttcttccccttctttccacatttcaatacgtggtaccaccattcacccaattgttcatttatcactacatagaatctcccctaataaatgaaccagattcattttttccctctgtatttatggtcaagatttagtaagcaccttactgtatctagaaacactaataggtagtgctgataaggagagattagaaaatagagaccatctttgaggaatttacagtctgttgaaagaagagaaatacccagaaagcatgaataatgatttaggcaagattaattaattaattaaggtcatttccacatttgattattttaagacattctcccttgactaggaggagttggtgaagcacagtaaatgaaaatactttttttctgcattttcgcttttttccacaagggatccaggtacacctaaactgtttagattt

SEQ ID NO: 71249 - DNA, 1019 bp, Homo sapiens
aatttctaaattctaacctttatacctgtttctttaatgcctctgagaatggaggtcccttgactgtaaaggtgatataactggctggtatggtttatacattattctagacatcaactgaaagatgtgtgtctaatgacatttggctccttttagatgagtggctttcacagggtgcataggcatctagaggcccaaagaggtatctttaaaaggctgctttgtggagggataggaggaacagatggtcaaaagtgagcagaaccctagggagcctccttgcacacttaacacaccacaccagttcataatcagatcgaaaagcttaaaaccattgtactaataaactcaggggtgtttccttcttgaccatatttttctcagctgtagctatgccaccagctgtataaacagtttcttcagcacaaggcaagatactttttcttttatttgtcaagattttgctatgctgcttcagtcaagtctttttatagttgtctcattatattgggctttataaatttatttatttttaatattaaatatttattgaagtaagtgacccagaaaccaggacatgaagatttttctctttgcccaatttgggctgtgatgatgtatttatgtaaaatagcatttctgggaactagaacctgttactgtaagcagtcataaaacgtatctaaattcagagttctaaaagaccagaggtaaaagaggccagtatattagcttaactacagtactgagttttgctccagtgtttatttgctatggattcacaatcgtcagttttctatatcctttatgtcaaggttattactcttaatcaaacggcctgacatgggaaacatttaaaaagcactataatttaaaaaggcattttgaggtcttttttgttttattgcctagatgcaatttggtattcctgtatgtatatatattcagtatgtataaatttatgtggctaatacatggtagatacatagtaaatatcagataagtaaatgaaagaatga

SEQ ID NO: 71250 - DNA, 1166 bp, Homo sapiens
tgttgatgttggccaaaggtagcaaaaatttgaagaaagagcaaaagacttgaaatacagttcaggttttatacctgtgttcatttgtccatacctttttagtgtgtcttaatccttttgtctccaggcccatagctgttgtcagttcatataatagtcttatacaaaatttatgatgaaataccacagataagaatttagacacttcttgtcacctaattggaagtcacaagattggagtgctacaaaatgggacagaggagcagagacaaggtggaggagatcatgataaatataattacccaataaaatgtccaccacaattagtgttcttaaagcatcttaagactccaagttttggaatgaaataaaactaactccagaatttcatagcgttaagattgaaacctggactgtggcgtctcagactgtactatttgaggttgaaaggtgtcaggtatttgttccaccaaaagtaatctattttatgaaatctcacgtctttgttgtcacaatggctattatttgttttctcttcctttctgggtagggaaactacatgagactctggtttgaagtggggagcgggagaagagacagtgttcatctgccttctgccacagcacactggcatttttcccataagagagtgctacgctatacttcagtgccctaacttgtgttttctgtggcttttgtttacattcttccgaatatccaggggaaaaatgtctttttaaaggaaaaaatgaaacccaaatccctagactgactttggagggttggaatgttttactctatggcaaaaaatgagttcttactctgtaagaatgaatttctgccttctgcttttatactcagatagcaagaattgtgttactttagtagctaatttcagagcaaaccattatatcattttagcagccaggggacttgaggttaccttatgtaaaacagacttaatttccaccaagctcttaagagaaccaagaaaaccatcaaactgtgtcctaatctgggaattcatatagtgactttgtatgctgtggtgcccacaataagcccacagcttaccagtgtgtcctcctgatttcatttttttccctgaagcatgtgatcatgtgtgcaaatgtcattatatcctaaaagtgcctacaggcctgatt

SEQ ID NO: 71251 - DNA, 1943 bp, Homo sapiens
cctgataaaagaggaaatagcacacaatgagtgtctaaagcaggcactctagacacacacacacacacacacacacacacacacacacacacacacacacagatttattagttggtctaaggtgaggcccaagcttttttttttttttttttttttttgagacggagtctcgctctgtcacccaagcttttttcaaagtttctcaagtgattctaatgtacagccaaggctagaaataaatgacaaggctatgggttttcaggttgccccagaacctttgaaagtaccttaagagaaaacaagtgggtaggggacaaataaagggactctacgcccctatctacttggctattcccatccccttcttgcctgagcagttcacttttgtctattttatatattgggtttctaatgggggaaaagttttaaacatgactctagatgtaggtcttacgcaagaatggcaagataggttttgaatcaggttttcgaggatggtgagcactgagtccttccataagaattggtatgtcatgcagcctctgaggaaggtagaaaagaaaagtaaatctaatagtaatagataacagtacgtagtaagcaagcctttaccccagatgagaaaagccctagtcagtaaagaacttgcccaaccgaaagtctcaaagacgggttgcaagctggctaccagaagatttaattaatcactgtgtctttgtcttggccagtatctttttttttttttaatttaaactgggcaccgttttccagttgatctcaatctcccaacactccacattgtgtatatttgaccctctcactcacttgcttatcttaaaggcgtggcttctgaaagcgtttatgttcatagaccctagaaagcaatttattagcaattgctatttgcagggatatttaatttgatcattaaaaacaaactatctgctaggcgccatggcttatggctctaatcccagcacttcaggagctgaggcaggaggaacacttgagctcaggagtttgagaccagccaggccaacatggtgaaaccccgtctctactaaaaatacaaaaattagccaggcgtggtgacacgtgcctgtaatcccagccaccctggaggttgaggcaggagaatcacttgaacccaggaagcagaggttgcagtgagccgagattgtgcgactgcactccaacgtgggtgacagagcgagactccgtcaaaacaaacaaacaaaaacaaaaaaacagtatgtacttggctggtacaagatactgtgatctcttgtctgcttctccagaaaaatgtttgttgtggatatttaggagccattgaaagagttatcttttatttcctgtcctcaaaaaaaaaaaaaaaagtatggcttttctctaagagaatagtttgtttggtattataacctcatacaaagtttatgcaaagtattcattttaagtactgtattaaatctatttccagatagccaggatgatatacctgtctcttggtaggctagatttcatccctttttttgtctaggccagatcaaacctaattaaaattgttcttctgctttatcttttattatttaaacactcattgccctctgtggtctcactaatggactaatttcctgagattataaattggcatgctttcatttccagattgtagcctctctgtcatcatttttccaattttttttgatgtttgttttatgctgtatcacaaaatggatttcctcatttcttcttccctgaaatcatgtgtccccttagaattaatggataagctgtgcatccacggatatcctaacggcactaatcaaattttgtatttttaaaaagcaaccatgcctctaaaaaaaaaaaaagttggcaagacagttttcgttttttaaaaaaagtatagcccatttcccaaagcaaattagtggaaaagt

SEQ ID NO: 71252 - DNA, 1026 bp, Homo sapiens
atagggtggcccaggcagcagtagttcagatagctcttggctaccatggtttttctacatgtgccgcttctggatgtgcattcctaaacatttaaactctcaaagctaagatagtaactaccagagcactgtaataattaaccaactaacctccctgtcttcaaaaagatgctgtgagttagattcagtgattttgctgctgcttgtatttttgttttagcctgttttagtttttgtttcaaatcatgatgcttttattttttcatttttgatgtgtaagtttgcaattacgcctttttgggttgctgctgaaaccaagaattctaaaatgtcatgcacccaataagaaaaagtgaaaagaaatagctcacatgaaggattttctgaaaacagggacttgtattaattaggagttctaaaaaaaaaaaaaaaaaaaaaaaaaaaccaaaaaactccccttcccctcttgcttctcacctccttccccttcaaaaataaccagttttgaaataattaaatcaagtatatactaatcagcaactagtcatcttggaggagttattagaaaataattcctttcatacttggctgagtcactctattttctagtcatacattgagtcactatcttctttaagccatcttgaatgaatgcttctgtgtgttggtggcagctgccacttaaagatgcatttcttctggccatcccctttttcacagtaactgtgtaaaggctagtatccctcagtcaaaagaaggagccattggaatggaaaagccagagagccaaccatgaaagggaaaggtggaacacagaaacgagcagagattaagggcacagcagaggcttaggggtagaaatggacaagaacaagagactgacatggggagtgtgacaagtatggatatttatccacgctgcagagtatgatgctggtagtgtggtagaagttgtttaggagtaaatagcttaattatctacaaagctaataagactagaactcagtaacttccagctagcccttt

SEQ ID NO: 71253 - DNA, 1656 bp, Homo sapiens
acgtcaagtctgaaataccccagcttccacctgatttaaactatgcctcaaagaagatgcctacttatccggaagtacccagcagatgcccaactgaaggtgacactgatttttgcatgtttaaagcagagcaaatatgtcttatgttggctttgatggtatcaattttgccattaaagttgaagcaaaaggcaaccttgagaatagttcaaatcatacagaatttttgcatgacgtgtgttgggcgttttacattgtctgcctttgtgtgctttctaacatttgctctcactaaatacaatcaatgacaaaactgtataaagatcagcagtgggcattccaaagcagtaatgcaaagaatgaagtcattctttatgcgtcttacatgtcttttgtgctgtgttcctcattagtcttaagtttcttctctctttccacttttttttgaggtaaaaaaagatgccataaagccaaaatagactaaactcagtacaattcagggaacatttactaagcagctactctgtgcaaggcatcgtgctaggaacctgaggaagattcagaggagaatgtgacagtctctgcctttggaaaactcacattctagtggaagaaatgactgtaatctagtctagaatacaaggtagaaggaaataatgacaaaatgagttctatgttgaaatgtaagcatgcaggaaaaggagtagttcattctgtctggatgattcagggactgtttcacaggaaagctagcatttgtgctgatcctagaattttgatgtatttaatagaaaaatggaaaaatgaccattcattccaggtggagagaaatttaatcttgttaataagtcttggatagtcacatactacttatttcttctaaagagctcaggttgttttatcattatttgattagtacgttatcagatttatcattgggggaagcaagtaccaaagaattgcccaaagcatttccaagctaatgactgatgataattcatttccttttaacagtttataaaacactttcacatacatcctctttctagtttcattttaaaaagtgagactagaccttcattttccagaactcaagacgtttgctctgtccactgtactacggtgtctgtctgttatagtaagtgtttgccagaacacttcctcatcaccctgtcagcattgtactattggttagttccctccctttcactctaggacgttctgcattcaaccaagtcgttattgtgctaagagtgtaccatagctttgtctgattaactttccttctcaaaaatgaaatggttttctcctgcacctgaattgaaaggcatgtgagtaaaggatagggttggaggtgatgtggccaatgaatggacactagacacttccttttttccatccataggagagcagatgtgaaggacctgcaccaggatggtggttagcaacagtggcccgtgccaaagcacttaccaaagtgatgatgactaaggttggtcatgccaagtactgttactgagcctggtgtagggtatagatgttattcactaccaaaattgtaaaaccaccaatgtaaaagttaaaattacatttctattttgcctccatgctggacatagccgctgcctcaaggagctcatcaccttagcagctttc

SEQ ID NO: 71254 - DNA, 1955 bp, Homo sapiens
ttaaaaaaggcttccctatgggactatttaccaaagttgctcaacccgcagcccaggacgcttttgaatgcggcccaacacaagttaataaactttcttgaaacattatgagatgtttttgcaattttttttaagctcaccagccatcattagtgttaagtgtattttatgtgacgcaagacaattcttcttccagtgtggcccaggaaagccaaacaattggacatccctggtttagacaattcccaattacctttataaagtggaaagacatggtgatgtggggactgtacaccatatcaatttgtcttgggtaacaatatttttatgttgcatattttactttcccaattgtacccaatcccaaagcacaatgatgagggctgagggaaggatctcagaatcctttcaaagatgtagcctagacctcaaatttgctatggaaaagctaccataccactcattcctaccaagttagtggcttaatgaaagatcggtgtaaccagtcagctctaggaagtcattagatgaaagatgaaggatcagggttcaagcctaaaggacactttcacagtatctaactgaacatgtttaccagtccaaaggttataatattattgctgtgagaaaaaaagaggtgaaaacatttataagaatatcacaagttattgggaaacccgttatacttcagtggattatgaactatccatgatactgaaatcttgatataagatgcacgcccagactttaaaagaactacagagcttccttctcagggctatcacaggctccatccattttaacaggcattttttgaaaagctctatgttaattaaaatgctttatttatatactaatttctcatcccatctttcaaatgtgaaaaggaattaaatatgaaatggctaatttaaactgtcaggattcttttttccaagtcaaccttacattaagagcaggaatcctgtgcttaagaaatggttcccaattatcctgtcttgggttttgttatacattgtacagaagtcaacaaaacaagtatgtaacagaacctgcctaaatagcagccgccctcattaaaaacagagaattaatcagggggtgattgaaggaagcaatgcctcatgttcccccccccttttcttcttttctaatcatagaacaaaatatgttacataaaaggatcggaactattatgcagtactcaattagagggaggtgaataggtctctaacatgctgttttatcaaaagagcagactggtgtttgcatgactgttgtttcattacagaccctgtcattaattccatgtgtcaatactgccctgtagtacacagagcagacaagaaagaagagcccttgaaaacaagggaatgatttttgagtcgttatcaagctaagtggcaagcgggaagctgaaactcgtataggtaaattcgaagggactcttgggagatctgcaagtgggaaacaagaatgcattttaccaactgcttaattatgtcctgtttttcaacaagtacacttgaattgaatgttttgtttgtattgcacaaaaacatgtgctgtgggcaagagtattctcttgctttcaggtcaagtaaagtgttttatacacatacacgtctgacctattctatattgtgcgattgggtatgttagtatctgaaccccaattttgcactgtcatttttgggggaaagagtcatataggaaccagaagccctaaaaagcagaaccttctctaaggtgctgagaagtcatataagcccaggcatcctagagtataccatacttacaggcaaacggtggctcaggaaaatgttaaaatatatctggaaaaaaaaaacagaccagaatattttaaatatggtgtaaattccgtatctcccatccctagctctttaagaaattatttttttggtttccattagcagtcccaagggttaggctgg

SEQ ID NO: 71255 - DNA, 1994 bp, Homo sapiens
acttctgctgaactgtcagaatgtctgatgatattaattcatcaggaaaataattacagttaaaataacatgagaatgattcctgacaaatggtctcccatttatgccacgtttactgagcacctgctgtgtgctgtgttctatactagatactggcaaatcacagcctgagaagacatggactctgccctcaagttgctcacagtctagtacagaacaagaaatctctggaaagcattatacagaatttcctgtggaatgttaatcctgtttctaaccctgtaaatcttcgtgatgaaagtgaatgtgtacccagagatttagcttttctcttcatggtttagtcattaggagtcccattagacaccataccttttctcttcaggaaaatgaaagataatatcaagtacaactaaatttaattcacaaacacttattgaggatctgctatctgcaaggcactgtgctagacacatagggatatgaaaattgagtaaagcatagacattctctttttaaaatatcagagcagtagtatttcatagctctcaaactttgtaatgacagttatttttaatatccttagaagttgggggtggggggtatgctcctgaaatagaaaacaagaatacctttgtactcaagtccagacttgtcagcctaggattcaaggtctccattcaaatcctcttttataccgcatctcttttgagttgtttttttttttttcctttatctcagccgagccagcctgcttgccagtccctgcacacaactaactcttgcttctgtgcctctgcttgactaattcttctgcttctgggatgcctttctccctgtgaatccatgtccatcactgccattacagtctggcccctgagtccacctactgcaaggagcctgtggtcagcatccctgtctcctcctgtgtccctctcacatgtgcatagccatacgactggtgaaggaatatttctgtggtgttcattaaagcttcccattctctgtccacatcttgctgatctagatacaacagattgcaaatgaaatagtcccagattataaatgagacagtccaatataaccaggtcatttaccaagccttttaggagtgagtctctgtaccaaatatttcattttgatatttgtgggccactagttgaaggatagaggaagaagatgagaaaagttaggatgggggtatgagaaataagcctggggtcaattagaacaaacagtcacacatctgtaaatgatcctctccttctactcccagacaggacaagaaatctcctttaaaccaacttcaaatacagtaagggtgtattgacaaattttaaagcttaaagaaagcagggctctctgcctgttaatcatctcaagcttgttgatctgctgttctgtaactctttcaatattgtttaatgtgtgtgtgttttctgaactgactaaaagcttcttgaggacagggaccatgtcttttatttgcctctgcatattcttcccccacttaatccctaactagcatgggaaaaccttctgtaagcacttaagggacaggaacgacaatttgtgggttctaactacattccagcctaatgttatactatacactttgtatgtatagtagccttttgccctcatcacaacttagtgtgaggtatgtgttcctgtcctaattctacagagaaggaaattggaattcagtgagttcatgttcttacagctagtgactggtcgatccagaattagagcacaggtccgtctgactccaaaacctatatgtgcttttcactataccacaataacaacgaatatttgttctgtacaattcacaactctttggtctaccttattattattattattattactaccactacttacatcttcactagtcagtaggtacagccaagattatcacgacccccatttcactggtagggaaactgagactcggaagcttgcccaagatcacacagctggtaagtgga

SEQ ID NO: 71256 - DNA, 5001 bp, Homo sapiens
agtattcaggagcctcaatttagcctgtcagacgttcacatttcccaagcaaagctttcaaacacttcgaagttgtctactgagctagccagagctcttcattaggctcctgttggcttatccattgaccactgagctgttctcactcctccccaggagatttcactgtgtctgtaacaccattacactactgtgtggctgccccttcccaggagggagcccttctttctgttggcctaagggacaactgtgaggagggagtcatttcccctccatccaaatcccaccaacattatagctgctgccatgtgggtttttgcttatggacatgtttttggggggtgatgcccatttctgtgataaataagttttaagcagttcatggggctcttcaaggccactcttaagtacactgctgacctttctagggatgggaggactggagttagcaactcaacaggtacattcaccataatctccatgtaataaataagagcctatgaaaagattaaataaatctttcctaatgctttttgactggcttaatcaataattaatcatctttagatgaggctgtaacttgtggagtagatataattggattagctgaaaagcggcagttgcggagctttgaagagattaaaatggctgtcaatcccataattaaactgccacaaacaaaagcaatggtgttttttagaaaggaggaggaggaggaaagaaagagtgaaagagagagagagaaggaaagaaaagtcggggagagagttggggaaggccaactaatttgaaatgaatcaacatgtacttacatatcactagagactgaggcaaaatcaaaaccgacagatttattccattgaatgaagtgtatgcatatcaaatcagccatttaattgtatgctccaaccactggggcaggtgaaattttggcagcttcaacttgtctaaaacaaaaccaatccaccaaaaaaaaaaaaaaaggttaattattcaaaacagaagagacctgctccttgtcctgagcccatttagaccttgacttttcatacttttaattggcttagtaggtttggcctgtgtgaatgaagtcttttatctccctcttccctctttttctttccatgcccctttcatctttcctattacaaacacacagagaaagctcaagggaaaatactttggtttttaaagacttttctttttaaaaggttgtggatttgggtgggggggaggggtgtgtgtgtgatgctggtgaatacttttttttctctctcttttatctctttttctagagaggagttgcttaaaccaatgggactaaaacctgatgggacaataacgcctttggaggaagcactcaaccagtactctgtcatcgaagagaccagctctgacacagactaaaagcatcacctgctcaactctcaatattgctttatcagcatcttttctctgtagctccaggggaatcttttctctaaaacatttatgcccttgctttggctagaaacacattaactggtttactcattgagaatccagcatatttaagaggtgaccctgtgttttttgtgatattgaggcattcatacagagctgcagttagacggggttacgggggctaaaagcagaaaaaaaattccatttcatcgggatggaactgaaggattttattctataaagcggccctggttgaatctggcaattctttttgccaagatccctagcagaagatttagccatgtccttcccctcacttgtgtgagtggccccttctgaatctctccagcagccagaggcacgtgagaagcagaaagagctggtaaataaagccttgggcaagcgacttcttagatcagaactcaccaaatggaagcctagcagctgctccataaacctagccccattcttcatatcaattttgtataaatatatagaaacacacacacagcctcagacttacaaactgattatactctaaaagtttgtatgtcagttagctaaaacttcagaatacatttctccctataaagagttataaatgatggtttagttctcaggcagctacaaatgcctatttattccctaatgtacctgaacactagtaccatagaactgaaccaccatctgtatcagcgcatggggagtgtgcattctgaggtctaacccggggtgccaggaacacacacatcctccatcccagcatagagaatggggactccctgagtaatgggagttctttcatggcctctgcttggggtgggggagtcagcagcacccatttgtacatataggtcattcatacatcacattttaaattggggactgtgtgtgctggtgtgtgtgtgagttctacgtttctaccatatgtgatcagtttaatagtaactttatttatttaaaaaaaagaaacacaattagttactgttaaactgataaagggtgtttatttttacttttagaattggtcctatgaagaagtagaaagtgagtcatgcactagacagtgggcctagctcatcagtggctaaagttgaaaaggggttggtttcctgtatatatatgtatgtatatacacacgtacatacattcatatatatacatatatacataatgtgcttaaccactgccttttaaaactttaaattaaataaaacattggggttgattcaatttggccatctgtgtgtgtttctttatagatacatgggctaaacaatactatttcacagtttatgcttttttaaagtgcttttacatccatggtcccacttctaatagcctttttaaggacaggtagagtacatggagggttactgaaaaggtcatttatccagaagttacctctctggcaaagcaaaaaaatcaggaattacgtcttaaaggcctttcagctgccagaggagatgtcacaaagtttcttgcaacttacttatgggagagatcttcaagaatatcactcttagactctgaactgaaatttgcatacgcttccaacatgttttattagctggctttgaagctcacaaaagaatggcaaagaaagaggctgctagattgaaggcaggcatactgaaagaagaaaaaggccaactgaaaactagatagtgagatgagaagaataaaacttcaagacatagcaaatctgggactgtctacttaccaaaggatactctagttgacccagaaaatgtgtgtacaacagtatggcccgtagactacttcctataatggtgaccctgagtttttttaaaagaagaaattaaatccagaacgctttataaaagggtaggaagaagacaatagatgttagaatttcatccaaaatgtttgagggagaggtgagtgacccaggttttaaccaacagcaaaagaaatgggcaattcataattttagattaagtgaaaagtttagaaaaaatttaagtatttttgttattctacaaatgcatttttaaagtatttttataatttctataatcaaatagctttggcatgcatgtcagcttacctaaatgaagatgtgtttaatgaaatgccatcttaccagctttctttatgcagagtaagtgtttgaacagtcctgtttcagtagctgtgctcttctgctttcagtgagttctgtttcattttgcatttctctgcactgggcactaagctttgtttttgaaaagagagtttgcggggaagaagatgagagtgtcttcatctggcacacagaaagagaactaatatctgttaagtgcttactacatgctgggcttttgatgtatgttatctcatgtaacctcaccttatcgcatatgaaagatcctctccagaaagcttatgaaagttaccccacgtcacagcaaggaagagtccaactctggtggcctgactcccagcaccactccttccttttccccacagcacacctgggcccacactgtgcctccttagggctctgaaatgctgggaacagagtggtgtgaggagggtggtcattctcaggccattttaagcaataactatttcaacagaactagtttaaagaggtttttaagcagggaagtgacctgaagtggaagtatgagtgggaaacttgcatggtcagcactggatttccaatgaagacctggaatccgttaggataggccagggaccaaggctgcaggctggcctctctgcccacaactctcctgaccttggaagcagggtacggaggcgtgtgtcctaaaataaagcatttgagctgctgctacagaggaacaatcaccagatattgtgaccctttcagatgcccagtagtcctgggaggcaggcagggcaggtgttattatcccttctttataaatgaggacacagaatgaggcagtacaagtgactctaaacacccccttagtgccacatcagtctcgccacctcccaggactaggtgtcacctgtattgacctcttcccctctgattataaaagtaatatatgttcattgtggaaagtttggaaaatgcagaaaataaaattaataatttaccccaaatcccaccatcctgagatcatcactgttaatgttttagtgtatttccttcctgtattttttctatgcatatataatttattttactacaagattgggatcatgctgtatttacagatttgtatcctgctttctttaacatattgtgagcattttcccatgtcaataaatattcttcaaaaagtaatggctatatgatattccattatgtgaattgtggcagacactgctagtttccttcccaatattctttctaacagaagacatcatgaccaccacgcccataaaaaaaaaaaaaaatttaaaaaggtggtgcctgctgcctttctagaaggcagcatgagttgttagtgctgaagagcagcaggaactaggggtggcaccaggaggagcaggcttgctctgccacacagcaacagtctcacagaagcctcggcagcacaagtcagaacagctagagtaagtgccccgataactata

SEQ ID NO: 71257 - DNA, 1100 bp, Homo sapiens
gcttgttgagtaacacacgtggaccacatagcaacagctcccaacactatgcaaaagtgttagatgcaaagtactaactaccctagactgtgctattccagattggaagcagaatttgcaaattactgggcagtgcggaggaggagggcaggaagctggcagtggagaccggatcccccatgctgaccctaaaggccagtgatggttgagaaaaataactcctgaaagtgccgcttgctctgcctaaaaccgactgcctgttatttcatggccacaaatcctcaaagaactggccccaaagattaaggggattccgccactttgctctttacttttggttcaaatatctcaagacaattcctttggggttggtgtcacacagaccacctagagggaccttctaattgtatttacagtaatttaattatggcagggagagcttcagaaggcaggatttaccaagattgatactatgggtgccactggcagagttttgatctgttaaatcaacagagaaatggtaaaaaaaaaaaaataataataataataataataataaaataaaataaagccactccagagtttggaaaactactttatagactttttcttctttttttttagtggaggctgggaaggtgaaggagacattttcctggggccacggctttcacgcttttgttcatattattttgtatttcatatatgcattatatccatctgatctcacacacacacacacacacacagagtttagatattatgaatgcaccatagccaagtgtgtgtatgcgtatgcagttgtgtgtgtgtacttaattaaatatatctctgaatagttattcaaaaacttggtagcaagttcctcctccggggaggagatctaaggtggggtgggagagagatttacttttaacctcattttccattcttttgtttgcttttttctttttgttttccaaaacaattttatacaaaaacatttaaaatagtttttgagtgtatccataaagaaacttttcatgcaaatattaaatcataaaagtcagcaacctgtatataattcagccaattgtaggttgtttggctaactagttacc

SEQ ID NO: 71258 - DNA, 1012 bp, Homo sapiens
tttaaaggttgtttgtgaaattagttttccctttttagaatctcaggagtagtggggtaaagacatttcctgctgtcagtggataagacagagcttgttaactgttttggcagtagttaaaatcaaattgtacacttctcagcctgggttcatgcttcatcattaatacacctcacagtgcctaaggaacatttacttactggtcagaaggtattttggaagagtttcatattaaggaggaacaaataataattttaagttcttaaaaattacctaaaacaccccaaatataaaaagaagccttcacacctattctgtctttaggatgtcttaaattattagcagtactccttttttaaaaacactgtaaaagtaaccacaaatatgtgaggacttactattttaaatggaatggaatgagctccatagattagttttgaatataaagtatataaaagtgcatcagtggtttatataggctttaaaaacatgttatcttacagtcctttaaagcagccatagagtttgtatcatttttcaagccaatttcagtcagggatttgaattgtttgattatggatgataaatgtgtcatatcttattaatatgtctcatgtctcgttccttcttaatatgatttagctggaattcattttcttttcgtttcatgtttaatttcataaaacgtttaacaattggcatatatacttggcattcctgtccaccaaggattgtaatccaagcctgggaaaatcttaaatttctttttacttaaatctggaaatttgtctccattctgccacctttttttttttttttttttatagtggaggggaggaaaggggggtgataccttgcagtaagtaagtcgaaatagcatgcctgaaaatttgaaacagaccattctaacacccaaggcttgtttataaaatacttgagaattacattaatgtggaatcaacagatgcagaagaatataacataacttttaaaagctttcataaataccagc

SEQ ID NO: 71259 - DNA, 1168 bp, Homo sapiens
tggaagagattgttgcttcattgctagtttgtatttctaacttctacagttatagactccactgtgctttgtgtctgaatttctcagtatagacattttgtttactgtatgcttgcatatttattttcaactttgtttgtctttaaaattgcttgaggaaaaatggttgtaattaatttctgctacagaaaagccacctggtacgttttgtctcatcaggattgttttaaattctaaactataagtttgttcagaggggcttttgcaatgatagcagaaaactgtacaaatgtacagttagttatagaggttcttgttgaaatgaacttaccatctgatgatatgtatgtacagctgtgtacttgagtcttttttagtttacttagaaagactagcagtttgacctgttaaacaggactagttcaagtcaagaaactaaggttgttgtatacacctggaggcatctgttattcagcttatcctttgagtgggtatttggcacaatgaggataaacttatgtgacccacttgaatggctgatctaataatgttgacattatgcattctgtacttagtgaaatgtcagatgaaaataactgatgaataatttttttgtattaaagggatgggaaaagaacacatgaatttgttaataaagcactatgatctgcaaacgatggaatgtttcataaagatctaaagaaataaaggaaactttaaaacagggtgatcttaccatttttagttactttgcagttcagaaagtgctgtagccagtttaaaattttttttatagtaatgtacaaacatatctttggatatgtattttgatgctgacacaaccatgaaatacaaatatattttaagcaactctaataataaagattaagagtgtagatttctaggttttaccccaacttgccaaatctctgcaaggtggggcccaggactgcattttaacaacctctctgggtaattcttgagtacaacaagagtactttcaaacaaagtttgaaaactgatggattataaagcagggagcacttctgtctgttccaagtagctgtggaaccaactgagacatctcactggaaagaaatgactgactaaaaggggtggggaggagtgtagaaaattgatatttactgggcatctgcttacctgccag

SEQ ID NO: 71260 - DNA, 2187 bp, Homo sapiens
tgtatttacaaagtataagatatcgaagttgtggagaagtgtattacaattcaattaattatttaggaggttttttttttttaagagtttcactcttgttgccccgtctggagtgcaatgctacaatctcagctcactgcaacctcgggcttctgggttcaagcaatccttatttaggaagatttttaaaaatattccacatgagcagttttcttgtctaatttaaatccactttatttccagacttcaacagctcaaatttgtaagtgtatgtgttctgaaagtcaacacccttatactaaaaacctttattttctttttttcagatagaatgagtccatttaagtcccaggacggtggaaactagctagtagattgcagccatgttgtggaagctgctgctgagatcccagtcctgcaggctgtgttctttcagaaagatgcgatcacctccaaaatacagacctttcttagcatgcttcacctatacaactgataaacagtcgagcaaagaaaatacaagaacagtggaaaagctctataaatgttcagttgacattaggaaaattcgtagattaaaaggatgggtacttttagaggatgaaacctatgttgaagaaattgcgaatattttacaagaactaggtgccgatgagactgctgtagccagtattttggaacgctgcccggaagcaattgtctgtagtccaaccgctgttaacacccagagaaaactctggcagttggtctgcaaaaatgaggaagagttaatcaagttaatagagcagtttccagaatctttctttactattaaagaccaagagaaccagaagctgaatgttcagttctttcaagagttgggactaaaaaatgtggtcattagcagacttttgacagctgcacctaatgtttttcataatcctgttgagaagaataagcaaatggtaagaattctccaagagagttatctagatgtaggtggctctgaggccaacatgaaagtttggctactaaaattgttaagccaaaacccatttattttgttaaattctcccacagctataaaggaaacactagaatttctccaggagcaaggtttcaccagctttgaaattctccagcttctatccaaactcaaaggatttctttttcaactttgcccaagaagtatacagaatagtatttccttctctaaaaatgcttttaaatgcacagatcatgacctgaagcaattagttttgaaatgtcctgcccttttatattattctgttccagttttagaagagagaatgcaaggattattgagagaaggaatttccatagctcagataagagagacgccaatggttcttgaattaacaccacagatagtacagtacaggataaggaaactgaattcctcaggctacagaataaaggatggacatctagcaaatctaaatggatcaaaaaaagagtttgaagctaattttggcaaaattcaggccaaaaaagtaaggccattatttaaccctgtggcaccattaaatgttgaagaatgacatactgactgttgttgcttctttctagcagtgcagggtgaaactaactagcaaagacaaaaattcaggcagtttgtagacaccagtaattttaagaacctgcttagcttctgtgttgtatttaagttatctctaaatagataaattctgactcatgtgccatattataaaatataaatcatatttattttaataaggttggtaacttttaccttgaaccattatttcaaaaactcatatactattaaatggcatatcagtgtgatactttataagtgaatcacttctaagaaatggacaagtgcttccttaattcaaggtatggatacatttatattcatacaccacatttcatgttaggaagcaaatccagtctttctcactactagccatgaaacatcactctactgtggtctgaattctgtagcttagtgttatgtgaactattagcaaacttctataccttttttttttttttttggagaaaatttcatcttgtgtttggaataaattactgtctttgagaatcaagtattactcatccaaaaagaagagttggagcctacttgtgtggtcagtttgcttagaattgaccattattataactcttataaaacaccatgtgcattcattactttcctcattt

SEQ ID NO: 71261 - DNA, 1050 bp, Homo sapiens
aaattctagtgtttcctttatagctgtgggagaatttaacaaaataaatgggttttggcttaacaattttagtagccaaactttcatgttggcctcagagccacctacatctagataactctcttggagaattcttaccatttgcttattcttctcaacaggattatgaaaaacattaggtgcagctgtcaaaagtctgctaatgaccacattttttagtcccaactcttgaaagaactgaacattcagcttctggttctcttggtctttaatagtaaagaaagattctggaaactgctctattaacttgattaactcttcctcatttttgcagaccaactgccagagttttctctgggtgttaacagcggttggactacagacaattgcttccgggcagcgttccaaaatactggctacagcagtctcatcggcacctagttcttgtaaaatattcgcaatttcttcaacataggtttcatcctctaaaagtacccatccttttaatctacgaattttcctaatgtcaactgaacatttatagagcttttccactgttcttgtattttctttgctcgactgtttatcagttgtataggtgaagcatgctaagaaaggtctgtattttggaggtgatcgcatctttctgaaagaacacagcctgcaggactgggatctcagcagcagcttccacaacatggctgcaatctactagctagtttccaccgtcctgggacttaaatggactcattctatctgaaaaaaagaaaataaaggtttttagtataagggtgttgactttcagaacacatacacttacaaatttgagctgttgaagtctggaaataaagtggatttaaattagacaagaaaactgctcatgtggaatatttttaaaaatcttcctaaataaggattgcttgaacccagaagcccgaggttgcagtgagctgagattgtagcattgcactccagacggggcaacaagagtgaaactcttaaaaaaaaaaaacctcctaaataattaattgaattgtaatacacttctcc

SEQ ID NO: 71262 - DNA, 1029 bp, Homo sapiens
tttaagacattttactcattcagcaaatacttcttcaattcttattgccaaaaactgtactgacaacttgggaaaattatattgagagaaccagggttttgaatgaactgtacaaagtccttatgtttttcatatttgcttaaaataaataagtaaatttgagatataaaagtctatcagtatttttaatgcatctcttacatactagaaatttcaggatcttctcacaattcaaatgtgtttgtaattttcttgtacataatatgcataattgtaagttcttttccccttttcttcattcaaggttttttttctgattatatggtcctagaaatgcactgtttaaatatttgggctggaaaaaactttgagtagcatttatttaatacagttggcatagctgatttgtcagtttcaagttttgattacaatgcacggggtcatatgtattgtaattccttgcacaattacgtggagccctaatacaagcttccagcaccctggtgcacatttctgctccctccctcctgaccagtgatggcagcttgcagttctaagtcctgagtttacattccttaacttccttttctgtatcctaatttccttttcctaagtgcaaatgacacactttggttagtctggaccccaaatcattttatttcaggaaaaagtgtgcaataaatctatgcataatagagtttttatattcggataactcaggagttgctggacaaacaccccccagctgtacacatgagttgctcagatcattctagaatatcctagagatcagaggtgggtgatcttgaggagccaggattcttgctgctactcagtggagttaaatgcacgtgtgagctcctctcaatatagcctgttgagcctaaactgcatagtgagactagactcaaagatttagttaacatttcctgagttcctactgtgtgcccagcattgttgacagaaaaaataatcagtagcctcaaggaattcactccacagggtgcgagggcagtctgtatgccagtg

SEQ ID NO: 71263 - DNA, 1039 bp, Homo sapiens
ctgtaatatgtttactactgtagcaatatgttttagtttttatttaacttttaggtttttttattgtaaaatatcagttcatcggcattattagtcattagggaaatgcaaattaaaacaactatgggatagtacttcatactcacttagggtgagcaactgccactgattgcctgggattgaagttaattaaaacgaaagtaagtgcacagtcttgttcaggccataaggtgttgacctatccacctgctcgtggataggtccagaatgctcatatttttccataaactggacacactgacagaaatgtttccctaaaacatacttctctgttctagccaacctattctcctataatagtgtttgtttttagaagggttgataggattgcttaggctaggtaactgccacatagtctgtgtcttctgcttgtcgtatgatttgaattgtttaactcatcgggcaggcccttattcccttatcctcaaggaaatatgtttggaggagctctgaaggaaaagcgtgggaaaagggacaagagtgagggaggaatgtctatctcactcttgcccctatgttttaccttcatggtcaagtttcaaattgtcatctagtaaggaaatgttttttagaaaatgatcatcaatgatttttcctttgagctgtcaacacttctgtgagcctaaatttaagttttcctggtttgagcatgtgatttttggttcataggaagattgagatttagtcttaaaagcatataaatgaccttaagtacaagcgctaaaagttggatttgtagacttaataatacatacatcttggatttgattttaagtaattttactgtgttttaaatactaacaggttgctctcaagggagtggtattttacactatgctcatggcgacagtcagcaaactcacctgttgaagcaaggtaagaatgaagcattggagcatactgttctttttccttttcctatcttaaacatacattttttaaatgtgcaggaagaagctccatgggcactggtctcagt

SEQ ID NO: 71264 - DNA, 1012 bp, Homo sapiens
ttacttctgaaggtatttgaagaattattgcttgatgcagattggagcataaatgctggaagttggatgtggctgtcttgtagttccttttttcaacagttttttcactgctattgccctgttggttttggtaggagaacagatcccaatggagactatatcaggtaaatcaagggtgattactactcagtttggaatagttaattcaagaagagcttttcatgtttaatcaatgcttaaagtattccccactcatgatgggcagcagagatgagaagggtaaacagatcatttaaatggtcttgatttgattttggtctgtcatagctagtagttatagtttgcttagagtgcattttattagtaatctttcttttttctcccaaaggcgttatttgcctgtcctaagaggcttccctgcaaaatatatctatgatccctggaatgcaccagaaggtatccaaaaggtagccaaatgtttgataggagttaattatcctaaaccaatggtgaaccatgctgaggcaagccgtttgaatatcgaaaggatgaaacagatctatcagcagctttcacgatatagaggactaggtatgttaagaactgtctttgtttctttggcagctgtttatgtacttatctttgaattttatcttgatcataatttaaaagaaaatttttttgtcctttaggtcttctggcatcagtaccttctaatcctaatgggaatggaggcttcatgggatattctgcagaaaatatcccaggttgtagcagcagtggaagtaagtgaaaaggaaatttctgcacttagtaacatgaagaggttattaaacaaatatatttgttattgatcctcactaacatattttataaaaatctgtctttgaaattagcttaatagattctttgtatgcatgcatacatgtgcacccagacacatctcttcactccattgatgacattttagagatggaaaatatcattacgtataatagatactgggtcaagt

SEQ ID NO: 71265 - DNA, 1039 bp, Homo sapiens
gaggcaagagaatcctccacccgggagctggaggttgcagtgagccgagattgagccactgcactccagcctgggtgacagagcgagaccctgtctcaggaaaaaaaaaaaagagagagagattgaaggtgctctcagctttctgttggaaatttgaaggaaatttatttcacatgagtatgtgctgcacaaggacgactgaaacaaaagaatgctcacttttttatcctgtcttattttttattaaaacatgtaatttgtggctaggataagattttattccccaagaactatgtaactttaaaaaaaaaaatctccattctgagtgttcttttaaaatgaaaaagacaattagttaatataattttctctgtgtgttttcaggcttgggtggcaaattttgaaagacctcgaatgaatgcgaattctctgcttgcaagccctactggacttagtccttatctccgatttggttgtttgtcatgtcgactgttttacttcaaactaacagatctctacaaaaaggtattctctaaaattagagcttattgtttaatactttaaaaaaaaattctgataatacttctttgctttttaaccataggtaaagaagaacagttcccctcccctttccctttatgggcaactgttatggcgtgaatttttctatacagcagcaacaaataatccacgctttgataaaatggaaggaaaccctatctgtgttcagattccttgggataaaaatcctgaggctttagccaaatgggcggaaggccggacaggctttccatggattgatgccatcatgacacagcttcgtcaggagggttggattcatcatctagccaggcatgcagttgcttgcttcctgacacgaggggacctgtggattagttgggaagaaggaatgaaggtaagtgttctaactgatatagcatgccttattttgaaggaatccttaccttaataaaacaaatcctagaagttgtctgtttatagattcatttatggtgtagtttttcagtggataaaacat

SEQ ID NO: 71266 - DNA, 1036 bp, Homo sapiens
tcaacagttacacaagacacccctactaggtcatttgatcctgtttctaatcttttcaacaaattatacaaggcacataatgagatttgtttgccaaatatagaaaccaaaatatagattaagaaaactgtagttagggccaggcctgatggctcatgcctgtaatcccagcacttggggaggctgaggcaggtggatcacctgaggtcaggagttcaagaccagcctggccaacatggtgaaaccctatctctactaaaaatacaaaaataattagccagggtggtagcacactcctgtaatcccagctgcttgggaggctgaggcgcaagaattgcctgaacctgggaggtggaggctgcagtgagctgagatcgtgccactgcactccagcctggatgacagaacaagactgtgtctcagaaagagagagatggggagaactgacttaatttgaaatccattaggaggaggttttattttatatatatatgtaatatatatatatatattttatatatatatgtaatatatatgtaattatatataatatatatattttatatatatgttatatatataatatgtataatatgaggtaaaattttttcatcctctgaaggacataatgtacctcagaggttcagaagatgtagaagtgactttaagatggaagatttaaggttagtgtgatatgaacttaaagggataggaattgggaaaggtattccaagccaaggaaaggccctggagcacattccaggagattgaatgtgtgctgaaagagaagtttggtttggtgtgagagaaaggggtatgaggtaggaaatcaacctagaaccctaggttagtagccaagcaaaatgatttgttgtgtattgtatagggaatgagtcgttgaaaacctttgtatgggaaggtgtgcctcatgaagatctggaattgcatataaaatgaattagaatggagagagattgttagtaggcagatctattttaaggcattgcagtaaatacaagcaagagataatatgaac

SEQ ID NO: 71267 - DNA, 1183 bp, Homo sapiens
ttggactatttcatagacagaactagaaattctagttatataaagctgttctagcacagactggtaagtaggtcattgtgacggagtatactaaaccgtccactggttgctatagcaatgacctactttaggaaaatatttctgttgattcatgttgaagtcatcttttggaagtggtataaggaagcttactgcatataatttttaaaataacagcaatagatagtgatctctggaggaaaaaaatccttaaaatgtttaaagtgaagaaatatatattttgtcacctaatgcctcttcaatttaaagtggtgtgttcagtattgtaattaaataatatgaggactgtgcttctatgtaggcagtacaattatatgaagggatatagtgagttttactatcatttggcctatttaaaaagcaacctgttgtatgtagttaatagcagtaataacggagccatcaaatgggtgtagttcaagaaaataatatatatgccaaattggagaaggtctgaaagtatgttcctgttaagatgatatcatatgtattttcagtggaatatattaaaaataaatcattcatttcattcaatattgagtgtcccagagcacatgcatttctattacattaaagttgaacttggtgtgttctttggaacacactgaatctgaactctaacagatctaatcctttcccagttaagggtaaaggattgagcattagattttgtatagttttgaagtaacattattcgttcagcattaaagagaaatcacacacatcactgagttgatactttgaacctgggctgttagaggtattatcaaggaaaaattatatgcttagagattagttgagtcttaattgcgttgtaccttgttttataatatttatagtcacattgaccttgctactgggaaaggtttccttcaaatcatagttcaaagtcacattcagatgaagttgtgaattcaaagtaattctgtatacaggtgtaggcatccaactaattcacgttttcttttgtcatgcccaagtatttacatatagaaatgcatggggtgttttctttaaaaaaaaaaaaaaaaaaaaacaggaattattctcaagggaaaataacaacttctgtttgatacatatctaccatgtgctagagactctactaggtgattttatgagg

SEQ ID NO: 71268 - DNA, 1028 bp, Homo sapiens
agggaaatgtattctggatggaaagaacatcctgtgcaaaggtactgaagtaggagcatttctggcatgctcacaggatcccaaggaggacatgtggctggaacagagtgagtgagaaggagagtagtaagaaagatggagtcatagtggtattggttgcccgggttcgttctgtaggacctagaaagccattttaaggacttaaaaaaaaaaaaaaaccaccaactttaaatggactgggaagtcattgcagttggagactttgttcatagagatgacatgaccacttggcatctgggtgaagactggactggatggcagtaaggacaagtatggaagcagtgagatcagatagaaggccagtggaatcatctaggtcagaaatgatgaagaattgaacctgagctgtagaggtaaaggcagtcagaagtaatcagattctggatgtattttgaacatagagctgttaagatttgccatagttttagatgtggactatgaaagaaagagaggtcaaggatgatgtggtagtgttcaccaatatccaattcaccattcgtacctgggctatgcaacatttcaattctcagctctctttgcagtctggcgaggccgtgtgactctttctggccaatgaattgtgtgaggaagtacttggtgaaggcaatgtaaagccctgtatgtttcccagttcttcccctactgtggaggaggccttgtgttgaaattatagaaccacaaggtcataatagctgggacggtaaagtcaccattagaagataactagctggagctgcagtgaactcagcatgagcaagatgaaaacttttgttttgtcaagccactgatttgggaggttgtttgttactgcagcataaccctgttctattctgaccaaccaggtgagtctttgccctgattaacttgaaggatggaattaaatgagattggaagactgtgggaggagatggtctgaggcaatcttcaaagggagatgtttaataaatggaaggatatgaataaatcct

SEQ ID NO: 71269 - DNA, 1032 bp, Homo sapiens
ttgtggtctttttatgtgcttccactgttgatgatttttgtcttctgttttaactttattgaagactgccaaactgttttccaaagtagctataccattttgcattctcactgactatatatgagaccagctgctcctcatccttgtcaacatttggttttgtcaggtttgttctttcccattctaataagtatgtggcggcatctcattgtggttttaatttgcattttgttgttgtctgttttaatgtacttattttccatctatatatctttggtgaagtgtgttactctaatcttttgctaattttttattgggttgattattttcttattactgagttttgagagttctttatgtattctggatattgtctctctttgcctagtttatttcacttagcatagtgtctctacatgcattcacatcacaaatgacagaattttctgctttttaaaggtcgaatagtattccatcccggtcgtaatagaatatttctataattacagaaagttctctcataaccctttttgagtcaatccattcagggaacttaaaaaaaaataagtatactctcagtttctaccccagatctatcaaagaagtaatatccagggtggcgcttaggagatttattttgcaaacccctgtccccccaaccccagtatgaatataatgagccctgattaagaactatgacccagctggacgcagtggctcatgccttaatcccagcactttgggaggctgaggcgggtggatcacatgaggtcagggattcgagaccagcctggccaacatggcaaaaccctgtatctactaaaagtacaaaaattagctgggcgtggtggtgcatgcctgtaatcccagctactctggaggctgaggcaggagaatcacttgaatccaggaggcggaggttgcagtgagccgagatcgcaccactgcactccagcctgggcaacaagagcaagactctgtctcaaaaaacaaacaaaaaaacaaaaactatgacccagctgggttatatat

SEQ ID NO: 71270 - DNA, 1871 bp, Homo sapiens
cagggcgccgacaccatccgctgcgtctacatcctggacccctggttcgccggctcctccaatgtgggcatcaacaggtggcggtgagtcacaagcccgtgggaaatggatttgggtgtttaatgagtctgatgttaatgaattccatgcgatccgccaaatctgtgaatttagacgtgggactgtcttgcttataccgcttacgaattttaggtgccctaagtattaaatagaattgacttaatacttctctggccaaagagtactgacgacctgaaacactcggtcttcatcagtgagttatgtgtctttctgtgctaactggagctcctcccctgaatttgtggagaattcttagtgctggagttaaagaaacacctttcctgtccttagtggccattgtatatggattcccttggcctttttgtggcattcggaaggattgtgatgtttcctgtttacgtttgtgtctaggtaactcatagtatggagaaaaatcattcattcagtacagcaggctccagatccagtgttcttccaccttgaggttactgtgggaaaagcaagggaaacagcattatctggtttctctgctcggttctttttctcaactcctccttgtggttgccgagacaaagcacagtttttctttctaggcaagttgtagtccttctagggatcagagcactgaaagaaatcttagagatgctttatgatcttttcctgaaacaccaggctacatgattgttaggccccctggtggaaataaaagcatagctcaacagatagactcttgatcacttagcatgtgccaggcactgatttaaatgctagggatatagcagtgagtgaaagacagaaagtcatgtcttcaagcagaaagtaaaatatgtagtattttaggtggtgataagtattgtggaaaaaaatagagcagagtaaagggataaagaatacaagggtagggatggggttgcaattttaagtatgatcgggggaaaagtcacagagaaggtgacacttgagcagacctgaaggaggtggtgggatgcagatatctaagggaagaccattccaggcaaagggaagagtaagggaaaaggcagaaatatgcttgacctttggaaggaacagcagaagaatccagtatgtctggagcagaataagtgagggaaaaatagtagacgatgaggtcagagttgacttagggccagattgaagagagccttataagcagttttcaagatttgggtttttacttagtgaaatgggaataactgcaggattatgagcagagaagtaatgtgatctgacataagtttggaaaagaatttttctgcttgtggttctgaattggggagtggaggtggacaagaagcaggaagtccaattaagaagctgttggcattcatccaggtgagagatgataacggcttgaatcatagtaataatcgtggacgtggtgagaaataaacagatgctggttatattctgaaggcaaaatacagggtatttgttggcagattggatatgtagtgagagagaaagaaaaggagttaggctgggcgcggtggctcatccctgtaatcccagcactttgggaggctgaggccaggagttcgagaccagcctggccatcgtggcaaaaccctgtctctattaatactgaaaatataaaaattaggtgagcatggtggcgcatgcctgttatctcagccactcaggaggctgaggcacgagaatcgcatgaacctaggagacggaggttgcagtgagctgagatcgtgccactgcactccagcctgagtgacagagtactctgtcgcaagaaaaaaaaaaaaggacttatagtttggtgctatataaaaagc

SEQ ID NO: 71271 - DNA, 2605 bp, Homo sapiens
tgaaaccctacctccaccaaaaagcacagaggggcttaatttccttcctggtggctcccatgacaatcatcttttactctttgctgcccctgactcccagctccttacccaccttctgggcctggaacctcttcttttttctccctcagtatttcctttggaaggctctagtgtggaaatctggtcaccctgccctacttctgcctttgccattatcctgaagttgtgagtttggacaagtcactttacatctttgggcctcagttgcctcatctgtaaaatagggggctagatatgtaatacacccccaggtcctcttgtagctctgtggtagttgcttctatattttttcaaataggttttacttttatgaaccttaacaacttttaaaaacagtttttgtgtttaccctttttggaggaagtataatttaaggaaggagaagaccacagagttggttttgggcagggtgagtgtgtgacggttggggtttgctgccatcacaacctctcccacaccacagcgcttaactcttgggtttcggggccccttcagcctcctctgggtatgagatatactatgatttcattgtgatctcttcatgccttttctttgggcttgtttaaaatggcaggttgaatatgcagaagagttaaagaatgagtgattaattccttaggtattggaatcatacattaaacatcaaacctatttcttaaactattttgtacggagtctttctgatctgcaagccttattaaggacaacataccttacataatagattttccctcctttaacttggtagcatcatttatttattcatttgtgaattcatttgtttatcgaaacttattacagttgccgaattctagggtctgagcaagtgctgggtaagaggtaataacagctaacatgtatccagcagggctctgtatattgacccatttgatccccagtacccattatatacaggaagaaactgaggcatagggaacttaagtatcttgcttatttaaatgcagatagcctggctccagagtccgtactcttaactcctgtctgtatgactctttagtgacagatgagttccctgccttcaggcatcccacctgccctttattacccacacaggtgaacagagacccttcctgtcatataattcctgaattatatactttttgttcctatcaaatggaactgggcagaactggatttttcatgtttttctatcccctgctaagcctaagagaggccctagtacacagttggagcttattagatacctttttgagttgagcaagctattgtactgtattatacaatgatgtcctgaaagaagctattgctttttgagtttcttgaatcatctttgcaagtttttctactttgttgttattgttgttctaaagaaggggtctcactatgttgcccaggctggccttgaactcctgagctcaagaaatcctcccacctcagccgagtagctgggactacaggcaggcactggctccaagttcttcttccttggttgccccttcttactgccatttctgtacctgtccacctttctaatttgctgctgctaaactgcccaggctaaggaattgtgaaactagtcacatgggactggattcagaaaaaaaagataattggctctaaagcaaaagaaggcttaggggctctcgaaaatcacatccatgggtttgctgtgggcatgaactttgtggttatgtaaaaacttttcagaactggagttttgtgttgattttcagctgttttgaagagccggggaaacagctaagggaccccattgatgtttctgtggagttttaaaaatttgacttgattgagctaaataaggagggggcagaagtacttcactgtgcctttgtatgtgctagtcattgtaccttaaactcctttagagctggccagttcctactcatccttgaagacttggcttcaagaatgagttggtcttcctggcttccttgtgagggcttccttgatgcaaccccttctccattcttattcatctctgtgtctccttccatatcactcagcacagtgcctggcactttgtataacagatactctctactgcttgttaaacgaatataaccagctcattcaattttaggcatttaaaatttgcctatcacctgtaaaggcagttgttaagagaatggcctctggtgttggacctctaggatttgaatttcaaggctgccattttctagctgtgtgttcttaggtatgcgacccaacctctctgtcctccagtttcctcagctgtaaaacagaggtaataattacaaggattaaatgagattatgtgtctaagcctattataatctggtgctgacacatggtaggtgctaaaatgatgatgatagttgtgataatccaggcacaatggtatctcatctctatcacatccagattaattcattcccacatgcttagggtggatggagccaacaaggcacagaattttaactggatcctcctttttattatagcaccaagtaactcagtacacccacctcaaggattgatgccatgggcacagccctgtggccagggtcacaaaaagattgtt

SEQ ID NO: 71272 - DNA, 1915 bp, Homo sapiens
cagtaggtagagggagacagtgagtgtggaggagcttaagaaaggtggtacaggctaagcctggagggacttaacgttgcttgtgttcacatatcattgaccagatgtatcattggctctctgaccaccaatacatgtgtgcctccttcttcctatgcacaaaacacattctcttttccctaagggaggaacccacattttttctgatccctgcttccaacttaaagttcagagtcatggatagtcctatccatgaagctgagtgtggcacctcaccatggtccagggacccatgaggcaaaacaaacatattatctgccactctgcattcatatcccacatctgagcagggtgggataaccatcatgaaactcccatttggaaaagataatcatggaaggtacatacacagcagtcactggtcctcagtagtgatgaaatcttgccaaacaagcattgtggggttgtatcctagcagtgggtgaagttcctggattaggtcctgattcttctcctgatgggaatttactagttcattgttctccaccctctcagctgtgctggtgggaggattttctttgttatttttcgtggccacacctgaagttggtcgtgggcagtatggccttcttgggggctctaaatcttttgtgacctagttctttcccttgaacctttgggggcccaaggattgttttaatgcagtaacagtaaaagactattaaaattaaggtttatagattttgcaatgcaattccctcaacaatttagtaagactttcatctatgatgtctaatatgccagtagccacacccagagttatttcctagacttaattctgaagcccggattattacttccttttccccacacctgtctttctctctaaatttaatggcagctaccttgaggtcatcaggcttaggtgggaagcttatattcttaatatgatacttatttcacttaaatgtcttcttactcttttgtcttattgtttggggtttagacatagttgtctgtttttacctctccactattcctttctaaaattactttcaaactggttaatttaggcctgagttcttctctttccctagtaccttacttaactcagccaggaacagttagcaaactttattaccattattttttccagtctctttctatagagcatacaggcttagtaggcatgagctctgactgccaagttatcatagatgacagtttaatgagacattttacttctgtatcacatgggtctccagttttccaggctctagtataacctgctacctgacttctaagccaatgtcacatgttttaagcagcccacttctggaactaagttctatattagttagggtaatgctagctgatgtgtcacatgaatcctaacgtcttagtggctgaacataatgaaagctgctttctcattcatgtagagtccacctgatggcaggggagagaggtgctctgtctgtggaagttgatgaaagctctgccatcttggacgcataactcccggagatgtctctgattgaggatgatagagaatgtggaggattataatacagtcctgggtgtgggtgtgtcaattccttccgcattccaatgaccagcactcagtcacatggcctccactagatgtaaggggactgaaaattatggtctctggtagggcagccacccacagccacaagtctacactatcagaggggcataagcatttaatagagctagccacctcaacaaccttacaaagcaggcgctattattatccccattttacagattaagaagttgaggaacagaaggtttaatgaatttgcttaaggtgacatggcttgcaagtggctggccagatttgaattaggcatttggcagactgccttatagaatacttgtgaggagcaaa

SEQ ID NO: 71273 - DNA, 1033 bp, Homo sapiens
gagaactcaatttaaaaacagaatttaagtctgagggacttcaaatttgaccttcctctcaccataccatgcctcattccaagggagtatctggtttaacgctcacattttacagatgtggaaactgaggcccagagtgggctactgtcttgtccaagatcacacagcagagctggaaccggtatcccaggtttctggatttttagagcccatctcccatccacagtgatgtattgtctcctctaaaccagatcactcgtgggaagcatagtgggatgaaagcctgcattgttgacagcagtttggagattaatttacgatcctgctgtaatatctccggttttgctatacatctcacagtaaaataaatgctagtctggaagcatgtggaggtccccattacatcgtggctgaaccactgaaagcaattactgtgaagatcaggtgtgctaaatgcagaatcaaattaacagttcccctgtgcattcatatctaaaagcaaatcagagaggaagctttgaggaggggtaagtgaaatcttaaagtacagtgcctgcctctgaggttgaggctgcatggattaactgattttctctgggtggtatgtgtcattgttccttcctaatcccagctcaggttaccacccagagagtcatgaggtgcacaagaagcacaccagacttaaattacctttctttctctggatgcttctgagcatttcaagtactgggaacgtggcacagcctttttctctctctgactcctccctcagcccctttcagccttctctatactgactttgaggtttaggggctgggctcaccctcgtgagcaaagccacaggtgcttcccgccctcatggagcttgcaggcttgaggcgggtttagtttactcacagatagtcacacagatgtcaaactgcacccatgacagttgctccgcgggagaggttcacggggacaggagtgtttgatggggacaaagcctccttagactgcggggtgaggtccagggcggtgcctgcaaggaggg

SEQ ID NO: 71274 - DNA, 1034 bp, Homo sapiens
ttttgtgtttttactctgctaaaagatttccactgaaagattgtcacaatcaaaatctttatgtattctgctcacagggcctctgttatggatcttaatcagtcatcatgttttccttaaaatgagttttctatgaaaggagaagtgggaggttattgattgtacatcgtatatcaaaggaagcttcagtgtgttttcatttgggttaagcaatgggaagtatttgttgctatagtagtgcccgagaaacagggagcttgtgtgtgtgcatgcacgtgtgtgtgtgtgtgtgtgtgtgtatgttgcatgtgcatgtgcctatatcaactcagcagaattatcagaaattggacgcctgccatagcttctgagtgtgggttgagttttgataactaatttgccaactgtcatgtaggcaattctaacatcttcatagactccagccttcttatctatggaggccccatcccatgtcacactcaaacacaaaccattacctttatattcctggctagaaaaaaatttgtaatgattttgcttttgtggaatggtttttgctgtgttgatatcatatttattttatgagggctctgatttatctgctattattttatatcctcaggaattcttccaaaatgagaaacatctaaccagactttttttttttgccccccaacgaaattgttgtgaatactgaagtcaacaattaattatgctgacttcacattaagcatgttagccatttacatagttattaatcatggctttgcagttttcttttcatgtgttggagttgataatttttgaagtgttggatattttcttgcgctcaagaaggcccaagaactgagttgcttagtggagaaaaaatggtcttgtgcttttgacataaagaaacccagctgagactggcctcagaaaggtaactctgagagtttcattctctgactgaggcatctcacacattctcaaatgcatacacactcacactgtgcagggctatgcagttgttaacaataaatagaatctagtac

SEQ ID NO: 71275 - DNA, 1025 bp, Homo sapiens
tttcctcctttgaacccccgtaggctttgcttgctgtctgtaatacagcttgggcaatgggtcatgtatgtccttttgctgttgaaagtgttttgctgtggctatgacctgcccctccattggactgtaagctcttctagggcagggtttgaatctttcagttcttttatttaaaaatttttatttttagagacaggatctcattctgtcacccaggctggagtgcaggggcacgatcatggctcactgcagcctcgaccccccaggcctaagggatctgcccatctcagcctcccaagtagctgggaccacaagtgcacaccaccacacctggctgtttttttggttttttatagaaatagggtctccctatgttgcccaggccagtctcgaactcctgggctcagcaatcctcctgtcttggcctcctaaagtgttgggattacagacatgagccaccatgtctgacctcttccagttcttttgtatctctttcctgctctctgctcaatgaagatgcctcttggtcaatactccctcagttagagcacaaatgcatgtattcacttatagagtgttctgattgctaaaggtggctggaggtgaatgtgccatatttgaccaataataactttgatttgaaagtattggccaatccgatgccacaatgtgtttgactgctagtgtcagagaccaaactaacagtggcttaaacaaggtagggagttggttttctcttttacaacagtccaaggcaggtaggcagtccaaagctgggatggttattatattagtccattttcacaccactataaagaaatgcctgagactgagacatatataaaggaaagaggtttaattgacttatagttctgcatggctcgggaggcctcaggaacttatagtcatggcagaagacgaaggggaagcaggcaccgtcttcacaggcagcaggaaggagagagaagtgtgagcgcaggaaaaagtgccacttttaaaaccatcagattttgtgagaattcact

SEQ ID NO: 71276 - DNA, 1153 bp, Homo sapiens
gggactgaattccccaaaggaaaacaaggaaacctagggagacaaaaaaaaatgcccattctgcaatgtatttttccccaaaatttgaactgactgtgggcaggtgttggcagtagggcttggtgggtggggaggtgggacaaagcctgggatcttaagaggaaacagtgggtagaaggaaatgaatgacgagctagagaagctacttggacgtaaggagatggctgctcttttcgttcaatagttactggattccaaaagttttacaagacattatctcaattaatcttcataatggtctcatgaggtatgaactcattttagccttgttgcaccagtgaggaagcagacccaggaaggtccatggatttgtccaaggtctctttgtcattaagtagcacaatcagggctcacacctggggctgttgagagtggcgtggagcggagcttgtgctcattcccatccagctgccctgcacactggaaggaatctggtagtgaaaacagcatgctcctgattagggattcttttgggggctgctgaaataggtagtcctcaagtccctgttgcttctgagtttgtgatgtgggggaagatggaaagtctagattgggatgggggctaaactgagaatactttctggaagcacccccattgaaggaagttagggggcatctaggaggagaagcatccagggccaggaaatggccccttgtgatggtccagagaaggcatcctctagctatagctcttcgttacaagaaataccatcacataacaggaagcccttcaaattgattctgctcttaattttttttttcagatagaggcttgctctgtgaccgaggctggagtgcagtggtgtgatcttggcttactgcaacctctgcctcccgggttcaagcaattcttctgcctcagcctcccaagtagctgggactacaggtgtgtggcaccacgcctggctaattttctgtatttttagtagagatgggttttcactgtgttagccaggatgatctcaatctcctgaccttgtgatctgcccgcctcagcctcccaaagtgctgggattacaggcgtgagccaccatgcccggtgagtctgctcttaattttttgtcaataaaaagtacaatttttactggagaca

SEQ ID NO: 71277 - DNA, 1073 bp, Homo sapiens
taattgtgtgcatcaggaacccaggaagggctcagctggcagttcatctgtgatgcatgtggctcccaagatggcttcttactcatacacttggtgccttgatgcgtttcgacccccctctttctacattgcgtcttgtcttctaaggtctctccacagggcctgggcttcttacagcatggaggtatcagggtaatggctgtttttacatgatggctggcttccaagagtcaggagttagaaactcccaagtcagttaagggctacgttcaaaactgacagtgtcactttcatcattggtcaaggcagtcacagggttgcctactttcaagagagtgggaagaatcccaccccttgatgggagagtcacaaggtcaccctgccaaaaagcatgtgcaaagggatcaattgtttacttctttggaaaatgcagttggccacaaaggacatccagatgtgcagtttagtaaagtataatgcagggtggtaaccacaacaatgaaataccagcaagctgaaggaggagcccagagatggaggaacaggcttgccagtgggctggggtggggagaaggtacagaaggcttcaaaagaaagagcaaccaggggttgaaagatgggttttgaaagatgaatagtttgtgcactttagggagagagaattgcaggtgggaaggcgtggtggtggggtcctcatgaaggccttactcagaaagtctccccatacttcactacttttatttatatgtactaatatgtgcatgcgtgtgtgtatatatgatgtgggtatctatgcatatgtatgtatttacatatgtatatagaaatatatatatacacacatatacatatatgtatatactcatatctacacacacacacgcacacacacacacatacatattttaacagagacttccattcagtctttcattcagtaaatgtgtcctgaccacctaatgtatatgccagacagtattctaggtgctgaggatgtggtggtgaagaaaacagaagcagtcagaagagacctgttcacgcctggtgcagtggctcatgcctccaatcccagg

SEQ ID NO: 71278 - DNA, 1020 bp, Homo sapiens
tctcctgtctcatcagggagccccagaagctccttggacggataaacaaagtcattttcttgttcccttatctcttttcatcttttcatggcaggtttgcagcttggggctttgagcactgccaccctcatcccccaccctgccacccttgaatgctccaattttccaactttctattacaggctcagggagaatatgatgtaaagatataaaataataatgaaattgcatctaacaggtttattatatatatcagaacccatgaaacagacataataactttatgcaagaagaaatcaaggtcataggtggttaaatcatttgtttagttatactgctggtatgcagcagccctgttgaactacactgctgttgagtatcagcagtgcaactttaaacaaattatttaaccatgtgtaactttgaacccaccgtctgtgctttcatctactaccagtgtgccctaaacctcagttattggtgtaacaccttcataagtcacttctacctcttgtgctattatttagctaatgttttttattaaaatcatctttaatatttcttgctcagcaaaaacatgtcccattttaaaaaggctgtagcacagagggtttgatgtgctagttttatttttttgtactacaccttcaaatgaataaacacataactcacaataaaaatgttcatccatataccacctaagaccagctttgcccaacaacgatagctggtccacacttgggggtaggaaatggcgtgatatacggggatttgcttatgggttcgtcataggtaggctgtgtctgtgttttattcatcttagtatccttaccaccaggtaccataagagatccattatgggcacttggtaaatgatgaatgaattgatgacagaatgaacggagttatcaaggggaagatgaagaatgaatgcacttccccttccttatggagaagatcggaaggaatcctctttaatacgatgaggaggctggctgggagctggggcccagcaccgca

SEQ ID NO: 71279 - DNA, 1050 bp, Homo sapiens
tcctttctccttctgttcttctctctctttctcctgcaaatattaaattgcctacaatgaaccagacagtactctggggtccaggagtaaatagcacagacaaaatcttctgccctcagtggaatccacattctagtggtggagggggaaagacacaaataaatgcaatctgttatataaaatatatagcttgttaggtggggataagtgctacagagaaaaatgaaccagggaatgaggatatatgcattgggagactgtgatttttgctggggtggcaggagaaagtggcatgttagtagaccttcaaagaagttagggaattagctccacagatacctggagaagggctttctaagcagcaggtacagcatgtgcaaaagcactgaagtaggaatgtgtctggtgtgtttgtagaagagtgaggaggcctgctggagtgcattgcggaggggaaagtggaggatataagttcagacaggtaatggggtggagtttaaaatcctgtctcaagtaatgattctcaaactgtggtccctaaaccaccccaaacccagtgaatcagaaactctgggggtggggtccaccatctatttgttttttttttcccaagacagcgtttcactctgtcacccaggctgcagtgcagtggcaccatcttggctcaccacaacctccgcctcccaggttcaagtgagtctcctgcctcagcctcctgaatagctgggattacaggtgcacaccaccacacacagctaagttttgtatttttagtagagatggagtttcaccatgttgaccgggctggtcttgatccaccctccggtgattcaccctcctcgccttcccaatgtgttgggattacaggcatgaaccactgctcggcctccaccgtctattttaaggaggcctcctaggattctgaaacccactaaaatgtgggagccatctctctgcagcatccaggccaggcctgactacccccgaagagtctgctgtcccatcttatgttctggcaggttgcgggcagcagcaggtgtggcatgggac

SEQ ID NO: 71280 - DNA, 1110 bp, Homo sapiens
tagaacatggctgctatcgattggaggtttgtgtcccaccccgccacctcaacttgtatgttgaattttcctccatgtgagagtattaggaggtgcggcctttgggaggtaattaggtcatgagggtggcatcctcatgaatgggattagtgcccttataaaaaagggaccccagaaagctcacttgccccttccaacatgttaggacatagtgagaataccaccatctatgaatcagaaaagaagccctcattagacattgaatctgctggcaccttgatcttggactatcccagcctccagaactgtgaaaaagaaatgtttgtcgtttgagctactcagtctatgatattttgctacagcaacccaaacagactaagagtggcttagtggtgtagccacagttggcttcctgatactgaatgctacaatgaagcagatgtaagtacctactcatgagctgtgctaggaaactgcagacctcaacctggaactatggtaatgctggagatcagcagaatgcttgcttcctgctagtagctggctcccaaggaggatgcgtggatgagctcagctatgcctgccagcttctcttcccaaactcattaatgagatgaggccttccatctccccagggaagacgtaaggggctaatgccaggaatgtcatacaaatggatgtccctccacgtggcaggaaacatcagtagaggggaatactgttctctaataataacaataaaaatggtagaccaggtgtagtggctcacacctgtaatcccagcactttgggaggccaaggtgcgggggttgcttgaggtcaggagtttgagaccagcctgggcaacatagtgagacccagtctttaaaaaatatttaaaaattagtctggcaggttggcacatgcctgtagtcacagctacttgggagtctgaggtgggaggattgcttgagccgaggagcttgaggctgcagtgaactatgatcatgccactgctctccagcctgggtgacagaacaaaccctgtctaaaaaaaaaaaaagatagctaatttgtactgagcactacgctagacatttttcatgcatcttttcttttgattcttctaac

SEQ ID NO: 71281 - DNA, 1255 bp, Homo sapiens
tccagagatcactcagccattataaagctgcctccccgtatcagcatcaccagacttttgaaagggtgataacccttaaacttagaggaagatccagctaaaaggccagacttccagcttgtcattgtccccgggttgaaatggcatgcccctcactgcgttggggcaggccttctgcccagccttgttcccatgaaattcattaattgcttttgaaagaaccacttcaccatgtgttttaaattaccatgagcagcaattatgatggactgcacacaacagagaggacttgacaagtgtccttgcttcttagagaactaagagagacacacttgagttcacaaagtgaggtttctgatgattccattttgacttaaggattgcagtgcctcattaaggatctgctttaatttagggagaaaacaatgaatctgttaaagaaataatttttgattagaaagaaaacatataatttgggaggggaggatgagaacactaattaaacttttaattgtgtctgttgccctttagggtgtaaactaagaaactgagtaaagcaagagaaacagagtttttctttaagcggttttccattgttctaggcaattccccacagagcagccacctctgttgtaacccatttttagttgtaattgccatataagctgaaactaggctgttttttcttctattttttaaagcaagaaattttggcattttaaaaattacatgtcgtgataattttcttattctttaaagattggctaaggtatactaagaaattggaagacctacatatttatgcattagtatatctgattggtaaaagtgtgagtgaggaaatacaggatactgattaagagtgtggattctggagtcctaactcttgaggctcacagttggctgtaccctctagctatatgatcttaggcaagttacccaactcttctttgctttagtttcttttctgcaaagtggggttaacaacagcacccctgtcatagagttattgtgaggattttgttacgataagctgggttatgctgaagtaacagacaaatcccaaatctcagaggttgaatgcaaccaatgtgtacttgtcactcatgcagattcctttgaagggccagtgaccccagacagttgccctccatgtgttggcttgacatattccctgctgtgtcaattttacagccccttcatatcaacatgcttccattcttgctgcaaaaggaaaatagattatggagaatta

SEQ ID NO: 71282 - DNA, 1046 bp, Homo sapiens
taggccttgagtatatatttgatgaatggatgaatgaatgaatttgcatttatgctgcaaactccttgctccatgtctctggatcaggttgatttatctgggctcaagttccttaactgaacaatgggcttatattcaccctaacacctcacagtgttgtgtctggctgcagttcagaaggaaagcagacctgcagccatctatccaccttccagcggaacagattctcaggccccttgcagccctggcattgcgcgatgctgtgattcgtctgtgacccttaaaagacctgcccttaactcccggggtgcaatacagcagtagaggttctcagcaccgagaaacaagtactactgctgtggcccagagcaaacagttttctccttcattctgagttatgtaataatgatcagagctgccttttattgagtgattactatatgccaggtacacatgctgttttattcaaccctacaaccctcgcgctgaatgtgcaaggtgctctcagcagccctgttgttcaggtgaggggcccagaggtataaggggcagattctccatttgagcccaggcccgtctgagtccagagtccaacatctcaccactgctgtgtgtttttctgcttttcaatgaagaaaaagcgtcagtggctactacctggactgtcttggacatggagatgcactgctcagataccccttcaggactgaagggcctcccccacagctgaggggagtgctgctggcgcagctctcagctttctgtctgctttggaagttgaccttgtttgagagagcttctgggccaaagtctcacccctctccctaggcagcccatgtccagggactgattgatgtaggggtataaaagcccagcccccatgcaccaatttaggacagcgctgaagcatcatcctagcttgctaacacccaccagaatggcctgaggcctctgttgagactgcatcacagtctaacttctccctctgtccggttttgcttctcacccttccctgccactggggttgagcccaagaacacttcctt

SEQ ID NO: 71283 - DNA, 1054 bp, Homo sapiens
cccctcgtagtttccagaaggaccacaacacacacttgacgctcaagaagggtgggaagaagataagtgaatcatctggtagggaagtaaaagggaaccatgcaaagcgaaaaagtggggaacataatctcattatggacttcgggagaccaagccatgtgtaaatttcacaaacaccagtggagtgcttcctttgtgcaaagccaatgccaacggctggaatattagatgattcagctgtggtccctgtccagaaaacacttgtgactcaaccttgggcatgtcccttaaccactttctttggcttggctataggcagacatggtctcttaacctcaagtcacttaaatattgggggatgatgggattgcttcctcctggcatcttccctgctcatccccttactttgcacatcatttggcaatgactgcaccactgccaccacaaattgctattaattattgagcactcaccatatgccaggacctgcgcttaaagcaatttatgtacactatggtatttcatccttataacaactctataaggcagatactgtcctattttatacatgaggatctgaggctctgggagcataggtaatttgtccaaggtcttatagcaagtaagtaggggagctagggctgtccaacaatgcaccccatcctcttagtcccctccacctggagaagcccaccagttcatgtttttggctctcaccttgtccccttacggccctcattccccttgagctgtctagttctgcctccacacactggctcgccttccctgtttcccttgtcacaacgcatcctgactgttcatgcccaaacctacaactgtgctggctccctctgtctttgggactaagaatggatcttctgtcacttgtgaaaacgtcccctgatgggtctttggctgcatgccatgccctgtggacaagcattggggttccctaagaggctgtaaaataggagtcactgggattctgcctgcatctgatgtgagagccacccctgcttttgtagcacagagtaacagatggtgccagaaggaa

SEQ ID NO: 71284 - DNA, 1050 bp, Homo sapiens
catttgtgtctgtttgcatgcatgtggccattcgcttgaatttcgccttttctagcccgagtctccttacctgtacaatgggaattgtaataggatctacttcctgccatgtgtgaacattcagtgagatgaagtactcagagcatggtgtctgggatgtggtaagtggtcagtgttaccattgttattggttatggctgttatttagggacacgcaaagtatacaaagagagacttacacccccccgcaagagtgctacctgagtgaagtgacctttacccagttcactgctgagctatgctcaagctaatctcccttcgctggtttgtacaagcagatccggtgcccagaggaaaatggactggcagtgaattgattacttcctgcctccctaagcagcctggtttcgaaaggccctggtcaaattaaaatgcattaactgagtttgtcgaggagcgatcagccatctgagaagggccggtccctacctcctacccacatgtgccaggctgatgaccatgtccacattcacatgcaggaccacgtagtaccaagacttgtctcctggccgcatctcagctctcatggaaacctggggtttggttctgagcctggagacaaatgaggtggctgtctgtaccatgtttcccaatgggttccttttcatgtgcaatattttctctgcctattgtagaggctcagcctcagaaagcaaaagcacaaaaaggccaaaccaagaactagaccaaccaaaggaagccaaggggaggtgattacgtaaccccagcagccaggctgtctgcaagccgtatgacttatttagctgtctgtcttttcggatgtcagactccatcctttccagctggctctccgctttggtgattatattaacactcagtaattataggaaatggacacctctccagtcaccagcattcccaagtggcgggatgggggatattcaataccaggaacaccccatcacagggggtcagtcactgcccaaggtttcagtagtctggcaaaaagagacagaaataatggcacag

SEQ ID NO: 71285 - DNA, 1096 bp, Homo sapiens
ctcttctggacactgagctacagcagtgaacaagagacagagtccttggcctgagggaacttatactctagtggggaagacaaagtacaaagaaaaaaatatataatgtaatgtcaggtaatagaaaatgctatagagaaaagaaaggctgggaggtagataggtttggggagctactttcaatgggatagtcaaggaggggtctcgaggaggtaaaatttgagcaaagagagggatccaggaagatactgggggagaggaatctagatggaggaaggaacaagcgtgaagttcctaacatgagaatggacatgatataagcaaggccagcatggccagggctgagtgagcgaggacaagagtgatggaagatgggtcagagagggagatgggtcagagagggagatgggccagatctgcaaggccttacaggccatgatgaggccctacaggttgcagaaagtctttggattttatccaaaatggaatgggagcccactttgaatgcatggttccaagcagaagagtgacatggtctgcattaggctttaaaggaataattctgccagtctgctaagtggagaataggctgtagaaagataagagggaaacagtgagaccaagaggagactttcacagttgtttaggtgagagatcttgatggcttggaccttgatggcagcagtggaggtgatgagaagttggcaagatttgggatctattttgcaggcagatctgccaagatttgctaacagattgaatgaggagataacttcttatgcctcttttgtgcaaagcactatactaggttgtattaattaggactcttgcttataagagcagaaacccaactcacactggctcctgtaactgaacagtcaagccatagatgagtttcaggcatagttggttccaggattgcaaattatatcttcagaatttagccttctctcttatcttggttccatttctcacatgtagcccccagcagctctaagctgacacaaagcttatggatatcaattgccatggggaaagaatatttcttcctctatagtttcaacagaactgatggttcatctaccttatgttacct

SEQ ID NO: 71286 - DNA, 1038 bp, Homo sapiens
cagagcttgacaagcaaggtggccctgggaacagaagaaccactgaggaaggagcagcccccatgggaagggaagtggatttgctgagtgccactctgcgtgtgtcaggtatgttctcctctctgcatcctcacaacagccttcagcagggtaggccattgtcttaggttggttttgccccagaagcagaatctaagcaaagatgtaagctctagaattatgtgggaggtgatggtagaggagtggggaagtgagtcaagaaaactaagatagccaataaaggggtgctagcaagccagctgtcttactctgttctggccgctataacaaagtaccattgactaggtggcttataaacaacagaaacctgtgttacacagtaatggaggctggaagtccaagatcagggatcagtcgggttctagccagggccctcttctaggtttcagcctgccaacttcttgtcctgccctcacatggtggaagagctaaagagctctctggggtccattttatggggacactcatctcattcatgagggctccatcctcatgacctgatcatctgctaaaggctccatctcctcacaccatcacattgtgggttagaatttcaacctgtggaatttgcaggacacaggcatatttgaacactgaccaccatgggtgactgaagcttattctcacgagggaaactggtagccagtgtagaacacatgtctcagagttatcccacctgtagggcaagacagctgggatatgtatacaccagcttccatcagtctatggttgggagctgcccctagcaggcacacaaagtgggctctggtggcacaagaaggctgataggtaaagaaatgcaggtgctggcagtaggaggtcagctggcatgcactgaagtggtaagtcaagggcatgtgggcgagacacccacagcgtctgctacagcctttctctgtgagcccttgagggaggacttttgtcttgttctttacattcatagcaatcatcacatactcagatgctccatcgaaatag

SEQ ID NO: 71287 - DNA, 1035 bp, Homo sapiens
ctatacttcagcctaggtgacagagttagaccctgtctcagagaaaagaaaaaggaaaaaggaaaaaaaaagtgtcatctggtatctggggtatgtgcttagaatgcagaattctgatttcattcccagagacgcgattttagtaagtctggcacgcagccctggaatcaatgttttttaaacaccctaggtctacactgtgagaaacactttcattttcttattcttcagggcagcgacgagtctctgcatttccggggcctagcacagggtgcatggctggcactcagtaaacgttagctaaatgtatagatgagtgagtgagtggatgaatgtttttactttggatctttttttcaattaagcaagaagttttcagagtaattcgggtcctattagaattttaatagagtataggctcaaataactttcctcctttcaaggatataacctaatttgtgtctgacaagtagagaagattgtagatttcgtttccttttttgcctgttggaaaccgaacattttttcgtttgtttaattgtgtaccacaaaatgtggaagattgatgtctctggataacatttatttggcagaatatcttgacatcggatggcttttcctcaccaggctccaaaatgttaggaaacagagatgtaagtaaagaggcttgtggggctctttcctttcctccatttttcctttctttcccttccagttagtaatggttccaggattagtggtaagggacttctgaaaagcttaaagcatgaaaatcctgttagataattgtgcttcctggaggcccagggggactcttaagtaaggagcttcgaggaggaaagggggttgtggggagacttggcctgcttgcctcctggaatcttctttcccagacttggtgtgctccattcccagggcagctgtcttagtccactcagactgctgtaacaaaatagcataaactgggtggcttagaaacaatgtttatttctcacaattctgaagtccaggatcaaggcaccagcagattcagtg

SEQ ID NO: 71288 - DNA, 1061 bp, Homo sapiens
agtactttcagtttatggaagaggacagtggggtcagagagcccaagcatgtggcctgaggtcacacagctagagagaggcagaggatttgaatcccgtctctctgattctagagctgtggcatggtgccacattggtggggataaatctgcaccacttaactgtatgatcttaggcaagttttctaaagaaatactttaacatctgcatttgtctccaagcccaaagggggttcaggtccatggttctttcatatctctgtgctgtcgcccatgctggtctttctgcctggtgtgttctttctgtctctcagtgggggatcttacaagatctggttgtgatgggatttttttttttttggtgttgtttcccctacagatagtgagctcctgaaggttgtgagcagtgtctcactcaccactgcttcctccatgcctattccagttctcagtagagagtaggtcctgtgtcagttagctgttgctgcatagcaaaccaccccaaaactcaaaatgacttaaacaataagcatttattagtagtattcacaagtccaggggatagctctatggttcttctgttctcagctgggcttttgcatgtatcttctaggtcagctgtaggacggggagtcagctctgctttctggactgggctctctcacaggttagggtcagctggctgcaggctggtctaggacggcctctgatggtacagctgggctttcctccactgtctctaatcctatagcaggctaacccaggcctattcgcatggccatgctagggcacccagagagggagcagaattgaacaagttttctttaggtctgggcatagcattcaatcttgttatagcaccatcacatccactgcactgtcttggccaaatgaagccacaaagtccagctcagagtcaaggtgcaagggcgcttgcaaagaatgtggacaacagaagcatgagaaatggaatacaaatgtatcataaatgtttattaactaaataaatgtacatttaacatgtgccaataactaccgtaagctttttccatattaacacgt

SEQ ID NO: 71289 - DNA, 1053 bp, Homo sapiens
aattgttcacgaattgaatctcacctattgactctaggcagaagccacttcgagacccgcttaggaaacacctggattctgcgttactccacagccactgacacatgtatgtgcatgcactcatacacacacacacaaacacacattcacacacacatgccaacacacatcaagacccagctatatcatgatccactcagggatccagagaaaccagcttcttgaagcaaagttcattttttcctgcctatctctgtcagagacagggactttagggaaaagaccaggagaaaatgcttctgtttacatcaaaggtccctccttttgtttactaagaactgtttcccacacgttttctctgaccgctattaaacaaacaacagaggcttgcctggcttcagagggctcaagatgtggccaccaactgatccctccagatgtgatccgcttccatttagagaccagaagaggcccccctctccccatgtgcaggaagaagaaaaggaggcacctgcagagacccctcgtcattgccttggcttgaaagattcttagactttgctgaaatgcatccatggttttcacaaccgagaaacgccagtcatcctctgctccctgattttagctcacgagctgaggtcagctgaattaagggcaaaatgtgcctcccagaaggctgggcagcagggaattggtgttgtattaatcaagcaaaaaaggggaaaatctgaagaccaagcactccctggcaagagtgcaggtgagctggagccagccggctggggtgtttatttttcacttctgtgggcctggcaggaggtaggcactcttttccctcttatgctgggagagagggaagctgaccagtcagtggccttgtgagtataaagagtttaaaggcgctccagcttctagcaggagaccaccagggccacaggaagttgcagatagccagggacctgcgtgtgagtagcttgctgctgggagctgccagctgggcacgggagactttgagggtgaccttgaaaacaaacaatgctgcttcaaagatcc

SEQ ID NO: 71290 - DNA, 1041 bp, Homo sapiens
acttgggtcactggttgtggtcctctgtgcaaaccaacggcacagagctggagggacctgagaggccctcttgtcccctccctacctatagctcacccccatatttagagaagaaggcatggaagcccagggaggtgaaatgacttgcccatggctgtggttgtgtatccatgaggactcttccagcaagtggaagaaaatcctactccaactagattgagccaactgttttcattcagtaaccaaaacatccaggtttcacctttgacacagctggatccagggactcggttgatgtcactgggtcttgtctctggccacttcttcactctgttctctccctgggacattctgagctgtcttggaagcgagatgatggttggactttcaggtttcaacttcacagctttaatcaagggagaaatcaagagtctctctctctctctctctctctctctctctctctctctctctctttctttctccctctcagtggtccctgtgaatgcacctgtgggctctgagttagggaatatgtccatccctgatccagcccctgttgtttcgaggaagtgatgccctgaatgaccagcccaaagcagaaaggagggtccacaatgcctgtgcagggagtggagaggggtggtcctccagagaaaattggggatgctattaccagaagaagggggagtagacactggatgggccaaaataacgcatgtcaccccctccagctgatgagtggctgggctcagcataggtgtcctgctatctagcctgttcctccagctctgacacaagctgcctaaggcagaacagctacctccaaaggatctacccatggttttgactcctggcctggagaacaagaggtgaaggagatagggagaggatagtccagggctaagacctgagacctgggagccagccaccccagtggagttcaagatctcactttgctctcttcatggccgggatttggggcactggcttggagtgtgggaagggaataggagcaggtgacttggatttggacagtga

SEQ ID NO: 71291 - DNA, 1034 bp, Homo sapiens
catgcatgtaagaaccataagctgatagattacattatctacccattttagagatgaagaaactgagcattttaggggtaaataatgggccaaagctcacaggatgcatatgtggcaaaacagaattcaaacctcaacccctatgattccaaattcattgcttctttcctctccgtcttgttgattcctcagtttttcaggagattaaaaaaactaatggaaaattgttaaccagtgaaagttgtcattgtcctcctgagctaagaaaagagaacccctgcctgcacctcaggacccctatccttcccttgttcctgctgtgtcctaggcagtttgggttgtaagtgacaatcacatgggtactacctcatgcagatattcttactttaattccttcttcttctgactcttggccctttgcttcttgagatggaagctttttttgtgactctgggtctgtttgtgtgtgtctctctgtatgtgtttacacagtgaaggctcaagcaatgaaaatagcagaaggcttgaccttctgaaatgaataaccccaaccttgtaaataaatcaaccactctaccagaccaaaaaagataatacctgtagggcaataaatgggatcattgttttttgatttcttcttttttatgttctcttgacacacaacataactttctcttttgaaagcaatgttctaagattgcaacaaactgtagttgaaattattttagtgaaagaaaataatgtcttagggtcatctaaagaaatgacttcatatatctattttactctcttaaatgtttctcccagtcatgctgaagtggcaaagatttttctgattccaagttcctgctaacgaaatacattaactgtagagagcagagatatctgagtctagtgcaagcaaaacaaactggttaggagagctgtacagataaagataaacaagattcttggattcccaataatgtgcttgaccttattatttggtgctgtggtttggatggtgaaaactcatggtgaaatttggtccccag

SEQ ID NO: 71292 - DNA, 1066 bp, Homo sapiens
tcgttggctacaaggatcaataaatgacaagggtggcaccagtccgagtttggactggcagtcgctggtcacatgtcttcatataagttgtgtgtgtgtgtgtgtgtgtgtgtgtgtgtgtgtgtgtgtataaggttaccatggccttcgtgcaaggctgtgatttttgcagaggtgttctgtgatagttcttgttatcaggcatttgtgcatggaaatcttcccttcatggcctttgctgactctcttcatcagggattttaacacaaatgattccattttaattctgacagctttcacaagagggtttgccaaggtgcctggcacatggtaaatactctataaatggctggccactgttgatttccacaatgagatccacttaaagcatatatcagatcacatctctcctctgttcagagtcctccactggctctggttcagtggttccccatctgacccacaggaaaagccaaagccccagaattacttccatgtccccccaccccctaccctccccagacatcctcctccaccccacctctgtcccctgcttgttccttgagcacaagaggtttaccacaggacctttgcacttactcttccctctgcctgaactgttcttcctccaggtatccccatggctcactccctcactaccttcccatttcacccaaatgttaccttctcaatgaagctttctatgaccattgtatttaaaatcataatactctgaggacccttgtcttagtcaacttgggccactataatgaaataccatatacagtgtggcttaaaacacagacatttattcctcatggttctaggggctgggaagtccaagatcaaggtggcagacaattcagttcctggtgaggtctctcttcctggcttgcagatgggtaccttctccctgtgttctcgcagggtggtggggtgggggaaggtattcctcttcttataagtcctctaaccccatcatgacgatccgccctcatggactcatctaaccctaataatttgccaaaggccctgtctccaaatactgtcacattgagggggcagg

SEQ ID NO: 71293 - DNA, 1029 bp, Homo sapiens
tctacattttaatacgtactcggggcgttcagaggcagaaggtccaagcagcactcttggagagacattgctgtaagacgaactgccacacatatgggacttcaatgttttccaggacatgctcatgaccctagaaatgtaggatctggctaccgagttgggacatagctttgtgggacaaccccagaagaggccctcacaccatgtggcccacacacactgtccctaaggtctcaaagctttgtcctgggatgtctcaaagtcctcccccagcctccagcacctggactggggccctgcgtaattctggtgctctcttcgaagaaaggatttgctaaacaaatctgctcttcacctaagaggcagcctgcaggagctgcttgccacataaattgtttttaaggacaatttgctctgtaaattaaatgctgtcctcattgaatgttgacttttgcatgtgagttgttggcacacaaatgggtgttgctaattgcgaatgggttttgtacattcattaagtcagccccatagaatgtgtgcacaaggaagcactttgataagtcacgtcggctgctgaaaggaataaaattgccttttttctgatctgactgtaatttagattggcttgctttgtggtctgaatcaatacagccttgctctctgtgtacatagagagctgttcttcatattcaaaggttgctcagccaatgtggaaaccactgtttttccaaaaaaggtgagatggagtttgttctcagtcattcctgctcttgttgaaacagggacacgtctggccagggtcaagagtggagccctattttagtagctaataacaataataacggcagcagctgatgtttaatgagccagggaactatgataagtgtttacaggagttacttccaatatgttattattgtcctcattcgatgatatgggaatggaagcaagaggaggttaaacaacttatccaagatcaaccacacctgtgaattgaatggctcaaaattgaatccaagcttctcaagg

SEQ ID NO: 71294 - DNA, 1048 bp, Homo sapiens
cagagtgtagttggagtggctggaagtcaaaaaggaccttctaatgcttccaaaccttctgggacaagttttaaagaggcacgagcagggaaggagagcaaagagaacatgtcccagaatttgtcagagccatttatctcattctttccatgcctctttggttgaattttcaagagtcagcacaaaacacaaagtggaacttagagttttccagattctgttcagtgtgatcctctgggaagcatgtggattggaagtcatatagtcctttaaatttgaatcccagctcggcttcttgtagctctgttatttcacctctttgaacttccatttgtccttcgtaaggtgagaacacaaccatcctcatgagactgatgtgagcaatgaattagacattgtagctaagacatccagtgccatgcctggcacaaggggagcccccttcctccctaaagcagtcactcatattatactttttgggctctaaaatgctgttttcattgtccttaaagaaacctgcctgtgattctttctagagggatcgttatttcttccggctccctgatggaacaggttttagtgtttagcactggaaaacacatgtggaagaacttcagaggcaagggggcctctgttttcagtcaagtgtttattcacaccagctctgtaccaaagcctccaaaagagaatttccaatagaagttaggactctaatttggagttatttctttctctcctctctcctgtgttctttttatcctgcaattctatcaaacaggatcatctccttgactatcattattctgacaaagtcaggtagggccatgatgcttatatggttttcctctagactataagctcttcaagaacaggggctgaatattatttgttttcatctgtgcccaacagacggcctgggaaatattggtgaaatatggattattttatgcctcaaaccatcctttcttgtcagaacagcctttcttggctgaggtatttggaagtaggcctgcatgcaccattttaccatttcatgtgggcacagctt

SEQ ID NO: 71295 - DNA, 1006 bp, Homo sapiens
taatttttttcatggttgattctatttattattaagcttttatcagccagtcgttcatttagtcaatccataagcatgcattaagtgccagctataagcacaataatagtgagagataatattcatcaaattatttgtgtgccaggcaccattctaagtactttacatgaattaactcatttatcccccatgataactccatgaggtatgtattattattgtcatccccgttttacagatagacaaagtgaggctgaggatagctaatttgcccaagatcacagggactggaagtggtagcacagggattcaggcccagcaggctggctccagaacttgcttcctttgccaccatacttttgctgctgtgtgtccagccctttgccagggaggggggactccgggaggcctcacatgactcccgttcagcacagccagaatggagaaagagtgcagtgtcagaagggaactgctgggaatgggacagatcagggaaggtggtatttgaatcggactttgaaagatgaataggactttgaaagatgaataaaaccagccatttgaggattggaaattgggaaggtgttctaggtgagaggagcagctgtcaaaggttccaggtaggaaatccagagatagtgggggacgcatagaccaactgagacagactggcttgggggctggactgcccatcagctcgtttgcagaggtgcagctgtttaaccagttattaaaatgctgaaatgcttctctctatgggttagtaaaaagccactgcctcaagtgctcccaaagccacgatgtccctgccatccagcaacaacagcttggcatctggccctgcaggtgctccaggatgccctgtctgcgctgaggctgtaggagttgatcggtgcctgagccttaacagtagttaaatatttagaatatcatcctgagttgagagtgtcggggagaagatttttgtctgcaggtgtcatgggggcctttgatcctttgacagcag

SEQ ID NO: 71296 - DNA, 1078 bp, Homo sapiens
tgggaagtagccccggcagtaaatttggtcatttgcccagtagacatggtatctgagttgaatgtgtattcttcaaagtctgacttcacaaacaaaccctctacaggtatacagttccctggatttttattgatttaattacattttccccatccctccattttgctctcctcacagactacatctttttatacctacaataaaaggtgctatgaattcaatttttttttttactgaaaagttatatatgcttgttttttaaattttggaaactacaggaaaatataaggaagaaaattaaaattatttataattctgctaccctgaggtagccaaaatcattatttagtttattgtcttatctttttttaatataaatagggaaggttttgaacatagttacactgtgtatatataattttgtgtcttatttttatttcacttaatagcataccataagcatattcctggtagtactatagaacattcataaacattcttaatgactgcagaatattccatcatgtgactgtaccgtaatttgcctaatggctccagggttcgtggccatttgagttgtttccagtgtgcgaattactgttcttttaaaactacccacagtggtgtgactaaaacatcaatggagaggaaatggttatgaagagagtagtcagcttgtagtagagcaactgaggggttaattcacaggccctctgttggcctgtaggaggaagaaactacaaaaggagaaccctgggagggagcctcacccaccccaatcccagctgttgctttttttccaggaagcaaggccttatgggaagtgtagggaacaatggcatctgcctggcctgcaagctttctagagcaacagtaatgatcagaatctcttggagtgagcacttccatactcaggatctccctctattctcacagcaaaaccggaaactgggaagatcgcttttcacatctccagagactgactctaaaaaagtcatgagatttgccccaagttatgcagtgagtggccaaactgaaaccagagggctgctctagggattgccggtaatctcctccc

SEQ ID NO: 71297 - DNA, 1530 bp, Homo sapiens
tgaggcttaaagacccagtctaatctctaatttggtgcagcttcgcattatttaaaagcagctgaaatttcctgagcatctctgtgagctaggcatgcctgcagggcacgtatcaccccatttccagattggaaccttgggttcattggccatgtgacttgctgaaatttggtcattgacccaattatttggcagcactaggatcaaaacccaaagctctctagctccagagcctgcactcttggaaacaactatcaatttaacccaacaaacatttatttagcactgactgatgcgaaatctcctgtcctgggtattaaagaacgggatggaaccagtaaggagcaagcatggttactgtattccagggattcccactctagagatttagacagtggagtccacactcaagcattataataatgtctatttggctttgcttgcagtctgggctattccagaagaggaaagtaatttctgtttagcccattgcacaggccttgtttcctacttgttacactggggcaagccccatgcaggagccatctccacagagtccatacccaggaaaaatgatctgtatgctggaaggatacaggagggggatgtacctggaaaggtgcaaggcatgtgactggtgtatataactagatttgagcaaagcaaaacttcaacttggacacatcccagagatgagcaaagaggaagatatagcaagaccgagagaggctgggaagctggaaacaggagaacaggtgcaaagaactgatgggaaagccttcagaaccaagcctgtgcactgagcacgtatgcaggagctcccctgttaggcactttgtggtattgctgtgctacagctgtggctgcaggacttgaaggaaatgggcccaaccctgacattgttggcatctttgttcgctgattttttttttctgaatctaatgttgtgtttgtcttcatctaatgtttaaatttgtgacaattctgactatatgtgctgtatgccagacgtagatgaagattcctgaatgtaaatcttccatataattgtacttccacccctgctatttcatttcccctctgttattctcactctttaggggagagaagcaccaaagggttaggagacatctgtgccttctccatgcaccttgcaccagttcccattcagagccagctgccataccccagccaaatccaaacactcccccactttccagcctgcacccctccatctcctgacctcacaaggcctccatctcttggtgagatctgctttggttcttccttggtcgtgagctttacactcaccccctcgttggtagttgctctgccaccctacagccggccccagaaatcaacccctttccttggagggagggacttcaggattctcctgagaaggaattagacaagtaggcaggcaggggcacacgtggtcccctttccatctcaccagatactcagccctgaatattttgccagtgtccacggagtgagaggccctgaagtcctgacctgttcaaagag

SEQ ID NO: 71298 - DNA, 1489 bp, Homo sapiens
ctcaagcttcttttgggttttagtcacttcaaacaacttcagaataaaggagacaaccagtggaacattgttctcttaaaaaaaaaaagtataaagagaatgcaagattttttcttcagcattctccaccctctccttgactcagagccctcgaattctttcccatctccaattcctccaaagaaaacatacaaataatgctattttttcccctctgagtagacaagataagaagatttttaaatgagttactggcaaagaattcatgagcttatatactattaaggtcagagtgacaagaagaaggcaatgttgaaaggagagaataggtacatagaaaattccaggagaggctggaatcctgaggttcaaggtgtcttattctggagcttgccagctgtcttggtaaaggtgttatttttgaaggcagcagagcctttttctttcttcttctttttttttttttttttttttttttttttttgctattctttggcattcaccaggcattggccgtgtgccctgggcctcgcttggcatctaacatgaaaggcagcagcccaagggcagttctgtgatggagatgcagccccccagggactcagggttgtggactgtgctctggggccactgagcaaaggaatgatgaggggaggcgcctctgaaacttaacccagagagttctctgagcatttggggctggtttccaacaataatggagacactgtgacaaaaataagttctgctcacctgagacagtagaatccaattcaatttcaagtcagcgtgtgtttattgagtgcctgattcagtttaggtgatggagagaatgggagaatgagggagacagcctaagaagcaggctgattcaggcagaaaatccttgggactctgccccacagataggtccacaggtccagaaactcaattttatcagtttcacccagtaagaaattggtaaatcttagtctgtgtcatgagcaaatatttattaagtgcctacagtgtgccaggcaccatcctggagctgcggcgggagccgtgatccaagaagtccccattccctgccctggtggagtttacattctaatggggcatttgcagaggcagcgggtaaggccagaggagtcctctggggtgaggcccacaatgcgagggattcaagtgaggtaaagtcaggaggaacgtctagggagaaatgggatttagcctgtggtttgaaggttaagagggatgtggatttttaaagggcttgaagccttacagacaggaggctcagctgcatgaacaggaatcagcccattgcatgccagcaagagtccatgacctgatcagctcccctggggtgacaggtgcatgctgggtaacagagtgcatgctacgaagttggacaagagaatgtcaatatcacatggggtttctctacacatgctatatagtcaagtaacttgggtctgactcccagctcttgctagtcttgtggtccagg

SEQ ID NO: 71299 - DNA, 1041 bp, Homo sapiens
cacattatccccaggctacagatgaggaaactgaggcccaaggattccagagagcctgccccggggtcaccggtgcggtccggatgtctccaaaggctctcccactactctggaattcagaggcagggtctccagggaaagcggggtgtgggctggggagtcgggagatggggggatccccgcgagcagggggtggggccaagccggcagcccctgcctccggggaggccctaacgcgcgtctccgggtccctcctcccaccgcaggcccttcctcgtgctgccgccgctgatggagtggatccgggtggccgtggcgcacgccggccaccgccgcagcttctccatggacagcgacgacgtccgccaggcggcccggctgctgctgcccggcgtggactgcgagccgcgccagctcaggtaggcgcgggggcgggcggggggcggcaggggagggagggctccggcctcgcagcctccacccctccaatcagagccccgctgggcggcctgagccccgcacacctcggcggcgctggggtggaggctccctggttgaagtggcagacgcgggctgaacaataagcaggtccctggagttgcagggttgaaagaacgcggcgaggcccgtggaggacggtccgattcttagattacagatgtcggtgtggtttctctctggctgttctctctgcgcctagcttctccctctctttctctctcctcccccagtaaaatccggtcttcctgtagttttttaaccaaaccttacagagtgaaatttctggctgggtcagagagcgcctctgcgttttcacttgcgtgaggatggagtggtcttctctgcattcctcaggcctgtatccagggctctcctctgtcaaggtgggaattacccatgggccactcaggggcccccatgcgtgggtgctcattttgagccaaagcaagagaaataaaagaactcactcaggtgagtcataatctggctttaaatgcaaaaaaacacagaaacccagtggggcgtgtgtgtgtgcgtgcg

SEQ ID NO: 71300 - DNA, 1049 bp, Homo sapiens
ttctgctctctcaccctagacctagacaagccctctcagaggacactatcttctggatggctctgtcccttttcacaattttgcagactgaacatgagcctcaggggccactgtccatctctgcgccccccctcctcagcacagagctctttctgcatggtctagcgaccaagtgtgtgtcattctgacagtcacaccaaggatttcaatttcagcatctgtccagtttgaagcctcagccctggcattcaggatgtgaatgtgatgtgcacgcaggccagaatgcacagaggagcagaggaagtcggttcctctgagtccctgggctctttttaatcatttatctcttcattcttgactcatttgtctcctgaatgatgatttgtgtacagaaaatatactaattgattgttcgagctaaattttcattcgatttggaaatcatcttcaaagagaaaactgaaatattcagttagcttacctaaatagtaagtgaaggatttacaagttctattagctacaaaaaattcaggacatgaaaggataaaccatttcttttaaaaagaatacttatttttcagactagtcaacatacagatacatctacacgtatattttctaatctcatttaatgtgacatgaagtaggaattactgtctccattttgcaggtaacaggatcaaagaagttttgttcattcaagacacccaagcgttagataccagggacccaccctgttccttacacttacagtccgtgtggtgtgtacatagctgtccccaacaactgtgcaagacagcctttattatcccattttacagatgagaaggctgaggcccattgaggttatgggacttatccgaggtcacacagctgctgtgaggcagagcaggtctagaatggaggacttggcaaataatgtaaaaatacagtctccttgcttccctgccctcccagacattcattttagaagttgctgggtgggcttctagttctgagtcggtcagagctgagctccttctttctaaataaacagccctagaaagggg

SEQ ID NO: 71301 - DNA, 1055 bp, Homo sapiens
cagaggaatatgaaaggctggcgacttggtccttaattactattttgagttagtgttgtgctttcatttctccccgctaggtaccttcattttcaattatgtcgttacctgtgtagccaaacagctcacttaacttccttttccacgacagccttgtgaggctggggcccctctctgactcacttgctgttgtattaccgcacctaatccagtgcctggccgatactggagcccaataaatatgcatgtgtgaattattatgtgccaattaaaaataataataaaagccaaaaaaaaaagtctgtatgaatgaatgagtgatggtatttccctgagactctgaggttctccagagcagaaatcacatcctattggcctctttggatccccagtgtgtggcacagagtagatattcagtaatgttgaattctgcggaatgggctgggatggagtatgggcattcacccacaaacacaggtcttacttgagcctggactttggaatgagacagatctgggttgaaattgaagtctaaggagctgagtgactgtagggccagatatgtaactcctctgagtctctgtttcctcatctataaaacagggacatgaaagcttaccttttggggttcctgagggtttaagcaagatacaggtgtgagctgaggagtcaggatgcctgggttgagtgccagctccatcacctacaagctgtgcgaccttgagcaaccgatacgcaacctcgatgccgcaatttttcttctgtaaaatgagcacaacagtccacagtttatgagattattttgaagatttaagtgagctattatatgtgaaatacttaacaaatgaaaagctgtctataaatgccagtcatgattatgatattaactatagtgtgttgggaaagctgtttgtaaatgtttactgtgcctttggttattgttattatctttgctctcttccaagacaactaatctgactgctggatggagccatagtgtaacccaaaccacaattcccaggggcccacacagcagaacggggctgcatcctctc

SEQ ID NO: 71302 - DNA, 1072 bp, Homo sapiens
cggaggccatcattttaattggagcctaggaacaggcaatttacatgaaaagcaaatgcaatgtcccagggtgcttcctgcggagtttgctcctgtgcccctctgggaagccgctgtacccgcatgatgtctcttcccttccttagggccgacgactgcttttgtgcatctcgaaagctggatgcggtggccatcgaagccaagtttaagcaggacctgggtttccggatgctgaactgtggacgaacagacctggtgaagcaggcagtgtctctgctggggcccgatgggatcaacaccatgagcgaacaggtacagggtccgagggtctgaacaggctccccacctcctccatgtgcatcacccctggcaagacagagacagccggtgaatcccctctgcaggcgctgggcagaggctccccctactgacggcttagattgcttgcttgcttgtgtttttcttcagtttttaaaatatcttataaaaatactgtggttcatctttatagaagtagcacatgatcattgcagctgaaatggaaaagagaggaaaaacaggcccattccagaaaggaaataatgccatcaccgtgtaaccatcatttatatttagtatctgtccttcaagtccttcttccatcgtggttaaaattagttctctgcttgtctgtctgttcctgcacaggacaagcccagacagacttcatcaaacttttaggatatgtttaagatacacaaaagtcattctggggaccctaggaggcgactcagagataggcagctatcccccctaactcctgaaactgaggtacagtgagagacatgtgggcccagcagtcagggagataccttgtgtggtgaaccgtcatggacagagaaaacaaacagcagttataaatgcaagtctcacatggaaagtcacaagggacagatggggctgcttctcacatggcagctcatgcagtgagttccagagagggaatgacagggactatttatttaactacagctataataattttattgagcaacaccaaggagctctaatacacacacacacaaacacagac

SEQ ID NO: 71303 - DNA, 1405 bp, Homo sapiens
gctggctcttccttgggtaagctagcccagagccatctcctccatgtgtctggggaacaaggctagcctagccttcaccagcgtagtggctttcgctctgccatggaagtggccagacctagccatgggtccctaaacacagggtgtggcagattaaggcaggctgaggactgaggagaagcctcctaatgctgttctggaaatgacctctctccagggaaggtggggaggggttagtctgtggaacgtttgtgccattgccctgggagcctattttgcatgatgatgaagctcgagattccgaatgggctacttgttataaacagtagcaagacacgtcctcctctgtctgtgcctctgcatgagaggcgagaggcaaattacagcagtcagctgctgaagaggtccctgttaaaggaggaagacctgatgaagtacctgcagatggaaatgttgttttgcacagaggagcagcaggaatatcctcccatgtcttcttattcgggtataaatatctgtcttagccagagctgtaaatggtgaagtccaccaatgggtttcaccaactctaagctctcatctgggcacggatgtgttccagatccttgggcacatccactctttaatcctgggcaagactcttctcccccctgagcttctttccccagtaagtagaggggatggagcctatgcactcagaatcccgaagtatggaatatgcataagtagcgtgcgtaataattccaatatgctacacgatgattacatcttgtgaaatgcagcctctaataatatgagcagcatacagagatggacacccatagctgagggaattgaattatgacctttaatttcaacttttgcaggtcttggggaaaagcctacactggttctgttcgttgaaagtcaatcccttggtctcgtcatttagtaatgtcctggggaaaagccaacttccagataaaaactcgcctgctcctctggttgttttccacctttcccctctctctccccctcccctgccaccttccctggctcctctccccgctccaggcgtcccgtggactctgcacacgtggctggagtctttgcggatcgccttccagcagcaccgcaggcctctcatccagtgcttgttaaaggagtttaagaccattcaggaggaggaatacacggaggagctcgttacccaaggcctgcccctgatgtttgagatcctgaaagcgagcaaggtatgtggggtttgaggttgttgtggtcatcggcagagaacaaagctggaggttcccagatctgaacggtcttttagcctgctgttcccctttgagtgggatcactacggtcatagcgaccagtggcgaatgtagcccagcagacgaaagctacctgtgcactcatttgtggg

SEQ ID NO: 71304 - DNA, 1070 bp, Homo sapiens
ccggcaagggccggacgcagctgaggctgcacctggaagtgggggcctccgcgaagctgtgggtgccatttgaatccctgcttcatgcaggttggcagctgccaagaaaaacaactccacaaacaggcccattagcctaataagcgtttgtttcacccccttgcagaaaggcttgtgccggcagagtttgaaggaggcctaggccagcccaatttaaattccattagccccgggatctcagtccactaaggagcagcgtttcaagtcagcagccccacctggaatataggagaccacgtgctagagaaatgctttataaatgttcagggcggtcattcttaaggctcttattgttatttgtttagcctttgtaaatgaaaactgctaggagaataaattgattttaataaggcccaatcccaacatttgctgacttgatattttaaatgcttatgacccatcagggtgggagaggggagggtaaacaatgctgtgttattgcacaaattctcagacgccaccaccatctctgcgacaagcagatggtcacaagagcccaaagccggtatgtgggagactcaaacacagacaggcgaggattcgtgtttatgggtagggtgtacacactgcagtctgtttgcttgctgtgtgccaagccctgggatacagcggtgggcaagaccttgttgtgccctctgactctagtgagaaacaacactgcagtggaggatgatgcacgattgcctgatgtgacctgtggtggggtggagatctgaggaggcgccccactgcagatgaccgctgactagatccagaaggagcgggcggagctcagtggacagaagaaggggagggcatcctagcagagggaacagtgtgggcaaaagcacaggactagaagagagggtgggaggttctgatgcaggcaagcggttgagtggtccgagcataaaaggcaacttttggccaggcatggtggctcacacttgtaatcccagtgctttggaaggcccaagggaggaagatcacttgagctcaagagttcaagaccagcctgggcaacatagcga

SEQ ID NO: 71305 - DNA, 1050 bp, Homo sapiens
ctggtgtgctgtgactctgaggagtgagacagggcaaggaggaaaggaggacagatgggatagagggaggctcctctgaggaagtgacatttgagtggagacctggacaacagagtgagacaccttgatatccatcttgctgataataccctgattttcacccttatttctggacataacaattttgggcattttgggttgaccgcctgctgtgatgggtatgaattgagtttgcttggtcctcccctccccctcccgctcccccgtcttcccccacagtggaatcctatctttgtccttttcctctagtgttacctttgtgcatcatttcccgtcccctacctgtgacactgctgtggaaggtgaagatgaggactgtctcaccactatagttccttattgttacctcctttccatccacctcccagcctctaacagactctttttgtgatttttagcttctgtctgctgctaagtttttccagctggaggctttgcagcgacactgtgagattatctgtgcgaaaagcatcaataccgacaactgtgtggatatttacaaccatgccaaggtaatcaatctcattctcgcgcagtgcgcacacaggagcgctgaagccggggaggcttttccttggcaaacacagaggcagggcagagagtgggtgctgggccagttctctcagggctaagccgctggcctctgccaaggtcttgcttcctgccttagaaaagatgccttccacctcccctccagaacaaggaaagtaggagcccagaagtttcaaaggcagagttctcaaacagtgcttcttagactctcatgtgcatatgactcacatcacagactccaattccacaggctgggatgggccctgtttggcttttctaacaagctcccaggtgatgtctctgctgctggtctaaggtacaccttctaaggttctagaacagtggctgtccaatccagcaacatcagggaacttgtcggaaaggtacattttcaggctgtaccccagacctactgaatcagaaacttgaggggggacc

SEQ ID NO: 71306 - DNA, 1011 bp, Homo sapiens
tccgtgaaacgacaaattcattttggagaaagctttttaaaaaacgcaaaccacaaacctctgccatttgtcagcttgaagtctacggaactgcaagcaaaataaagattggtgaaactttgcttctgactgacccctacagtcccaaatattttcttggcctttacaaagcccgcaggcatcgtcacatgcagtcctgaaaagccttttctctatacttcacacagcccagaccagcccacgtggattcctcgcccggctgcttccgcttccattttgtcccctcctatttctcattcggcgcctcagaatgacgtctgaaatgagcgccgacgctgcccaaacaggagcctgcgcatgcgctctgccctggcagcggccctgtgcagatccctgagcgtgtggcagcagtgcggtcgtggtccctccctatgcagcctggtttctagcgtgacacgcccttgacttgaggaccatgaaccgcagccgccaggtgacgtgcgtggcctgggtccgctgcggcgtggccaaagagacaccagacaaggtgaggcctggtcgctgggagacaaggggagcagcgtctttacggcactgggggtccgcccagctgggggaacgtggacccggaactcggggcgttggctggtgcgactggctggggtgagggcggctttgcccggattgtcgcgactagagctgcagttcagaaggtctggttcgcctgagcctggagagtcaagggccgcgccttctcactgttcccaccctcaagcccaaccccactcccaaattcgcacgcacatggacttagcgggccggaaaggggtgggctgctgtttttggtgggtaataccccaaaaggctttttgacaacaccactagcttcactagcacccaagtgcattttcaagcataactgggaagagagcatgaaaactccactttccactcttgtgctccgtgtctgaaggagtgaggatgaatgtggtgtagaaaaactggtgtgga

SEQ ID NO: 71307 - DNA, 1038 bp, Homo sapiens
aatgagcatgatttttgaagtttcaggtagcgagagatcttatttgtaagaatctataaaatctatattttttaatatagagtctggattgatgtttgattcttatcttgatgacattgcttggcgttacattttacatttgtttgcaaactactttttaattcaaataatttgatgatttccttacacatattgtaatgaaatctttgctctcttacaggtagagctgagtaaagaagaagtaaaacgcctcattgctgaggcaaaggagaaattgcagtaagtttaggaccagatgaaatctatatcttaaatgatgatgaccatgtggtcttgttattagaaggtagcatttgggtgattctctttttctttctgtgctcatagagaagaaggtggtggcagtgatgaagaggagacaggcagtccttcagaagatggcatgcagagtgcacgcacccaggcacgcccaagagagcccctggaggatggtgacccagaggatgacaggacgcttgatgatgatgagctggctgagtacgacttagataaatatgatgaggaaggtgacccaggttagtttatccacttctgatggtttgtaattacaagctcaatatgttggatcatgtttgtggtgttccaaagctttactcttagattttattgttcttgacatcagtaagataatctggttgaagacttgggcagacagcatgattcctaaactagtttagaagataaactctaacccactaagatacaaatctaggatctaaaaaaaaaagtactgtgtattttattgcatatatcaggtttaataatctgtaacccacttgtgagtttttgtatgcagttataatgctatggtgtgcttgaacttatatccatataccttttcctcaactgcagtcagtcttctcacaatacagtagtccccccttatccacggttttgctttcttcggtttcagttagccacagtcaactgcagtctgaaaataagtgagtaaagtacagtactttgggagagatgact

SEQ ID NO: 71308 - DNA, 5114 bp, Homo sapiens
tgcatcttttctatagatacagtccagcagaggatagttttttctattggactctgggttatgggctccaaccttgttagggacagagtgccatagaaatacagagaaacaaataacccagcctggagagatggcattcagaatcagctctttctcgtgtagcagaaattgctttctctgttgcatatcagatgtttaagacctatcagtcctgcctccttaaagtggcttcctctaacaattcagtgtatcttccttttcctgagttatcctttgttaccatcgtagatgtgccataaaagaataatttaagttcagtggaaaaagcatactgcatttcttttttcatatgccaataaggcatattagcatatcagaacacgtgcagtagagcaacctggttaattttttgaaacctgtcatttctcaattttatttgaccaggcaacccttatttattatgttgatttcagtgtttcagggtcattttatttccaggtcctcaaggctgcctctccgtatcaccttcaatcatgaatgcagggagctagctagagaatctcaagagagttctcatattttctaaaagggtctaattccctgatacagttctttcattggaagattgtgaattccaagactgtctgaaatccattccaaaggtcaaatacaaaaatggcttttaaattcctgctgctgcttacgtagtttcctttcccaactctagatgatccagagttagttataaaatagatgattgcatctaagtccaagaatggatgtcataggaaatatgtttttgtcaagatgactattttattattgtagtttgtcaatttttcttacagatgctgagactcttggtgaatctctcttgggtcttacggtctacgggagtaatgatcaagatccttacgttactctgaaagatacagtaagtatttacatcttttttctaattatgctcttaagtgttcaaaaaaccttactggctctctgcttctagtcaatgacatttttttcctctcacttaggaacaatatgaacgtgaagatttcttgattaagcccagtgataatcttatagtttgtggccgagctgaacaggaccagtgcaatttagaggtgcatggtaagtgataaatcccttattaaaagattttctaagtgatggtaaaataataagtgaaatagttaccatttcatttttaggtgccagatcctattgtatctcatttaagttggttacatagttaacttttacacaggtggccaatttcttggttattgttctgggtatgtgtagtccagtacatcactttggtatctgaattttctatggaaataaatcccctggaaatttttcataggggtgtttttttttgtttttatatataaacagggtctcactgtgttgcccaggctgtctcgaactcctgggctgacgtaatcctgatttggcctcccaaagtgctgggtgctggattacaggtgtgagccaccacacctggcctcatagaggtttttaatcttttatttaaatgtgattgcctgtttttcactcctctcctactcctgctataaaaaacctggaagtaaaattatatataaaaatacaaggctgggtgcggtgtctcacacctgtaatcccagtactttgggaggctgaggtgggaggattgctcgagcccatgagttctaggctacagtgagctgtgattctgtttgctccactgtactccagcctgggtgacaaagaccccatctctaggggagaaaaaaatgtataatcccatttccctgagttaataacttgccaccttggttttttactcaatttttttttctggctactttttctttatgtggattatactggatagacaggtttttctcatgttttttaaatagagttatttcagatatttcccctttgcaaaacattttattttcttcctaataattcaacacaaagggccacgtttcttttttggaaccaaaacatcgtgatcacctttcttacttaaggaatatttgtatcaaagccagaagcggatgctttgcagtaatcagaagtaggcatgaaaataggaatttttaaattgtatttttaaatgttgtttttgatttaatattaattgaatggcttgcctcactttggtgtttttaatgtaaaatctgttttttatatgctaaaagtagacttgcacaatgtctggcgcactctgcctacagattctccgttttgtttttcttgtcccttccactgcgctcatatcctcagacaagtccatccttgcccgatactctcctcccccagcagtcttcagatcgtcttgaaactttgaagattcgaagagattattaggctgataagtccttttgttataggaaacacagttgcacagcttgaaaaaataaaacccttaggcttaatgtttatcgccatcttctaggttgcttcatcatggcttccattgattagcttggatttctgttacctcttcagaatctttaaggctgtccgtgggaagcctatagattaggcccattttatctcatggctcattgtgatctgtttatgcatagcaggcactttaatgtgaaattattctttctaactcttgatatctttgaacttttacatatttcaaatgaaaaccatttgtttactttgcttttaagaccaattctaatttcaaaaaattgagaacctattagagttttttttgtcatcatcgatttttttatgcattcttacctgagaacttaacagtcattcctttgaactcaggatcaaagaggagctgagaaagaagttaaagctgttatatttccatttccttctcagttaggttattatagatatactttattatttgggtttggaaggaatctccaaattgcccagtatgtgtgtgcaagaataacttcaaatttatattctaaaactgatccgaatattgatctcacgtggttaagagtatattttaaagtattattaccagttgctgggcgtagtgactcatgcttgtaatcccagcaatttgggaggccaaggcgggcggatcacgagttcaggagatcgagaccatcctggctaacacggtaaaacccagtctctactaaaaatacaaaaaaaaaaaaaaaaatcagccaggcgtggtggcgggcgcctgtagtcccagctactcgggaggctgaggcaggagaatggcgtgaacctgggaggcagggcttgcagtgggctgagatcgtgtcactgcactccagcctgggcgacagagcaagactccatctcaaaaaaaaaaaagttattaccaattttatgtaaaatgtaagctgagtatatcgaacatggttgaggtttttgtagaaccacagtctaataattttgaacatgaattctcatcacagggatgtgatagagcattacacaaatctgctaatcccaggatctattccagaagcagcaatctgaggaattaaaaataaaatccttaatttattatatatttacctccttcttaatacaaagcatatggggaggggttctgactagtgggttctgttttatcagtgtttcactgtgtaatttttaaaagacttcttactcattgattttacaatgtttttgctgcttaacattacagctgtgaatattaaggagctgttgccatattccaaaagtatgtcctcaggagctttgtttacattgttcatcttcataaaccttttttaaaaatattaagagtaatttttgataagcatttagatttccaaatatgaattatttctctcccatgctatttttggtttgttctttttgacttataatcagctagaccattaaaagataaaataataactacttcttgtagttatgaacattatgaacttatgaacatttgttttctatgaatgacctagaagacaggaccatttatctgacaaggatgcaggtggactatcagatgtcagtgttcattttctcctgtggggtatgccacaagatggcactgtattagacatgcagaatttttgcctagtcatgatattggaatctttttttttttttttttttttgagatagagtctcactatgtcgcccaggctggagtgcagtggtgcgatctcagctcactgcaacctccacctcccaggttcaagctattctcctgcctcagcctccctagtagctgggactacaggcacgtaccaccacacccagctaatttttgtattttgagtagagacgaggtttcattgtgttggccaggctggtctcgaactcctgacctcaagtgatccgcccaccttggcctcccaaagtattgggattacaggcacgagccactgcgcccagcctggaatctctttataatatcagatgtctcactttaaagcacatggctcacgtacatttaatagaatttgtttttttgagcgggatgtgatttttgatgactcattctgatacattaaagtctcttttcccaatcttttcagtttataatcaagaagaagactctttttatgtacaccatgatatactcttgtctgcatatcctctgagtgtggaatggctgaattttgatcctagcccagatgattctactggtaattagaaaacttaaggttgttcaatgatttccagtcttatgtattttctcctagctccataaattatgtattctcttgaatgttttcagaattgttgctgatattttctgaagttactgttattttatgaagttatagagttcttaacacaccatcactttattgtttggggttcataaatccccagacttcaggtaggctaaggaggtagctgctctactacaggctgaaggacagggcctgaagccttttggactgtagaactgtaaaggtcccataaagactcagtataaatggcctgatatgtgagatgttaccagctagagttcagtggcataacctgttttagaaaacataagctaaaaccgaaatgaagaggcttgtcacaagtaattaggttttcatgttagtctttgtaaccacatctgcacactattagttgcccctgtccgtactttttaataaaggtaaacactgtttatactgtcttac

SEQ ID NO: 71309 - DNA, 1531 bp, Homo sapiens
cagcaatttaacaaatacatatcttaaaattgaaagatctttggggaaagctggaaagaaatatagcatggtctcaacaaacagccctctcccccacagttaccagtgtgaataaatccaccgtttgctcaactataaaattctacaaaatccaactttccggaaggggccactcctctcccttcaggggatcctggctgcttatttattactttgaggtagtctggtgcgttctacaaacacagagataatatatatatctccccactgtatgattcctgcatcctccctcccatgcaaaacaaggatcctgagatttttctctgggttattctgatgtgtgtgagtcctaagtccgaaaagttctgtgccggttatgatcagagaaaagtgaaagaaaaaaataggaagcaatcagaagtagaataaggccaggagagggtcacttataaggaatgggacatttgttaccaaggcggatcagataaatccaagacatggcaaagaaagtaaagtacaaaaataaattggaccatttaaaaaaataattcacttcattcagaacattaacttggacttctgagttggttactcactttaccatttataaagtactaagtgcacaattctgcattttagtgtctttttatattctgacttaatttcctgatctgttagtttcttacctgtttatttgtattttagtaaatgaagcatttggaagacgagagaggcttgttcttgggagtgcaagaaattcatctattagtggcccttttggcagcaggagctcagatacacccatggagtcttaatgaagatcatctaatttcctgcttaccttaactgggaattttaaaaagttggcctaaaaatgttccatgcgtggcagcaaccatgcagagtgactgaaacacaattcatttctgactgacattcctttctgcaactgcggtggcaccacaaatatccggtctttgtgcttgctcttcagatggatggtttgtaaggctcttgttgcatttcttaaaaaagagtaataaaaaggatttttaaaaagtaattccttaaacataccatctgtcacagttaatctagatttgtaaataggtagtaatttatagaatttttaaagcgtaaaatccggtaatattaaaagataggtaaacctaggcctggaaaggctgttatttggctaaaattgcacaggaggccatgaacagaggcaagtgccccagagactccactttcattcctaactgttctcaaattaatgctcatgattgagtattctcagtgcaactcgtagagtttgataagtaaaagttacatgcccctgttttcctagcatgatattcactgttatcaaagacaagaggcagaccattcattcattctcaaaacactgaatgccattctgtgcctagtgctatacaaggcatgggagattcagtgtgaataagtctttgctctccacctaacaagggacagttttaattatagattgtcttcctattaagtatgagtttta

SEQ ID NO: 71310 - DNA, 1011 bp, Homo sapiens
agaccaaacacattgatcaacttcctgattattaagtgcattttcccaggcaccttccaactatggtggggagacctggaaagcagaacatcctaataattggaagtgacagcctccaaggaatctcagttaaaccacgaaggtttctttctctgacatcaaatctcaactccacctacaatccctctacaaagcctttactaccgcattttctaattgttgcaaaaattccattctgatgggccaacacaacttacctgtatgtatcttgaggtgggtccgcaggttgctgggatcactaaaagccttgctacagaaatcacacttgtggggcttcatacccatgtgacccataaagtggacatgaagtttggaaggagagataaaagcttgggggcacattgagcacttccacttcctttctttgctgtgacttggcccatggctgccgctatgtccctgggtaggaagatggttatggatgtggctggtcagatgggctttgaactctgtgtaagaattgcactccttgccacagttacagagatgcacatctgggtgttcaggaacaccttttaaaaaaaaattactcattatctcccaatacttgaatcttaaaacttgttcttgatattaacaatcattgcttccagttctcctttctctccatatttccaatttgcccacttcctataaaactaaaataatgtactaagggcatctaaaataatgtactatgggccaggcacagtggctcaggcctgcaatcttagtgctttgagagcccaaagtggcatgatcatttgaggccaggagtttaagatcagcctgggcaacacagcaagaccccatctccataaaaaaaaaaaacttaaaaatcattggctgggcatggtgatgtacacccatagtcctagctaatcaggagactgaggcaggaaactgcttgagcccaggagttgaaggttatagttggctatgactgcaccactacactccagcctgccagag

SEQ ID NO: 71311 - DNA, 1092 bp, Homo sapiens
aacagactgtagtgtttttgactacaaaaggtcatcagctaatatgttgaagtaagaattctgtttctctacaactgccttctcatagataggacgggaaattacaaaaacattccagaggaaatagtaaatagttctgcctaagctttcatataggattttgcaatgggggaatgttgtacttagtatgcatttcaaaattaatgtgcttgatctattaaatgtgataactcaggaaccgggaagagcagaatttggtggcttatcctcatgatggaaaaatctttttctgcacctcacaagatatccctcctgaaaatgaactgcttttttattatagccgagattatgctcaacagattggtaagttaatatgtgtttataatgaatctggcttagtaaaaataccaaagaccaggattaaagttttggtaatgatttacatgttagctgaagcaaatcatatacctttgtttgtataaatgcaaactattacttgtatttgaggtgttaaaatctgtgagattcttcacaagctgaatgttattgaccaagcaataattcatatgatacggtcttttatggtaggactttggtttggggcattgaagttccttaggctacttttcgagctagcaccattgagatataaattcatgaaggacagcgaagtccctcggtttgatttaacctgcatatgctttctctttgctgtgctgtttcatgatgacagctaatgtttaagagtttgggtatgctataaaacctaaatattttgcttacaaaagaggccttataatccagtatttaccaagtgctttctttgtgcctggtacactattttattttacttatgtatgtgtgtatttagagataaggtctcactctggcaggctggagtgtagtggtgcagtcatagccaactataaccttcaactcctgggctcaagcagtttcctgcctcagtctcctgattagctaggactatgggtgtacatcaccatgcccagccaatgatttttaagttttttttttttatggagatggggtcttgctgtgttgcccaggctgatcttaaactcctggcctcaa

SEQ ID NO: 71312 - DNA, 1055 bp, Homo sapiens
ctctgttttgtgagttaatccaattattttaaccatttaatgcatttgaattacttgtgactgctgaggccacagactttgtttgtatgataaaagtcttactttgtaattaaaacattcctcaaatgtttatcttaggaaataattctggaataagaagctaagattatttttctagttttctttttttttcttccttgagatggagtcttgctctgttgcccaggctggagtgtaatggtacaatcttagcttactgccacctctacctcctgggctcaggtgactctcccacctcagcctcccaagtagctgaatttacaggcacttgccatcatgcccagctaatttttgtatttttgtagagacggggtttccccatgttggccagactggtcttaaactcctgacctcaagtgatctgcccacctcagcctcccaaagtgccgggattacaggtgtgagccaccgcacctggcctatttttctagttttctaatgaggggttagaaatacaacattttcacatagatatctattgggaatgatgcttgcgaaattgaagtaaggagaaaatgggtcttgtgatctttggaaaggtaaggtaccactgtcattgggaactttaaatttggaatgctaggcccaagtgggaaaatcatgacaagggatgatcctctgcccttaatggacattcagtcattcagtgcctactgtgtgataggtgatgaagacaggtggacaggtagactggttttttgtcttttccaggcaaaggttgaataatcaaaaacaaagtcagtctcttcactgagcactaactgtaggtctctgatggtctttatgtattgctggaaatagggagaatgttgaaatgatagcatgttggagaagtaggaatatattttcccactaagaaagctgggacctactgcaaatgagtaaatgaggtgattgctggcctaagtgtaatgtagtgctttattgcatgtcagtgcatttgacatgtgtgcttgctttctgttggcagatataccacaatggtgtcctagaat

SEQ ID NO: 71313 - DNA, 1075 bp, Homo sapiens
cctatccctcggactgtcccgaacatggaccagtgacttttgttcctgacactccaatagagagcagagcaaggctttctctcccaaagcagcttgttctccgtcagtcaattgtgggagcagaagttggtaagaaccttggaactgtaaaacactattacatctcttcttcctttgtagcgtagagttgtaaaagtggatgtgtataatttagtaattatttggaccaaaagtcaatttatggcttaagatttatgcttttatggaatattagtcttgtccactgatgatagcaataaatcaagtcaaaaactttattgggaaatctctcctttgttagaatcagtattgagtaaagcaaaaaatcctagactgagtctttgaagatttaacttttattctcatctgtctcatccactaacaattattctaacaacacatttcttaaaacttagtttcttttatagaaacatggaaaattcaccttatgacacaactttagatcaaatgtttgtaaattatataatgctccttagataaaaggaataaagaatgtagattgccagactttacttacccatatttgaatttagcatggcttctgagttactgcgacatttctttggaaatataaaattaggttcattattcttttagctgcagtttgggtgtgagtcatttcaaagcatcaaacagtttaggtaaaatagagcagtgctttaagcacaaaagattttagaagtctgatttatttctatagtaattgctttatatttttacaatagaataatgttttctgttattttttatttatttatttttaagagactgggtctcactctgttgcccaggctggagtgcactggcctaacatacggagtacagtaactcgagtgcagccttgacctcctgggctcaagcaatcatcctgccgcaaccttccaagtagctgggactacaggcatatgcaatcatgcccagctaattaaaaaaaaaattttttttgtagagacagcatctcactatgttgccgaggctggtttcgaactcctggcctcaagcagtcctgccttgg

SEQ ID NO: 71314 - DNA, 1059 bp, Homo sapiens
acagtatgtgtacatacctttaaggagcttacagtctggtaggaagcataggagactgttacaatataggataataataagtgtgacgatggggtgaagtgcattggtactaaagtagcctgaaggggagcaactagccaggccatggaagggtcggggaagatttaaccaagggaagtaacatacatgttagcacagaccttaaggacaagaaagatgtgggcagttgagagtcaggaagacaggagctggcacctgtaagtgcctagaaccaaaagaatcatgagtgtttcagaattgctgaagcataaaatgagggtgaagagaggggtcatgtggtgagaggagaagtaggagccagaacacaaaggctcttttaagaccggtcaagagttttagggagtgagggttggggtagggctttgctgcaatgtgagaataaatttgttaagaggcaaggaggtgtggaagatatcataatttatgggaaaggtgatgattctcaccaatctagagtagaggtaattaggatgcagaagagtggaggacatttgcagagaacccagttgagcttatcgattggataaagttggaggagggaagcattaaggagaaaaccctggtttctggcttctgaaactaggtagatagaaactaggtaagtagagaaggccatgtgttggctcacacctgtaatcccagcactttgggaggctgaggcagaaagatcatttgagaccaggagttcaagatcagcctgggcagcatagtgaaaccctgtctcaggaaaaaaaaaaaaaaaaaagcaaacagaaactaagtaggtagggtagtagtgaaaggcagaggaggatatgattttgatttttattattttgggaggagtgacgatgagtcaagttttagacatgttgatttcagtgtctgtaagacacccagtagagatgtctaatgaaaagttgtgtgtggacctgagagagatctgtctggaaatatttaagaatcatcaacattaagatgttatttgtggctgtagaagtggaatgaaatcatctagta

SEQ ID NO: 71315 - DNA, 2632 bp, Homo sapiens
gttataggagtattatatgcttattgcggaaaatttagcaaataagggaaggaaccactcagtcccatcatccatctttttggtgtacttccttcctgccatttgttttggtgtataggtttttaccaattttcataattaagaccacggtttcttctcttgctctcttttttcttttcttttttttttttttcttttaatggagacggagtctcaactattttgcccaggctggactggaactcctggactccagtgattctctcacctcagactcttgagtagcttggaatacaggcacatgcctgccttgagaccataccatatttcatttcttttttataaataacttttttaaaaaaagagatggggttttggcatgttgccgaggctggtctcgaactcctgcgctgaagccatccgcccacgtcagcatcccaaagtgccgggattacaggcatgagccactgtgccctgcccaagaccatactttctatacgattgtctgtctttacttttttcactttatctttttctctgctgttacatgggtattttcctttgctgctacgtggttttcataattatcctttttaatgatgcattactttctactgaatgggtatttgatggtttattatctttattgttggacagtttggtttttccagtttttattaccattgtaactaatgctcttatgaacgtctttatgtataatatttacaaaatggatttagagaagagtaccttaagtggaatttcttgtgcaagagggtattaacatttttgaggctcctaatatatatgcttcacaaagaagttttagcagtttacattccctctggcagtttagtaagtatcatttcaccatatcctcccaagcacaagtgttaatttttttttgttttaataaaacaggtacaattgtgacttgtattaaatagtttgtgttatgatagtttaattatattaaattatatttaattaagttttatttttcacatggaagatctgtttttaaatcattttaccttttaataattaggagagcaaattttacaccttaggactcaggaattgcaaccatatgtatattaaaagcagtgttttcgttagtgattcccagttagcttcaaaggaacatagttaacttttttaggattttcgagttttacaggaaaaactcaattacggtatatgtatgttgctatttataaaatagtgtgtatcgattaaattaaagaagcaggagattatttgaacttagttatgtttgtaaggaaatagcgtctagtgcttggaattctttaataatgtactaaaagtctctgatatctcatcttttccttttctcaggcattttatcttatttagctgacagaccacctccacagtacatccaccctaactctataaatgttgatggtaatacagcattatctatcaccaataacccttcagcactagatccctatcagtccaatggaaatgttggattagaaccaggcattgtttcaatagactctcgctctgtgaacacacatggtgcccaaagtcttcatcccagtgatggccatgaggtggccttggacacagcaatcactatggagaacgtttctagggttaccagcccaatttcgacagatggaatggcagaggagcttacgatggacggtgttgcaggcgagcattcccaaatcccaaatggctccagaagtcatgaacctctgtctgtggattctgtgagcaacaaccttgcagcagacgctgtaggacatggtggtgtgatacccatgcatgggaatggcctggagctccctgtggtcatggagacagaccacattgcaagtcgggtcaatggcatgtctgacagtgccctcagtgactccattcacactgtggccatgagcaccaactctgtaagcgtggcactctctacctcacacaaccttgcctccctagaatctgtttccctccatgaagttggcctcagcctagaacctgtggctgtctcctccatcacccaggaggttgctatggggacaggtcatgtagatgtatcttcagacagtctttcttttgtatcaccttcactgcaaatggaagactccaattcaaacaaggagaacatggcaaccttgtttacaatttgtgagtgtgtttagcctttcttttttggaaatatttgtaaaaagggccaccatccctaacaagttaagtcgtaaagtttggcattaagggagtatagaaagcaactagaccttggaacttttctttgccttggtattgtcctttatattaatgtggtgccttttcttcaagtaagccaaatgatatacatacatttagttggttcttagagcatcctcctgaagaaatgaaatgtgaagtagtcatttttgtattttgcagataagcttagcacatgcggtagtgtgtgcctgtagtcccagctattctggaggcagaggcaggaggttgcttgagcccaggagtttcaggctatagtgttctgtgatcccacctgtgaatagtcccagctattctggaggctgaggaagagggttgcttgagcccgggagtttcaggctatagtatgctgcgatcacacctgtgaatagtactgcac

SEQ ID NO: 71316 - DNA, 1353 bp, Homo sapiens
gtccccactcccccaggttgggcagcccccttcccgaagcttctggacggaaggccccaggtgttccccgagatgccccaacccgtggcggggtgcacggccaccggccctcgggagaagttgggcggccccgggcgaccccggggacgagtggccgcgtcggtgcagcggttgtgagcaagatgtggtagcacgtgaccctggaacgcaaaccctgatgcctgttccccaccacccgagcgctcctttctctgatatttggccccaagccgatgcatcacaggtgagtagggaggtgggcttcagcactggtgacatcgttggaaactctggcgagtgagtgtccagggtcagtgccgttgtttttggtgccattgagaaggttacaggtgtgatttgcaaaggaaacaaatccagaaactagtgttgggtggaatgtaatctcatgcatcctaatttactccacatgtggaaagttgttcccagtagccacacgtttattgttggcttgttgacaccttttcctgtgtctttcagttatttgagcgtttaatatatttttccggattccaacgtgtattgttatcttattatgcttcaccttgagttttgctggtatggcagggacgatagtgagggaattaagttcttaattctgcaagcttcatgctgatgtttaagtacagaagcaggccacagaaattgttgcatttggctgttttttcaaggccctttcaaaggccgtatgtttagaataaggaagataaggcacaaattcattgaaattattgaagccccactgcatttttcaaagtggctgcatttcagttagtttattatattttatgcgaagaaaaaggtgtaaaatcagcaactggcagatggttgcataggtcagttagaaacacacacataaactgtagaactgtgtaggaaattattttaccctaaatgagtagggaagatagagcttagtatcttgattcttgccttcttccgggattgcttcttagaatctcataggagaaagaaaatgagaatagaactgcattttagaatgagaaagtcttatgaggatcatattgtacattcccttcatctgccttctctctgtgggatactcattacctttggtttatggctgctgaggtcatcacgttttagtgactcacaacaaagcagaaatctgctgagcctctcgcattaaactctggtttgaactggtttgagaaggcctaggagtcaacctagaaacaccatgctgatttttatcttgaaattaaataaatattcaggaattttcagaatgagagttgaaggtgcagacttgtagttgtacttttaaaaaaatat

SEQ ID NO: 71317 - DNA, 1102 bp, Homo sapiens
agtagatttcttttttatttttaaagtcacagtgccacttcagtttatccaaaacttagatggagagctacacgttggggggcggggggtatgcagagaaaaggaaaatgaagaaaacagtggacaaaacaattgagaggaaaaacaagttttcatacaaatctgggctctcttccaaagagatcattaattctaagatattttactatctgctcaatgctacaaagcttccacgtggccactggatgaaacagtgtgtaccaagccacggattccctggcaccatcattcacacagtcaacaacagcacatgctggcaaattcgttctcaagtaccagcttacagtctccttcacccaaagcaggaggtcaacaattactttccattacattttgaatacaattcccgaaggaaggaatgcaagaaaatgttcctctcatttttaaggactgtttttggctgtttggggttgtttctgttttggtggcggtaaagttcttctttggttaaggtttaatgtttatgtataccatttacccacaccacggaaggtgggaaattccagttgttctcgccctttgagtttttagaataatcgtatttacaatgaggtgctcagaatctgaaacagtttgcattttagaagtataggaaaagagtctccttaataagcacctataagttgcaggcacgtaaccaataagggcaggggagaaattcccaaatgtcaaaacaactcccccatcccccaaaccccagcacccatttctttttcttaagatttaggcctggagaagatgccagattaagaatgcaaaccaccttcgaagaggaccttaggttgagcgcccggctgcgcgctgtgcggcgggcgcgggggtcctggccagttcgggcgctcgctagctgcccccctcctcgggctcgctgctgggcgaaggcgccgaagaggccttggactccccgtcgctgttgcattccgccctgcgctgggggacggcgccggccgcgccctcgagcccccaggcctggcgctccagcagctcctgcaggtgcttgatgtagtcgatggcagcgcggagcgtctccactttgctgagg

SEQ ID NO: 71318 - DNA, 1016 bp, Homo sapiens
cataccaaagagacttctccatatactttagcatttaaaggtcctgagaagtcctgcattaaggaatcctttcacttctgtttaacctacagttaccttgtaacacctaccaatatattcccctgtaatttaccaacacttcagggaatgctaacctagacccacgcattaaagacctttgggtcagagaagttttacagcttggagaaaaagcctttttctctcccacctccacagcccctccctctttttcacttccctccctctgtcatgagtgggcagggccaagcattgttcaccagcttctgcatctggttcagctaagtagaataaactggcaacattaaagcaaaaaagtcatgctgcaggcattttcaaattacctagtctctctggagaaaccaactgggggtgaggcccagaaattggggaaatgtaatgcataataataaccattaaaaaaacagaggaaaatgatttgtaggattattgagtgccagaaccccaaagctataaacaggatgtttgaaacgatttcaagcataaaggtcacaatctgcaatttaaatgtcggtagtttgttgccttttttcttggttatggttgggtgccaccaattagttcaagcgtgtgtgcgtgtgtgtgtgtgtgtgtgtgtgtgtgtgtgtataaaggtttttcagagtacactgggcttctcagtcaggctgagttggttggcagcctggaaacccacacaggagtgggcaaatcctttacagcatgaaagcaaggaggacccttctgctacacagtgaaagtcttcttcctctttctgcaaaaataaaaatataacacaacacaaacactttactcccttcagcagtctgcagttattttaccctgaaaaaaatgaatcattgaaaaatcctggggtgggattgccaccaaacctcaacctagtctggtggtcttattaatgccaatcctatattctgacttggccaatgccttgagagggtatttattagggtgaa

SEQ ID NO: 71319 - DNA, 1025 bp, Homo sapiens
ttgctttcatggtagagtaaggtgtgtgtgtggacacgtgtgtgaatgtgtgcatatgtgtgcattctcatgcaggtgtgggctcatgtgcttgtgtgagcataacttacatgagaaccataagtgtgtgcactcatgagatagtgtcagtgtgagtgtgtacttggtgtctgatggatttatgagtgtgagcgtgcatgtctatggatttgtgagtgtgcgtgtgcatgcctgcaagagaattggtgcatttgtgaatcggtgcaagggtgggtatgtatatacacttgtgaatgttacgcagttgtatatatgtgagtcatgtgtgtctgggctaagcaggtgtatgcctgcacagatccacgtgtgtgctctaggggatctgtgcagaaatatccgtgtttaagaagctatactctctgcctggtgcatgttttcatagctgtgtgtgttatttgcatgtgtatgtgggcatttctcagtgcctgcatacatgtgcatacagccatgtgagtgtgagtttgtgctatgcacttacaggcattatgtatctgcatgttttttaatgtacctttgtgtgtgcctctatgtgcatatgtgtgtgtagcattgcacacctgattgtctctgtatgtgtgtgcatctgtttgttctggtgtaatctctgtgaatgtctctgtgtaaacgtgtgtttctgaacgtgtgtatccgtgaatgttagcatgtgcatttgattgtgtctgtgtatacatgtgtgtttctgtgggtgtgtgactgtgtgtattgcagtgtgaactttttgtggatctctcgacatatacacaggtgtttctgagtgtatgtgcctctgtgtagcattgcacacttgagcgtatctctgtgtgtatgtgtgtgtttgtgagtgtcagtatctgggtgtgtcagttgcagcgtacatttgagtgtgtctgtgtgcacgtgagtgtctctgaaggtgtatttctgtgtgttccagtgtaacttttgtctcacgtatgagtgaattt

SEQ ID NO: 71320 - DNA, 1309 bp, Homo sapiens
gctctatgcagcccctgagcatcacactgtagcaatgagttgcctgattggatcaaaccaaaaggccaaaccagattccatatgggacataaaactgcagcaagcacgtggctaatggccagtagctttctctgggctggaaggtcttctctctgattcaggagactttaaagaccagcttgctgtgtgaggcctcccttctctctggtgggattggcaattgtacatgagattccttcaggaatggtttgatccagacgatcatccaggacttggcaatgagctagccatagaggagaggggaagacccagctccaaggagtgcatgttgcctctggggaggcagtggtgccactaaaatccctctggagccacacagccctaggttgaaattccagctctgccacttatgacctgcgtcaccttgggcaagtcgctggacctatctgagcctcagtttctcatttgtataatggggagaatagcactcgccttctagagtcatggtgaacattagaaattatgcatttcaaatacaaaagaaaaaattagctgggcgtggtggcaggtgcctgtaatcccagctacttgggaggctgaggcaggagaatctcttgaacctgggaagcagaggttgcagtgagctgaggtcactccattgcattccagcctgggtgacagagaaagactccatctcaaaaaaacaaaaaaaaaaaaaaaaagaaaaagaaaagaaaagaaaagaaatcatgtatttcaaggttctggaagcccaacaagtaaaattgggattgattttgcttgaaattaagacagaccccaagattttacaagctaaaaaataagattgtcattttcctgatggcaggggtcatatcatcttcatggatgtattcacagcacctgacatacaataggtactcaataaatatttgttaactgaagatataaaaacatgccgccccccgcagtggagaatatttggctcccactgattagaatagaggtcttttcagccaaggagggagaaattttcctcagagatgatgcatttgtgcagtttgtgcaggatactctcgctgtggatagatcccttggctcaggccaggcccgtgggacaaaccttggcttgccaaatggctgtcactcaatgaatgtttgttgaatgaatggatgagctgtagtttgaatgtcgggggagggagaagtaaataggaaccagaagaaattttaaggtagtttttatttttatgttttactaagcaagagccagaggaacagaaagctcagtccacttgctctaggccac

SEQ ID NO: 71321 - DNA, 1014 bp, Homo sapiens
aaacgaagtgaaatgaggacctagaccttgagatagctaagtccagggcactttccaaaggaaaaatatatgttttaaggcagcttgtagagatagcaacatgttgtcaaatgttaagccttttagagctgtcttaatgcaagaaataggaagctctgtttggtgcttagggagtggccttggcttgggttcctggatgcccagctgtcaccaggtgacctcaagggcttggctgcagcccacagaaggcttcactcctctctattggtctccgctgccctgattagaccaggttctgccaagacaaatgactttcactctctcatttctgcccaaaggaaggacttgacattaaaaggtcaacaaggtcacataaccagagacacattggtgaggcttcctcctgtaacccttgcagctttgtccccagccacctttgacgttttcctttccccaaagccaagtacatcggctgctacctggatgacacccagagtcgggcccttcgaggagtgtccttttttgactacaaaaagatgaccatcttccgttgccaggacaactgtgctgaacggtagggtcccagcatcccagacttgtccatttcaggcccttccttctcagattcccacctgtggtattctttgccctgctatgggagggtgtgttgaagggtgagcacgtgaccacaggaaaggttgacgcaagggtgtgtgtgcattgtgtgtatgtgcataagcacatccacacaactgaggactgctcaagagttggtctatgggagtctgtggttgtgcaactgtgtcatattgtgtctaggaacaattttgtagcatacagggtacagggtcagctagctgtgtttgtgagcttaatgccaatatgcaatgatctttaaataatagtggccgtgtatgcaggagtctttgtgaatatgtgtgcaagggctgagagttgtgcttgtgtgtgtaggtgtctgattgcatttgttgaatgttcaacagtgtgttgaga

SEQ ID NO: 71322 - DNA, 1145 bp, Homo sapiens
ggctgggcgcggtggctcacgcctgtaatcccagcacttcgggaggcagaggcaggtggatcacgaggtcagattgagaccatcctggctaacacggtgaaaccctgtctctactaaaaatacaaaaaattagccaggtgtggtgctgggcacctgtagtcccagctacttgggaggctgaggcaggagaacagcgtgaacccgggaagcagaggttgcagtgagccgagatcacaccactgcactccagcctgggcaacagagtgagactttgtctcaaaacaaaacaaaacaaaaacaaaaaaccacacacacagatttctggagccccactcccagaatttctgattcagtgggttttagcatttccaacaagctcccaagggatgctgatgccactgattcaggaccttaaagcaagggtctcaaactcaagtgtctccaggggccagatggtgaatgcaaaggggaagaatgggctgagtggagactgggggttctgttctttaaggaagtctctctaccagagcccttgcatgcctgggtcaggccttggagggggcacttggagaagatcccttctcccatctcagactcatatgggaccccaggcccccaatatgagatgagtgtggtggatccccttatcccatactccctgcagcctctccgttcagcctgttctgactctttccttagtattggtttagagctcccagctgttttgaataaggaaaaagagtggggcctgtcggtgttggggagggagagcatcaggaagaatagctaatgcatgctgggcttaatatctaggggatgggttgatctgtgcagcaaaccaccacggcacacgtttacctatgtaactaaactgcacatcctgcaaacgtaactcagaacttaaaataaaagttgaaaaaaaatatactgatgtccaggctccacccagtaatagtccagggtgcagcctgggcactggggttttcccactctcctctagggaccgtaaggagcagccagcacagaggcccaccgaggtcactgatctcccaggtcttttccagctttgacaagcagagtctgtgctcttaggacaggctactaccatttgcacatatggatatctcagcctggtgaccagtttt

SEQ ID NO: 71323 - DNA, 1009 bp, Homo sapiens
gaggactcagtcacttgagacagagtctggagctggactccttgaactgtgtttctgagctgcagacaccaaatacctcctggatacaggtgcctggcatggcttttctcatctaatactgacacgtccctgtggccacagagtgtcatagccccatttacaaatgacatagctgaggcccagatggggaaagtaacttgcccagcatcacacagctaatcagtggcagagttaagatctgaacctggctccgtctggctccagaaactctgttcttctatttggaatttatctgtggagattattctagtatattgatagcctacatttatttagcactttttatattatgcactttacatatgttttctcatttaatcattacagcaaccctgagttaggtatggttataacttcccttttacataggaggaatctgaggcttagagaggttaagtaacttgcccaaaggtacccagctagtctctgccggagcttggatttgaacttcagtttgcctggctcaaatgaggctgcagagttgggaaggacttaaaaagtttggagatttttgccataaatattgatttttctgcaaatgaggatgaacatcttaatggcctttaagaaactttgcaaatagttttcaaaaatgatgcaacatggcagagaaaatgcacttggcttccagctccctcaacagccattaacagcctcctaccgtggctcccacctcctatgtctccagagatcaaggcaatggggagggaaagctggcaggaggcagtcccttgtgggcctgaggccctttggctcctaagtgtccacattctgttctcttccaagtcccttcattgttaagctgattctccaacaagatgcaatgaacagatgcaatgtctaccccgcgctgggcgagttcccgaggccatgggctgtttggaatcacacttcattaagagacaaactgttccttcccttattgtgccttaatgcttatgacaaggca

SEQ ID NO: 71324 - DNA, 2354 bp, Homo sapiens
gcattattgcaatgttcccattatttgagggactttttgatgaacaattgtctcccccactaggctctagaggaagacagggccccaagcagacagaaaacatggttgtcaaaaggatagactctgaagcttggattcaaatcacaggtctgccttttcctagctgtaggacttcaggcaaatgacataagctctctgtgactcagtttcctcatttgtaagttgaggctcataacctacctacctcattgagttactgtgaagattaagagagtgtagaatgcaatagtgcctggcatgtaggaggtaccagagaggcatttgttcaataaataaaatagcaaagaaggaaatggttaaatcacaaaactggacttgctcagagtcagggggaacattgttggtcttgctggtattggtcaacctcttaaagccaactctagggttcctctaatggtccctgtcttctcttgcagagaatggaggatgaagattacaacacttccatcagttacggtgatgaataccctgattatttagactccattgtggttttggaggacttatcccccttggaagccagggtgaccaggatcttcctggtggtggtctacagcatcgtctgcttcctcgggattctgggcaatggtctggtgatcatcattgccaccttcaagatgaagaagacagtgaacatggtctggttcctcaacctggcagtggcagatttcctgttcaacgtcttcctcccaatccatatcacctatgccgccatggactaccactgggttttcgggacagccatgtgcaagatcagcaacttccttctcatccacaacatgttcaccagcgtcttcctgctgaccatcatcagctctgaccgctgcatctctgtgctcctccctgtctggtcccagaaccaccgcagcgttcgcctggcttacatggcctgcatggtcatctgggtcctggctttcttcttgagttccccatctctcgtcttccgggacacagccaacctgcatgggaaaatatcctgcttcaacaacttcagcctgtccacacctgggtcttcctcgtggcccactcactcccaaatggaccctgtggggtatagccggcacatggtggtgactgtcacccgcttcctctgtggcttcctggtcccagtcctcatcatcacagcttgctacctcaccatcgtgtgcaaactgcagcgcaaccgcctggccaagaccaagaagcccttcaagattattgtgaccatcatcattaccttcttcctctgctggtgcccctaccacacactcaacctcctagagctccaccacactgccatgcctggctctgtcttcagcctgggtttgcccctggccactgcccttgccattgccaacagctgcatgaaccccattctgtatgttttcatgggtcaggacttcaagaagttcaaggtggccctcttctctcgcctggtcaatgctctaagtgaagatacaggccactcttcctaccccagccatagaagctttaccaagatgtcatcaatgaatgagaggacttctatgaatgagagggagaccggcatgctttgatcctcactgtggaacccctcaatggactctctcaacccagggacacccaaggatatgtcttctgaagatcaaggcaagaacctctttagcatccaccaattttcactgcattttgcatgggatgaacagtgttttatgctgggaatctagggcctggaacccctttcttctagtggacagaacatgctgtgttccatacagccttggactagcaatttatgcttcttgggaggccagccttgactgactcaaagcaaaaaaggaagaattctcaaaagcattgccatgaactgggattggcatagggcggtgggattaagctgcctattgtgtgtgccccagaaatgacactctccaaggtccattcctggtgtgagcagtgagggggtcagagcaaacccagtgtgatgcagatcacacttggcccttgtatatatattatcagtagctggccagaaaaccctaccttcaagtcactgctctgtgttaaagtatgtggaaatgcataggtgatctgggagaggaaggtgacatatcagcccatgaactccataggccatgaatttggctttcggatcagctaggaagacagagaactggtcctgagaggtcctgtgggctctttgcaagggcaagacaagtgagggatgcaacgaggacttgagatttggcaaagaaatgagaaaggagaaaagaacctttaaaggatgcaggcatggagcagctcaccctagaacatcgcaggctgatggtgcttta

SEQ ID NO: 71325 - DNA, 1095 bp, Homo sapiens
caaggagaactcactgtctctaggctgaggggcaagagggagcagtggttcttggtgcctggagagtatagctgtggccaagtcgacccatggagaccctacagggaaggagctggagggtaaacacccaaccttgctgtcctccagccctgcaatccctgcttaacactgtcatcgatcaaccaaccaggcaggtgtgaggcaagctacttgctcccctgcctcagcttcagacatccccgttggtaaagtgggactgataccagtgaccttgcagggttagggggaggctgcagagagaaaaggtgtgctctcacccacggtgtgctgcatcccagcagccacaccagctctggggcgcagaaggctccacatgtccttggaggatggatgaataaatgaatgatccccgcctccaaaggcttctcctgtaaccgagattggaggcatttcacattcaggctattaaccagaggcagagggacctgggggagaaaattgcaggggacccggagccctgccttgctccgtctgtaaaatgcacaccctgaatcttgccagattgattttctgggggcccttgggaggttccactggggcaaaagccagagttttgtggaatgttccaaggaggcgaagcagtggacagagagtgagcttgtcaattcagcagggtttgggcttgaagcctgtctctgagcattccttcagaatggctaattggacctaccttacttacctgagctctctgtgtgaccttgggcacgttagttaccttctctgtgcctgttttctcattagtagcagtgcttacaacagtggctggactgtagtgaggactgtacgtgtatttgtttaataaaacttaagccaataatgtccattggaggcttttgttctgcatggcaggagaagccagatgtgaccttgaggccctgtccctttcccagcaagggtccggcagcgggggtgtgggcaggacacaactgtctgcctggtgaccatcccacccccagcaggggctgggctcgacgaggaaggactagggcccaggactctttgcacagcctctcctggctgggctgacgttgttac

SEQ ID NO: 71326 - DNA, 1050 bp, Homo sapiens
tgaaacagaggtggaagactccaggctgccactaaatctcactcttgttgctgaagggcctctaagaatctttgtagctccatggggcaggcaggaaactgcaactcctctactccaaggagttaagagaccaaagttctagacatttgttgagcttactgtgtgaccttggcaaggcactcttactctttggccacaataatttcatctgtaaataaggaggtcgaatggtatatcagctagggtagtagctgcagtaacaaataggtccccaaaggcataagggctgaagcaaagcagagctttattataaggcaagtatttctgaatggagggtggtcctcttcctcatggtacttcagtgactcatctggtggtcccactctctcctcagatatcctcattgtctgcagccaggtgcacaagacaaaagaaagtatggaggtggcatatttgcttatctgctttggcctggaagcagcagacatgacttccactcacatgagaactatcatgtggccaatctagttgcaaaggaggccaggacatggagttacaaggatatgaggttcttggcaaagagcagctctttcccagccacagtcgtgtattgtggacagggagaatgaatttttgtggacagctacctgtctctgtcacaaatgtggtgacctcttgggttgcttccattctttgattctaagtctacatttccattagtcaatcttagttaacatggtgatgttggactcacaacatcacctatcctcaaggtaattcccatcaaatatactaagtaaatttccagactccaggcccctaaacatggatttttctgaaacataggcaactgccattctcttttccccctggaaaaaggaaataagaataatggtttgatagaacatgctgcgggttattaagccaaaggtatttatatccattatctacttgaatctccctacaagcctacatggaaaggcctcaggactatcatccccattttataggtgaataaaatgaggctcagagagctaaagggacttgcct

SEQ ID NO: 71327 - DNA, 1030 bp, Homo sapiens
cacatctaccacacagtggccatcgagggcaacaccctcaccctctcggaaatcaggcacatcctggagacccgctacgccgtgcccgggaagagcctggaggagcagaacgaggtcataggcatgcatgcagccatgaagtacatcaacacgactctggtttcgcgcatcggctccgtcaccatcagcgacgtgctggagatccacaggcgggtgctgggctacgtggaccccgtggaagccggcaggtttcggacaacacaggtcctggtcggacaccacatccctccccatccgcaggatgtggaaaagcagatgcaggagtttgtacagtggctcaactccgaggaagccatgaacctgcacccagtggagtttgcagccttagcccattataaactcgtttacatccaccctttcattgatggcaacgggaggacctcccgtctgctcatgaacctcatcctcatgcaggcgggctacccgcccatcaccatccgcaaggagcagcggtccgactactaccacgtgttggaagctgccaacgagggcgacgtgaggcctttcattcgcttcatcgccaagtgtactgagaccaccctggacaccctgctttttgccacaactgagtactcggtggcactgccagaagcccaacccaaccactctgggttcaaggagacgcttcctgtgaagccctaaccctagaaatcctcagtgacaaaggctgtcctgaggtaggaaaaaaaaaaagaaacagcatttctagaaacctagtcacttcctaaagcaaaaggagaaacattctttacctccaaatgttttagttttaaaaaaaaaaaaaaactaagttatgaagccttgtctctaaaataacttataattcaaccaagctatttattttcttctttggagcaagctagtcagtattgtatggtgtctgctgtgtcttgctggtggccgtgctttaggggcaacagtgccaccatgtgaccagaacaaaggttctggagcagaatttgcactaagg

SEQ ID NO: 71328 - DNA, 1317 bp, Homo sapiens
actgcctcgtgccctgcagcgcccaagtgctgcagctcctcaggctgagaacggccctgccgcggctcctgcagttgccgccccagcagccaccgaggcacccaagatgtccaatgccgattttgccaagctgtttctgagaaagtgaacgggacgctgggagacaggaaatgccttacttcactctggcccggcggacctcccaccacccagcagtgcactggggatggacaggcctggtgtgctgcgtgctcgcaaccacagatggctcctcggctttagacagaaaggggaaggggttctaagtcaagagcctttcagtgctccctcatattgagggcagtggcagaaaagtgaccactctgcaggctgggcccaggatgtggtgtcctgagatagttttgtatcttaaagactgaggcacagaagcgaaacgagaacacactgtttttgagacacagttgtccaaatgtttctggccagctccggcccctttttgtatgacacttctcttccaccctgcacagcacatgtgcccgtcattcttttaattttaaaagatgaaatggcagatgctagtaattcacagaatggcctcttgtgggggtgggtctgagggaagtcagctataaaacatttgctggagttttgttcaatggggctgtgcatttttatattatgtgtttgtaaatgacatgtcagccattgtttcatgtttcctaaaagcagaatatttgcaacatttgttttgtataggaattatttgtgccacctgctgtggactgttttctttgcctagtgactagtgacctgtgttgtctaaacatgagtttcagccctttggttttgtttaataccatgtcaaatgcaaacttcaattctccccatttagctttattaaactgacgttctcttcaaaacttcttgctgaatggtactcagatgtgcattcacatacagatgtgttttgaagtgggtgtaccttgctttacctaatagatgtgtaaatagaacttttgtaagtcaaatcccattgtcactttgatttaaattattccagctgtgatgtgtcttcattttatagcagtttgacactggagcttttgagcttttttacctcacatcttttatcaaataatatttactgctttgaaaacagcaacagcattggccagttcagtaggggaagcttgctttattaagacactctggagaaagacgtcagggaatccttgtatatgtcgtgggaatcaactcctcatttatctgttgcgtaagtttaagtttttgtgcatcagtcgggttttctatattttt

SEQ ID NO: 71329 - DNA, 1052 bp, Homo sapiens
cgctaccacacctagctaattttttgtatttttttagtagagatggggtttcaccatgttagctaggatggtctcgatctcctgacctcgtgatccacccatctcggcctcccaaagtgctgggattacaggcgtgagccaccgcgcccggccagttttatggatttttttgccttccttttggtgagtaatgattagggtgaggaaattgctaatgtaacagagacatcagatccagaattccaacgaacctgaatgagccctggtgtggaacagccgtgagcctgtccacgtttttctcctgatctctgcttttcattagtaatgaatttccactccttctcccctttcatgacaaatcagtacagtgaatgtaattgccacatccagcgatgcatcatcttcccacttttctaggctgcagagaaggaagcagcccttgtgcagcaagaagaagaaaaggctgaacaacggaaaagagctcgggctgagaagaaagcgttaaaaaagaagaaaaagatcagaggcccagagaagcgcggagcagatgaggatgatgagaaagagtggggcgatgatgaagaaggtaaggagctcttgagaaattgtgttttgaaacgtcttaaagttagagaagttgcgaatacagtatgaagaactttcttccctgaaccgttaccagcttgatacccattaccctttgatcactgttagggtgtatgtcttgcaaacaaggggccctcttctacatgactagaatgcagccatcagagccggggttagcaatgagctatgggttcccatttatcctgataatgtcctttgtagtgaaaggatccggttcaggatgcactattgtgtttagttgtcctgtctcctggatctccttgagtctggagcactcctcagctttttttttttactctgatgacctgcagtcttgtaagggggcaggccagttgctgtgttgtgcccctcagcctgggtgtgtctgatgctccctaagcattggattccactcatgcatctcgggcaggaatagtgcacaagtg

SEQ ID NO: 71330 - DNA, 1033 bp, Homo sapiens
gagtgagccgagatcgtgctattgcactcccacctgggtgacaagagcgagactccctttcaaaaaaaaaaaaaagatctgactctgggtatgaaatttgacactaccctggattcataactctcctgtcagtaggacgccatagtaaaatttccctggggactgtatcaggttacagagagctgttggactcccccgccatgtgccgcacatgtgaatgctgtaaaggcagaatgctggttgcagatcacaatatcaggtacactttccagtagcccctacatggctgagggagagagtgcttcagggaaatacttcgtaggtgactgtagagactctggaaggagaaagcatcatggatagatctgaaagctaaggtcttctcagaagctagagttactgaagagtgagtttctacctgggagaagacggcctctcccttcgagtgccttccactttgtgtcctggtggcagcaactttttgttttctgccttagagctcatggtgacacccagcactgccggaaggctctgcaccgggccgtccagtgcaccagtgactacccagagcacgtctgcgaagtgttactcaccatggagaggacagaaggtgggacccccagctctcttctggcttggagcctaacccatttgctgtttggtctcaagtaggagcatctggttacagtctggggacagactgtgtttatgctgccaccttaggtggtgccctatgattagactgtcacaagtgtcctgaaaatgagtcctcctgcagctcttctcaaattctgcagctacaaggaggactctgtgatgtcactgtagcacagggttctaattctctgtgggggggactgtgcgttatacaatgtttaggggcatccctggcttctagccctgaaatgccagtagcagcttcaccaccacaaccaaacatgacaaccagaaatgtctcttaacattgccaaatgtctcttgatgggcaggatccctcctttgagagtcactgtgctctagtacaacatctatc

SEQ ID NO: 71331 - DNA, 1048 bp, Homo sapiens
gtgggagaacttctaagctatttgtcccaagtgaaaaacagagagcggtgacaaagtcattacatcagtgttccctggggttttctttgggttatggagtgtagtgacaaaaagggctctgagtgagagatgaactggttatatttgtggcttcttagagctttttaacatgctaatattcattgtattttctaagaagttgtagtgttttctccaaacttccttgatctggaacttttcttgcagggcgtcttgtggaagaagttttttctagaacacagtctgtagagtgctgtagcaacttctgtcttcaacattcctgtctagctcatttcattctgttgcatctattagtctttaaagtcatgtagtgttttatagtcagtagaatgtagtgactttctattagtttccatttgaattggtaacaaatcctgacttttctccaactccagtaaccttcgagaaagctttgaatgccggcttcatccaggccactgattatgtggagatttggcaggcataccttgattacctgaggagaagggttgatttcaaacaaggtatttaagcacatgtttttcactttagagctgaacatgttcttaatacaacttttggcgagatgtcccagttccccagatacattgtgattgggcaaatgatgtagactaggtattggtgactttttcccccagaaatcttagcaatttctgtctttaacaagtcatgatgtggattgtaaagcaagagagtaatcgtttatactggctcctgccagcctttttagtcttagctctcatttctcctttcaggtctttttatttatcctaaatacttcttgaaataagtctgctgtgttttagaaaaatctttgtacctctgtgggatcctttgccccttcatgtccccccgaaaacaaccagaaaacccctaacttgtacttgcacactcatgtcagctgtcacctcatacaggtagcctttagccattctcttgtttgcctgtgtcaccccagctgggggagactcccccccacagcaccctg

SEQ ID NO: 71332 - DNA, 1050 bp, Homo sapiens
ggaataagaaacctgaaatagcatcaggcaccaaaattttccagtttggttgtattaactctactcagtagcccaagaacatgacttctggtttggaagggtggttgacagtggtcactggcaaaggtgttgctctttcactcagttcctgattgatgggctacttaattccctgtggtctaggaatggatttagaaaagagtttatggagcctttgtagcgactgccatgaactggcactttggaccagatgagaagactcttgttttgctcaagaagttgtagaggccatagtggagtggttctgagagtgaggatttggcgattcatagttactgtagccagttttgccaaaatttattttatttgcagatgtgttgtgcttcctgccagtaactaaattcaatacaattttcctgtactccagttgcaggcagaggcaccaaggctggcagaatatcaagcatatatcgattttgagatgaaaattggcgatcctgctcgcattcagttgatctttgagcgcgccctggtcgagaactgccttgtcccagacttatggatccgttacagtcagtacctagtaagatcactgttctaatttcattttatttttgccaatttagaatctacttaaaatcagtaagagtgccaggagtttgttgcatacggccctactcttgcttttcctccatctgctttttctcctctttgccaactcgtttagaaagttttagtgtttcaagttatttaaaaatggtcactaactgtaagtaaaatgagcatattgtctgtgttgaggacttataacaacttgatatttttcttttaactttttattatggcaaaaatgtaaacatataaaagtagacagatcagtaaaatgaaacttctgtacccctcacccagcttcaacaattagtaacatttatagctttagtttactttgatctgtagtctcacctacttgtcccttctgtgttactttgaagcaaatccagaaatgatatttcgttggtaaatatttcagtatgtgtatataaaatattt

SEQ ID NO: 71333 - DNA, 2240 bp, Homo sapiens
ggaagaggtcgtataaatttttttagcttgaactgaaaatttgttgagatattttttgaagtagaaagaaccagagttggccaagtgcggtggctcatgcttgtaattccagcagtttgggaggctgaggccagaggatcacttgagttcaggagtacaagaccagcctgggcaatgtagtgagtccccatctctacaagaactaaaacattagctgggcatgatggcgtatgcctgtggtcctagctactcaggactctgaggtgggaggattgcatgagcctggagtgtgaggctgtagtgagttgtgatcacaccaccacactccagccagggtgacagcaagaacccttctcaaaagaaaaagaaagaaccacagtttgtcatttactactaatttgcttctttagcccgtagctggcttcctttccccttttgaccgggaacaaacctttgattcacagcttgagaaagtccacagtcttttccggcgacagttggcgatcccactctatggtaagagaaactgacatgtcaacagccagccctctatggtttttaaaatgctttggggaacaacatgtagttagacctttcccaccatcctgtgaggcaggtaaagctggtgttcttactctccttggatattgtctctttggatgaggtccttggtaaaaacatcttgaatgttagtgcttaagagggttgtgagggtcagaggcaggactggaagccagactccctgactcccaggtgagagctcttttctcctttgagacctagttggaagggcagagatagggtctctgaaaggaatagtgaatgacacctgtattttttggggaaacttcattgaacaagagttccattataatcattttctcttcacaagtaacctcttccataacagcaggaattttacatgagtttagatcattcctctatgggagggatttggttcagaagtgcagttgattggaagtactcataagtgagtttcttggggtttggtaaagagtttccttatttggtaaatacattttggcaatctaagcctttgagtctttggagctatgagtgtgtgcgtgctgggaggatttttctgagtatgggaagagtttgtcatggctgttgtgtttgttccctagacacgggcatgtgttgtacatactcagaacctctgggcaactttactggagcccacatgttatttctcttcatggtttattggatttaacaagttataaagtagtcgtctaatcaaatggttgggtatcatgcagaaaacactagagctgagccggcttgcagatttcacctaccagcgtgaaacaacctagcataatgattagagtgcgaacttgagccagactgcttgggttcacagccttgctctaccattaactgtagacgagcaactgaaccctctgcttcagtttcctcaactgcaaaatgaggatcacaatagactaccttgtagagtgggatgactgaatgagttagtggatgtgaagtggtagaacataggtaacactgggtaagtgttgttaaatcgttgccactagtgtcattgactgattaattagctgggagggttgcctgggacattgttttaagacagattctacagacaggtttgggctcagcagaaatcagaatttgatcagtaagagctgccatgccacagatgtgggaggggctagtggcacctgagtctcatggcttaatctgtgtttgggttgataaagcccaatggcaagacccacggggctgaatccatctttcaatagatatggaggccacatttgcagagtatgaagaatggtcagaagacccaataccagagtcagtaattcagaactataacaaagcactacagcagctggagaaatataaaccctatgaagaagcactggtaagtgttggcttcttttatagtaaacgtctctctacaaacctttccctgatggatagttgcgagttaaacagtatctttaaaatgttttattctgaaatatatagagtgtataaatgtatacgtacagtttacatactaataataaagtgaacatccatgtacctaccacccaggttaagaaatagaacattgccagtaccttagaagtctcctatgtgcccctctccgattgcctcctcctccctctcccgagaggtaatcactttcctgacttttgtgatgataattcccttgcttttctttatagttttacaagctatga

SEQ ID NO: 71334 - DNA, 1072 bp, Homo sapiens
tactagctgtgtgaccttaagcaaattatgtaaacattctaagactcagtttttctagcagttaaatgatggcaacagtagtttctgcattgtaatgtatgacggtataggatgagctattctacgtataacacttaacacatgcctggcatgttgtcatccttagatagatgtcattattattagtgttactatcaccaaccttacaggattgtgataaagactgaatgagaaaagtgctttgcaaaatataaaatgcctaacaggtggaggatattatgattttagtgatttgatcttatttggaagcataaaacctcctatgtgcttagttcaggttttaagaagtgaatttctggaaacaacgccaggttgtgtaagatggatgaaacgtttgcatgctgatgtctcttggtaaagtccctgcgcttagcctaccctttggtattaatgcgggaagtatttttgtctcgtagagctctggctggagtggctgcatgacgagatcagcatggcccaggatggcctggacagagagcacgtgtatgacctctttgagaaagccgtgaaggattacatttgtaagttcccgtggactttttttggatatctggcaatgtcatatatatcagtctgctgttgaggactgtattatgagatgttgctacccagaaaagggaacgttagtttcacaattagcaagatttaagttgagttgtcttatcattgtctttggtctttaattgaggaagtttaattttaaaataaaagtggaagaagcacttgtagtaagggaatgaatacactcacactcaggatttattgacagtgagaacttacatggtatttccactgatcttttatacattcaataggtttttagaggttttggacaggatgctttaaaaaaaaagattaaaacattaaaagaaaacctttttattttgaagtaattatagagtcataggaagttgcagaaatagtacagagaagtcttgtgtactcccttcacccagtttcctccaatatcttgtttctgtaatacaaaatcaaaaccaggaaattgaccttg

SEQ ID NO: 71335 - DNA, 1050 bp, Homo sapiens
cctcacatgtgctaaaggacgttatgaaattacctttttattttttagtttttcttaaagaccagtgtaacagtagaaattttttaaatccttggaagacctggtatgagctagaaactagtagtgtcctcattttatagatgaggaaatagagcttaggaaagtaaataacttacctaaggtcacatactttttatttgtttcattagaatgcctcctttatttccaagagaacccaaatgtcttctaacaggaactgtaacagatttgagggagctttatgtttgttacaaaagcctcttttattgttttgtcttctacctgtgggtacgtgctgggttgctgtttcagtggttttctcagatagcacgtttattttgtttgtggcaggtatatgtgtagttaccagtagtgacaaaagctaagttacttgatgacggtgttttaaatttcaacttgtttcttttcctgttagttgtctatcaacgtctatgactacaactgccatgtggacttgatcagactgctcaggctggaaggggagcttaccaaggtgaggatggcccgccagaagatgagtgaaatctttcccttgactgaaggtaagcttcagcagtcaggctgcttttagaaacagaaacaaggcttgcacattttttacaatgttgaaagtgggacatgctccttgtagaaaacctggaacgttcagtgtagtggaaagaagaaaacgcatcagagttagctatttttagtttattgtagttttttgcaaaatgtagttatgatcatataacacggattttgaattctgatttctttattctaacgttgtggtaaacatttgtaatgtaattaaacttggctttcatttctgtatttcccatttcactatttatgtatttaaaccattctcttgaaaccagaaaattgtaaatatatttaaacttttacagacagttttttatgtaaatgtttcatacattaattgttccagaatagttgggcatttaggttatttctacttatttgcttattagaaacataattgca

SEQ ID NO: 71336 - DNA, 1026 bp, Homo sapiens
gttgtgacggaacgcatgccattataatgagtttttatatctggtgggagcttttacagggtataaaataatgtgaatttagtgtatgtggagattttcctgttatctaagttcccagtttctctttcaatggcaagaaaacgggtttttgataaggcgcgcgccgcgggcagcttctgcctcagcgggtcttcggcggccgcgggaagacccgagagtcattagaagcgcaagatggcgactgcggccgaaacctcggcttcagaacccgaggctgagtccaaggctgggcccaaggctgacggagaggaggatgaggttaaggcggctaggacaaggaggaaggtgttatcgcgggctgtggccgctgcgacatacaagaccatggggccagcgtgggatcagcaggaggaaggcgtgagcgagagcgatggggatgagtacgccatggcttcctccgcggagagctcccccggggagtacgagtgggaatatgacgaagaggaggagaaaaaccagctggagattgagagactggaggagcaggtgggcccgggggtgggcagcgggcatcttccagtctttcaggtcctcgggtccccatgtcctggcccgcctccctagtcctcggcggcgataaagccgccaaggctgcaaacccgcttttcgtgacagtagctcctgtcggatttgagtgcttactgcctgcccattgccttgcaaacgttatctcattgaatcctcgccacgaccctgtgaaggaagccctgttatctatccccattttactggaggaaactgaggctcgtggaggaaagtttcttgctcaagataacacttcctgcaagtcaggccttgtactttgatcccattccagaactcccactcttaaccacacgtccaacagtagaaataaactcattcgcaagagagtgttattttgttatgtaggaatgacggcgatgatgaaacttgtggtaagaaaaatattgaccgcgatggtgataatagaaatggaaaggtttc

SEQ ID NO: 71337 - DNA, 3574 bp, Homo sapiens
gagggattaaataatcaaaaagacagcaagggtgggggcaaagtgaacaacgaaatcagaacagtgatccaggtggctgatcgcaagccctctaaaggcagagataataaagagctagaacttctttttcatccctttgtctcccaagtgtctttccctggtagctgcagaggtcaaaggtcccaaacacagtgaagagctggactttctaaaatccagttgctgtcaaaacctctcagaaaagccaaccagcaaggcactcatctttgctgccccaagggaccaggttcagggagctgagtcacagaggagcatgcttggaagctggccagctccacagcagagcagtttgccaggccacgtgccacctgcttcctgtggctcacggccttctggctggcaagcccctgtgggccaggaagctcagacctaacctgctgtggcaggaggtagctctgaagtgatttgtcaggaactgtcctcaggtgaagggagaaatgagacaaggcacttttgctcccagaacctggcccttaggggactgtgaattgtgatcagaaaatgggagagaggacatttctttaaccttgagatctcccatctgagtttcaggagcagaacctgaatcaaccaagaagggttagcagaattgggaaactgaatgatagacatagtcaaagagtctggctgttgggaaatctggttttctgtaaggcagtggggcactgttctacatgggcaaggatctgcctgcctcacattatcccccagggctgtcaaccagaccccaggcatcctctttagttgatctggaggagatgctcctataggcaaaggggacaccaaagagagcattcggcctgactcggctgtgccactgccactgtgctacttacctgaaatcttcccaacctctctgatgccattcggcacttctagtcaaaaggatttaggctaacatttggtatgaggacatcggagaagctgatattcacaaaaccagcataggaaatcactaccttttaaggaagagattcctgttacaggccacaagcagatccctaagagacttctcacaggttccactcctgacttagagaagtgtctgggctgtctttgcttacccaagccaggcagtgcagctgtgtatacttcatgcttgagaatcccagctgcagctttgataaagtgggagtcctgagaagacccttagccgtttgagttattaaacagaaatcatccccaccaaccctgagagcctctttggcctcccttttttattggctggccctcacaagataaagtgttgctaaaactgcccatctttccattatgcctctcaggtggaggaagccttgactatcaaaaacacagatatcgccaaggagctctgccttcctcccgtgaaactgcactgctccagtaagtctctgctctccataccagtcagctgggacatttggcagtaatttcaacttggtttgcaacagtccttttagatcatggagcccacgtttgtaaccctcagaattagagctcatgagtctgtccttataacctgcagagggttagagcccccatggtctcacattcatccctaagagaatcatgccagaaggaggtatgcaccagccatcatactgagcacttcatgggcgtaatttctaaacctcacaaatatccttgagtgcacagtagatgtcattacttccctcttatggatgaggaagctaaggcttgggttgagacgcccacatcacatggctaataagtggaagagccagaatttaagctccaatctttgatttcagaatctgtgctgtttccagcagaggagaaaactcagctttcgccataatcctgtttcctgtgtatttcttcacttcctgtctggatggtattcctgtcggggtctgcatctgtatatatggaacaactaagcccagttgtacaatgtccccctccctgctatcctaaaaaaaagcccagatgccttaagacttgtacttggctttccagtttggtctctgtattaaatctaatgctttttccatcatttcttaaccttctcagggaaagaaggaatgagaaacattagccttaatgcatcgatggaggtttactaaccaaattagttaaaaatcagcagagagtcaggcctcttgccaaggtaatactcacagcagaagagccaggtgccggggcagacacactaactcattcttcaggaagcctggtcagacctaagttctttccacttgatctggaattttaagtacccataaagaaaggtcatcacttgtaaacattttcacatggtttcaggaaatccccagcccttttattaggcctttttaggtactgaaacctttagctgatgttctctgttatttgcttgctttctgctgtcattccagctctctcagtttttattttccccatagcctcactttgaatattgactcctaaataaaagtggtcaaactctcgatcactagagggtgatgtggcaaatgccatcccatcaacagattgacatgatcttttttccaaagggcatgtcaacttttttatcatgacaagattttgtccaaagctagactttgatgggagcaggcaagaagtaacatttcctgtgtccctactatgtgtcagacatcttctgtaagtccccacactatcctggcaagaaaagcatgattatcccagttctatagaagagaaagtagggtcaaagaggctaaggaactagcctgggatcacagatttttaaccctagtctgtctccaggatcacccgcaggagtaactcagctcaggaagcagctgctgacgtgcccagcaactcctcaccccagctttctggcttggttactccattagtccccaccagcaccacttcctcccagctcttaaagattctattcccaagtccatttctttcacatctagaaacttaggcttctttccttccgttacttccagtgctggctgaagatgcaatcaaggccgccctggctgattacaaattgaaacaagaacccaaaaaaggagaggcagagaagaaatgagccctccctcggcgaagcctccagcaggccacaccagctgtttcccacctgctgtgcagtcaccttagatgttcagaagccgcttcctctccactgaagagctatgagatacgcacaatacttgctgttcacgttatgactctcatgcaagcaaaatacacagtttcattgttctgaatcctgtggtttctttcagcccacttttatcgccttaacctagttaatgtatattttgaattgtgtgtatgacctcagaactgaaattgataatgaagttgcaagttttgatagcccgtgaagtgcataagtatctaattttacctgaattgatttggggggaaattaccagtagaatgccttggtctgaatatttgatagaaccaattgttgtacataaaacagattgcgcatatatatatatgtataaaaaataataaaataatggaagatgatggtgttctctagtaagccttgtctcttgggcccatcattcaccctgaagtg

SEQ ID NO: 71338 - DNA, 1041 bp, Homo sapiens
acctaaggttgtttaaaaaacattcatccagccgggcgcagtggctcacacctgtaatcccagcactttgggaggccaaggcgggtggatcacgaggtcaagagttcaagaccagcctggccaaggtagtgaaaccccatctctactaaaattacaaaaattagccaggcatggcggcacgcacctgtaatcccagctgctcgggaggctgaggcaggagaatcacttgacctgggaagtggaggtagcagtgagccaagatcacaccagtgcactccagcctgggagacagagcaagactccgtctcaaagccaaacaaacaaacattcatccctggcttgggcataagtctaagcacgggccctcctaccctgatgtctccctatttttagctacccatagtcatgcaaatctcaataaaggatgccctatcttctagtgaaaatgggttattgaaatattgactgccatagtctcaaatgttcagcttcaaaagtaagatgtgtttgttttttctggtggtggtttttttgttcaggtataggctggctgcctcttaaatatacctcccttgttttttttgttgttttttgtttttttgttttaatgctctgggttctggtggagggcacagaacttcaaagactgttccttctgtagtctgtgaaggcagccacagaccagggcctttataggaatctcaaattagaaccctgggtagaaccatgtaaaattgtcctgtgtggcatgttctgcaatttaattcacagtccctctagactgagcttgtctctcccttctttattacatgtggcaccaccacaattccccaccacttttctttgtgatttttttaatttaaatgagacatttctgtcccagtgaacatcctcagagttgaacatcaggaggagcttataaacaaagcaatattcccagaagagcccaagtctctaaacgtggttgtactgctaaaacaaatggatattttttaaattcacattaaagacactctttccccaaacaaatctagtttgagc

SEQ ID NO: 71339 - DNA, 1265 bp, Homo sapiens
atgagtattgagactgaggagaatgatagagagtgaagcagaaacaggagcacagacctctgctgtagctttaatgcatacaaacatgtccctccgcacaactaacctgccctgcctctccatctctcaccaaggctgcgtcaaagcacagaggctccccggactcggagggggccagagactgagctctggtcacctgttcattcctcggttagctggaactttgccccgtttccagtttcttatagtgcatgcttgggaaacaagatttaaggagcctctgttttggaagggctgtctgtgattgaacgtgaaatgtgtagtgccattgggaccacgaagggaattcttgcacatgctcgtgctggtgtgggcatgggactggctggaaacgtctgtatgcagggagccagggtgagggcagagtgtggtgacagccgaacttggagtaatgtccgtgtagaaaaaggaccatgttcttatccagccaatactgggagtgctgtctccacaatttcagggcatctgaatgtttgatgtggttttgtgtgtgtgtatgtatgtgtttaatattgaagtggatcatgagatgtaaagaaaacaataatggcaatgacttatattcaaatctgtatttgtttctttatcaatgtaatctgctgaggaccttttgtctaagattcagtagtgttttaaggttctgatatcgaattaatgaagtaaagttgttgatggtggtgaaacaccgtagggcatgtggttcaaagagaagcaggagggcaagggaaagttaccctgatcttagtttgtagcttatgacttatttaatgaatggatgcccagccaagctcagagtaggcgcccaaagcattgtggattattttcctgttttgtctttttttttttttttttttaagccatgacatcccagaagaggacagtgaattactcctaggtcggctcttatagagtggccatagtgttctgtcaaaacacttgcttccattttcagagataaaaatcattgattacaaaatggtgtttgtgtttatttcacgccttggctgtctgtgaggcagcccccacctctctgcctgacatagcttctctgactttggtggacgagcacggtgccatactcctctccgggggtaagtacaggggaagcgcgtgtgggtggctcagttcaagtacaagtgaggtctccaagccagtcaagcactgtgttttggcttccagcagacctgagcctttggatcctgcct

SEQ ID NO: 71340 - DNA, 1007 bp, Homo sapiens
tttcttagcaaaatgaagccaagttggatgagattttaaaagagatcaaatctataaaagacacaatctgcaatcaagatgagcgtatttccaagttagaacagcagatggcaaagatagcagcctgaaggtcccacccccacccctacagaaaaaatgggagcaagaacttgtgcttgggagctggttattggtgtggtcctagggagggcggaaagggaggcactgccatttggagacattccatttcagatttgtcaaccagcgataggccacattccagtaagaactcaatttgtctcccaaatttgcagaaacaaaacgtgatttaaaagctgagctttttatcagaaagcttttttgatgttttaagtgttatgtgacttgttgaactttttaaaaagtgctacttttaaaatcccagatactctgaattttagaaaacaaactaattctgattgtgtcgtgcccaagtacccttttttttttaatgaatagggaccaatgccacattgctttttatatttctttcttttttaatgttgccaaaaccaaaagtagctttgttttcctttgtattttgctactttgcagtatttgtgtgtgtggttttttttccttaatttgaaagggacagcactgtgtatgtttataaactaaatgaagataagatattattttgtataaacattcatctgagaacaatcaaagcagtagccacatggtgctggctcctttgcagcacaaacctggtcattttgatgactgtacaacaggaagacttgaaaaatcacgtggattcatattaccaccgctctcatttcatggagtcttctgatcaaaaaagctcacgtcgtatttcttcttttcctttctcttttctagaaattgggtgtttgtaccagaatggaattttgcttctcggttatcctgtgcttcagatgattataatctaacccaaactagcatgtgtttctgcagtttgttacacacctaggatcatattg

SEQ ID NO: 71341 - DNA, 1013 bp, Homo sapiens
actactgcactccagcctgggcgacagagggagactcagtctttaaaaaaaaaaaaaagaaaaagaaaacagtaacaaaggagaagggctttctcatcattgtcatgaaatcacgctgatgtatgcgcgcattatgttgtcaaatcagtgaaattttgtgagttggatctcatttagcatccctgttgctgtttccatgtatgagtattgtatgtgcatagttcaaacttctgttattctaggaaaatggctcgcttaattgggatagaagaatatataataaggttataaaaatttatttttaaaaaaatgtatacatacacatatatgtattattattatcttccccccagaaaaatatgcaggaaccaattgctcttcatgagatggacactagcaatggggtgttgctgcctttctatgaccctgacaccagcatcatttacttatgtggaaaggtaaacagtaattttgatgtttggtgttaaatcctgtaagtggaaacatttatccttcagagatttagaggacgggcaatgtgttgtatctgtttaatttttctaatttgtgtgtgtatgttataagccaaggacagataatttggtatttttaggtcttgagactggactgtgtgcagcttgccagttgtgcagtgataacacgccatgttgcatacttttgactgaagcagaggttgggctggggtattggggaaaatgctccaatcagggcgctcttgtgaaaaaaagaagatacactggtgtttcatcttcacctagcagtgctacctgattggtgattttagatttatctgtacttatgtcagggatgggcaaccagttggccacatctaatgctgaaatttgttggataaccctagatgagcatgtgtatacttagtaccacacaccatggacttggaaggagaatggtgctttgtggatgcaaacttttgagggcctcagagactctccagagggttcttgttcctggggttcagtgctagggctctg

SEQ ID NO: 71342 - DNA, 1035 bp, Homo sapiens
aagggaaacttgaagtcacttgggtctaccagcccagttaactctttaaagaaaatagggttctgttttggtgtggttctttgtttttgtttggttgattgtttcatatgaacccaaacttaacaagttgtgtttttactttaacacttttatttcttttatacaaactttttcctttgtcacttcagtttttaacgctgttagtaagtagggcctctggtagggcctctgacaatcagccgcatcttttctctctctctctttctctctctctctctctgcatatacatatgtgtattctcactgtatctgtagttttctgagtgtgttacataggtgtttctaatcttctaatctctgatggttttgcctgttttaggctgtgataatgccattatcatctggaatgtgggaacaggggaagcccttataaacttggacgatatgcattcagacatgatttacaatgtgagctggaaccggaatggcagtctgatctgcacagcttccaaagacaagaaagtgagagtcattgatcccaggaaacaagagattgttgctgtgagtattcctaggatgaaaactcagtagttggagcacttgagtgagtgtgagctttctgctttttaaggcaggcagcggtactggtcagtgggaccctgttgtgtgtagacaccaactgtgaataagagaaggcttataaaggcttctgtctccccagttgtgcttctctccagagttgtaaattttccagcttttactcaagtctctcactttgtagccttttttcacaaagaaatagtttgtatcagttcactagagtccttaagagtttataagtcttgatcaattaaaccaattggctgcattcctgattttgcagcttagtattgaatattgatgaatcaattcctcacccttttccaaacacagctgttaaagatgcaacaggtggccgggcatggtggctcacacttgtaatcccagcactttgggaggccgaggtgggtggatcatttgaggtcaggagtttga

SEQ ID NO: 71343 - DNA, 1070 bp, Homo sapiens
tgatgggtgactaaaatagggaagcagtgtctggaaagcagtatttgaaaaataaaactatttaactaattgtactttaaaattagcacgtgagagaaacccaagtgtcttagttttccttttttcttgttgggattgttctcttgagttgtcctttttccatatccaggctttcacatgtgaaaaggatgcccatggtacagtagttctgaacatgtgcttaaagttgtttttttccagaaccacaatgggattttactgatggattcactttttcatgtaggagcccttggaactgaatgtcatttttttggttatatagatgagaggtttctatgttgcacaggctggccttgaacgccgagcctcacttccttatgcaccaggacaacaggcctgagccaccacagctcctctgatttcatttttgtcctttcaaaacaaaacattgccatagtaatgtgttgtccaaacagaaaatgttaggaacacacagcattatttaaattaagaaaataaaataaaaaagaggaagtagggataacttgtactctctgctgcactgagatgcctactctgggtgttttgtgtctgttttcctctgcactcactgcatacagttttgagaaagctggttggtattacagtaccagtctgtagccatagaacaaagaaaagctaacaagcctgcacagagatcagatctgtccttactgtggtaattggcctaggtataaaccagagctttcacacataatgatatcttgggtgtaaattagttagtattaattaattgggtacagtgctgaattaatttgaagacaagactcattctaagaaattctgatgttcagacctagaaatatatatggcgtcatagtggtcatattaacagcaaaaaaagtcatcatgaaaatatggtaggctcttttttttttttgccacgcgctattctaagcctttatgtgcatgataatatttagttattgtatccgcacagtaagccatgagtgtggcctattttacaacttaggaaacaggctcagagagtggcagttttgttaagggtc

SEQ ID NO: 71344 - DNA, 1955 bp, Homo sapiens
ctgcctaccgggttcaagcgatactcctgcctcagcctcccaagtagctgggactacaggcgcacaccaccacgaccagctaatttttgtatttttagtagaggtggggtttcaccttgttggccaggatctcctgacctcatgatccacctgcctcagcctcccaaagtgctgggattataggcgtgagccaccgcgcccggcctttacattttaatagtgccattcatttccagaactggtaatttatatattggaggatattgtcttattgtattaacattttgaataataccaaggtttagggtttttttttttttttttttaagccatggaacatccttttaatttacaatttggctatttagaattgtattttggcaaaaagactttcatattctcttttgctatgtctgctagtgcagttggttacatctttttggttctagggatttggattcttgtaatttgatcgcatgtccttggtagtggctttttctagaagtgaaagttgatattgactatacgatgtcatatctagaaaattgagagttttgggtggaggtaataaatgagaaatgggcctgagaaaatgtataacgtctgtggtgttgatattacataataggtttgtttctctcttctttcagactggtcgaattgacaaatcttaccctacagtatgtggccacacaggaccagtgctggacatagactggtgcccacataacgatcaggtcattgccagcggttcagaggactgcacggtcatggtaagctcccagggtgttgtgtgcacacaggccagtgagactcacctactgctttcaaaagcatgtgtgtgggtgtgtgtgtatgtatagaggcttgaaaagcagaacgttatagcagttttgactgtctgttggattttacaataatttactacgtttaagtttaattacagataatcctttcaagaagcccttaaatcaaaaaggttgtactgcagtgtctgccgtgtctttctttttcttttttttttttgagatggagtcttgctctgtcacccaggctggagtgcagtggcatgatctcggctcactgtaacctccgcctcccgggttcaagtgattctcctgcctcagcctcccgagtaattgggattacaggcatctgctaccacacctggctaatttttgtatttttaatagagacgaggtttcaccatgttggccaggctggtctcgaactcctgacctcaagtgatccgcctgcctcggcctcccaaagtgctgggattacagtcttttctgtgagtgtgtttgtgtatgtgcttattgacagttgacatgttctctgttggaagattttagggaaagtaaagtgacttttcagtaattctgtaatgccatttgaccacatgaatttcccctcgccccaaaaggagagaaaaaactgaaactgctggcacagactgtacaagacagtgacgtaagatgccaaagttatgcagataaaatgggatatgtcacaggtggtaaaagagtttttgcaattgcttgtttccaagctaatggcagaactgtgttctgtccagtggaccctggttaagaaagtccttttcataaagatatacaaacaaaaaacgtgaaaggtgaattaagtactttacattccctcctttagtttccaaaagtaggttatgtgtgaaacaaggctttggaatactttttaatatgatttcttgtccttagttatgatttttaactttaaaatgtgattattggtttggatcagtttttaatgctagcccaaagtaggctgaaaaggttaggcataaacacaaatgggagtacttgctgcccctgaaataagggaagatggtctctaattaatttgtaagcagtctcgcacatgtcaggtagtctcgcacgtgtcagcattggagaaccatgctacttttattttcctct

SEQ ID NO: 71345 - DNA, 1104 bp, Homo sapiens
ttttttgaagtccttttttggtgatgcgttttggaagatccaaactgggttgcaagggaaagtggaggaatgtgaagaaacctaggccttaggtctgtaaacagggccatattcaggcctcaacttagaacttacctttcccagaagaaaacctctccagagactgtgaccccacaaacctgcttgaatgtcttccttctctgttcctatgtggcaccataattggctgtttaaatgtctctctcctctcactgggctccacatttagccaggacaggactgccttgttcacgtctgtatctccagcactcagcacaatgtctggtccataaaagttcacaacacatatttgttaattcttaatgatggagtaaattattgtactagaagaactaataatgtgacagcttttattggatattttattccagatactgtggttaatttttttacttattttacagataattgtaatactgaattgtgatttatctaaaagtgttctctcatttaatccttacggtaattgtgggagttaataagtatcattgttaactattttacagatgacgaatgaggtgaagcttagagagattacatgacttgtctaaagtcacctgtttaatcagtagagcctggatttgaacccttacctgtcttattccagagcctgtggtctttacacgttaacgttctgctttcctggagatttgcacagtcaagtcaaattggagaaatcatagaaatttctgttcttgaaaaattgctaagaagcctgctccagtgttgggatgatttgccatataagagcaaaaacaacaaaaaatagattaagccatacattgcagtggttcctttctgtgcacctgctcttaaagcatacacagcttcagcgtggactggcattaagctattttaaaaaggaaaccactttcatatacccattgttaacaatagcagttgtcttagttgacacaaaattggtctgataaccctggttggtttgctagattcaaatgtgtgacatgagcaaattgtggtagctatttatgaccaacattaagcattttattcttaatcagatgtggaactggctaatgggtg

SEQ ID NO: 71346 - DNA, 1025 bp, Homo sapiens
taagtgcccagctttgtatttttaataacgtatgctgatttggtgaaatatgttgttgtgcttttgttttgatttcattatgagtaagaagatacttagaggtgtaagcccttgaaagcaggatagctgatacttgactgtgtgtttgtgaacatccagcatgccaaataatcagtgtacctttaaaatgccatctacccccatactgtcttcacatttttgttcttttatcactgtcagatatttagtcaattgcttttctcttgtgctacagtagaatactactttctctgttttatttaaggatttatgatgacatcacaaccagaggaagcagctgcttgtagaatatcattttttattaactgtgtttctgatggccaattgccaataatttttaacattacttgtgtgccttttttttacaacccatggcatagtggaaattttctttccctatccaaatctagtatggttggtcagtgatattttagatctttgcttcttgactttctctgtgcctcagtttctttatttggaaaatagggtgataagattcccacatcttaaaggttgtcatgaggacaaagttatcaaggtcttcagacagttcctagcttgtaatttaagtacttaaaaagtgttagccattgttattatttgttttgatagaaaggacagaaatagctggcagttgctctttcagtgacattcaggttccagagaaaatgttgagctctagtactttcaggctgtggatttattggggctgagctgggaatggcagtaatgcttattattattctcagatatcttgactgaagaatactggtgaatagctattaacttttagccagggttatttaattttaacttcaaaaaagaagtcatttagtaagaagcttcttagtatgtaattaagaacaactagtgctagtacttccagattcccctcaaaattgctttgtgtttgaataaaagcgcttcttagcccagattggaaaaaatcatttggtgttcttgga

SEQ ID NO: 71347 - DNA, 1238 bp, Homo sapiens
gtagctgggattacaggtgcccaacaccatgcccggctaattttttttttttttttttctgagacagagtctcattctgtcgcccaggctggagtgtagtggtacgctctcagctcactgcaacctccgtctcccaggctcaagcaattctcctgcctcagccctcccgagtagccgggattacaggcatgtgccaccacaacgggctaatttttgtatttttagtagagacgagatttcaccattttggccaggctggtctcgaactcctgacctatctgcctgccttggtttcccaaagtgctgggattacaagtgtgagccaccgtgcccggcctgtatttttagtagagatgaagtttcaccgtgttggccaggctggtcttgaactcctgacctcagatgatccacctgcctcggcctctcaaagtgctgggattacaggtgtgagccaccgtgcccagcttagattgatccattttaacaccaattggtagtgtcttcaaccacaaaccaatatgtgggtcagaaataattatgtgaggaatcattcttacatgaagaaacagtcattctgaatgatcttttgtaatatgtaggacatattggaagcaaaattcccaatgttgaatttcgagagtttgggaaggtgaacatggctgcggtacatgtgtaatacaccactagctgctttaaaaacacaccccagcacagaactttattgagacgtgtctgtcagaaattttctgtacatgtttgtgtacattaacagttttttttattgtactcagtactgccctcaatatataggatgagtctacttcttaaatgtggattcctttttagaaggagatgtgagatcgataaataagatatactgggctgggcacggtggctcacacctgtaatctcagcactttgggaggctgaggtgggcagatcacctgaggtcaggagtttgagaccagcctggtcaacatagtgaaaaaaaatacaaaaattagctggacgtggtggcgtgtgcctgtaatcccagctactcaggaggctgaggcgggagaatcgcctgtacctgggaggtggaggttgcatgcagtgagctgagattgcaccactgcactccagcctgggtgacagagtgagactccgtctcaaaaaaaaaaaaagggtcagaggggatacattgttaataagtggaagctgttgtgattttccagtaagattgataggaagtgccc

SEQ ID NO: 71348 - DNA, 1533 bp, Homo sapiens
gcctccacctcccaggttcaagcacttctcctgcctcagcctcgtgagtagctgggactacgggtgtgtaccatcatgcccggctaatttttatatttttagtagagacagagtttcactgtgttggccaggctggtctcgaactcctgatcctcttgccttgccctcccaaagtgggattacaggcgtgagccaccacacccggctaggttcttgcttttaagaagcttcaacaactgtgcttgatctctccaggggggtgctttgtgcatgaagtgctttagcactggggtgtgagagatagtttcaccctaggcttagaaggtaaggaagacatcacagagaaggttcggtttgaattcaggtttttttttttcctctgcgtaggagctaaagatgaaacagaagaggagccaacccaacttttaaactgttaagttagtagaggggctctgtccctaggagggcaaagaagtaggtggtaggcacattcctccttcagactccaggatgtctagtttaggtggatttttgtagtattgcagaaatagaatgtttgattggaagataaacaaatcatttatgcatagtgtgaactaacattatgagtcaaaagaagctgaaggatagctttttggtagaaaatcctacatttcttgaccctttctttcactttcagtgtgaatttggcaaaattggtattttccttgattgttatggggaaaagaactagaataagcactgttttatattttagaatcattgttttaactagatcaacatggcgtctttcgtttgtatcatctttaggaaaaagcagtgacttctgtcacgttgatggaaatgagactgcagaatgtcagcagatcgtacgtggatagtccccttcatgaacagtgtctctgttttttcacttggtagggtgggatcattcctctgttctacagttgtagaaattgaaaccaaattgagtggttgtccaagaccgtgaggttgtttgtgaattagaacttaggttgctgagtccttatttgatttgtacatgtatatttttattaattttttttctactgagtgtgaacgaatttttctttaggggggaggatatagaatctgtggtttagccgggcgcggtggctcaagcttgtaattccagcgctttgggaggccgaggcaggtggatcacctgaggtcagcagtttgagaccagcctggccaacatggtgaaaccctgtctctactaaaaatacaaaaattagctgggcatggtggcacacgcctgttatcgcagctaatcgggaggctgagacaggagaatggcttgaacacaggaggcagaggttgcagtgagctgagatagcaccattgcactccagcctgggcgacagagcaagactctgtctcaaaaaaaaaaaaaaaaaaaaagctgtggtctaatggacactgaatcctttgcattctttctctgggattagagagtttaataacaaaaacagtaacttgacagggctttcattctgtcagctcagagaa

SEQ ID NO: 71349 - DNA, 1051 bp, Homo sapiens
ggttttattagggaaagtgggatttttgaagaggtcactgccggaggaatatagaaagtcctcagtcctgaggtgggttgatttagattagcacacgtgattcccactctcttttgtaatgcttccatcaagctgtggcttgccactctgccatgacttttcaaggtgtggcttagtgcatttacttattctttagtccttcagaggatgaataatagcagtcttgctgaacataagttggctttgtggttttggctatgaggaatacttttttttcttgccacaactgcacaagctgccttgtctcaagagcacacaggttttcagccctctgtgtaatctaccacgttggcatgaataagcctttcctttgtggagtagccacactcgtgacgtagatagaactgagacattccctccctattgtgaaccatggagggctcatacacaccagtgtttctggatagatacacatacaacccccccgtcccctccctccccccgacacacttcatatcacaacaagcctgtaaatcctgccttaaacaagtaagagggggaggaatcggtaagaattatatgctcttgatctcttgacattctcttggctggaggatgcgaactagatggctcctgtcttcccaagttgctttctttctcccttccttccttgagtattgtgaaatactgtgaagcaactttggtgaattggaatgatagctgatttcaccctcacagaaactacctgggacaagaatgctgctctggccaggataggatgggtatggccaggtctctgttagctttttgggtcatgatctcttcttctctcccatgggctcctttgttgtagctgtgtggtactttcttatacacaactgtgtttctcccatttattttaggagctgtgtgtgggaatatttgggatcttgctttatttatgtctgtgaacaatttttcaactcattttgcagtttttcatgtagggttttatgaaagaatttagctctacagaaaatcatttgaaagactgtttttttttttttttttt

SEQ ID NO: 71350 - DNA, 1073 bp, Homo sapiens
attaagttgaaaatttattttttatttagatacttttatttctgttcaaaaaattgtcgttcagtggcagataagtacactacactgttataagtgttcttcatctggttttggagtggggatttgaactcaaggccagttgcatttggtctccacattgttttagcttattccttcaccaagagcaaggggcatttggaaacttgacattttactggtaggctttatggcagccaactgagaagacagccatagcttgttagctaaggtcagacactggagcaccatgatttgttttggagttacgagtttttatttccccttttatagactgagggataaatgtaagactttttttttccttcaaagaaatggaacaagccaattaagaagcacaaaatagacataatgaatggctaatcttcctctgaattcagacatttcctttcaactttcacatccacaaaggttctgtgagttcatctttgcttttacagaccatgagaaactgagtttcacttatcccatttgagggagacctgtgtgcagtgccccagctaactgatcttatgatttggtttttccttgcattcagtgacctacacttaatgaatgtgtccttgtatttcattctttaaccagcattatgggaactaggatagaataagttgctttacaaattgtcatgtttagatgaggtgttgctttttagaggagcatcgagggtctttcccaggctataatactgtctgtctagctttgctccttaaatatgagtttgttttagaggaggtgacattggtataagctaagccctgtgacagccattggaaataagatcaatacttgggtttctatagtcgataggttcatgagtactatgtgagatttttgtgtattaaagtgtgtgtatttagctcttagcgtcaatgtggcatagagggaagatcacaaatctgggaattgatgagctgtggagttcagtcctggctcagtcactgacttgtagtgggacgtggatgtgtctctttatccttccgctcctctgtttctctctctgtaacataagcagc

SEQ ID NO: 71351 - DNA, 1035 bp, Homo sapiens
tagtcaggcctctcctggcttctgctggggagagggcaggccagtaccctggttgtgcagccctgggatctgggtgtccagctgctcctaattcaggctttcagtcattttctctgtagtccctctcccacatccctgtctttggagacacacagtttctccttggagtgttctggggattcacagtgggccttgatgtcctttttgtgcgctcctcctgagactcagctgagtagaggacactcacacttcagtcagttacacgtgcatgacagctttccatcttcgaaagtttattgtcacatttgctctcttgtagcctcttttccagtcctcttgtcctttcatgtttttacctgcttttattttttgctttcattttattaggattttaggaaggagtggagataagtgctgtttgtgtttcttttgtaaattcttcatatcctttgtctaattttctgttgggttttaattgtatgaatttgtaagaacgttttatttatgaaggatgttaactctgacatggtgcaatccttttttcttctacattagcttacttttgaaacacttgcttgaagatgctggtagggattgcagcttctataacttgtacagatggttgcagatggttgtgtggggaagtggagcccaagaccagctggctgtacgttggcttttgtatagatgtgctttccttttgcttttcaccacctcatggaagctgtcttatctaactcacgcttgagaagtattcatattgattccaaaatgaaggaccctggccacgaatcatttgccatctcctctaccaaagactcaaaatgtatggccctggtagtcagctgggaaagtctggcaataacagctgggctaaggaacgtggatgctcaattgcctgccaagggtctcttacttcagcccggctacatgcccccagcattggagagaggccactttcacacatgcgttggaagggtaagagactctggcaaaaataaattcgtctctctgcatttagcagtgggctcaggg

SEQ ID NO: 71352 - DNA, 1390 bp, Homo sapiens
cattctagaatagttgctgttgtattggaaaataggaggagagtgataaattacatcttaaaaagacaagtaaggtttgtatttcccatgttttgtagaggttaaaaactctgttgcattatctcccattgaaagtaagtttattttgaaacttgtaaatattcctttgatttgcttagtgaataacttactgctacatcgtcttcctctttattactgagatgatcttactgttgcaagcaagggaaagcctatgcagttttaagaacttgtacttgaaagacctaatgagcaagcagtttttccaaagttgaaccactctctgacaggacatttaaaatcatacctagtatttccttggaatttgtgcctattgtgttagttcaggattttttcatttactctttttttttcttttttgagaaaattagatccctttataaaatgctttagttttagggggacattttagtcatctaatttatgatttgatcagtttgggacaatatagctgataacagaactcctaagtttggtgatatgccatcttaatttaaaggttaaaactgaacagtttttaaagtggtaaaacactaataccatttgacaatgcagacagctctcttaagaagaggaagtttttgtgtttgggatagttcccaatttttcctttgtttgcagagaaattaaactgcagaaataccgtgctgaaatgggagaacataaaattctgtaaagagtccttgataagtggtgccggttcttttatatgaaaattctacttttagcccataatcagtagggacttgcttaggttttctccctggatagggaaaagctattactgggctcttaaataataattgccaacatttgttagacagtatgtactatgcttcagattctatgctgagtactttatagtttttttaaaaaaacagtttggagatataattcacatactagacaattcactcatttaaagtgtacagttcagcggtttatagtatatatatataatcaaataatctgcaaccatcaacacagtcaattttagaacattttcattaccttaaaagaaacacaccaggcatggtggctaatgcctataatccaagcagtttggaaggctgagatggaaatattccttaaagccagcaattagttagagaccagcctgggcaacatggttagacccccatctctaccaaaaaaaaaattagcctggtgtggtggcgtacgcttgtggtcccagctacttgggaggctgaggtgggaggattgctcgagctcaggagtttcaggctgcaatgagctatgattgaaccactacactgagtgcagagtgagactctgtctctaaaaaaataataaatagaccgagcacggt

SEQ ID NO: 71353 - DNA, 1050 bp, Homo sapiens
gagatggagtttcaccatgttggccaggctggtctcgaattcctgagttcgggcaatccacctgtctcagttgcctaaagtgctaggatttacaggtgtgagccgccctgcccggcctccatcttcttaaaaggaattttttactgttggcattgtcatttaaataactgagtttaggatatttgtctcctcatctgctgtcttacctgcctttttctattgaataacacatcggatctcttctacattaaagtacctgccatacaggtaacagtggcttggaggaaacatggtctttcctctaatgggacattttagagtcttgtggttgccactggctgagggagcattctctgcccactgaacgcttgagtaatcgacgccctggaatggtctcagcaaatgggctgagcaggattttgctactagtaggggttttcctgtatgtgttcctagcaggatgtgtttcctttcatatgaaccatagaagtacatctgctggaatctttaaacagatagcttttcaataaacaggaaaaatgtcaaaattgtcattttttatgagatggaagtagaatagagaaaatgtaacatttactcaggtgttttgagtgtattttatttggtgctgttgcaatataaataccctgtcttgtctgcattttttcctcctaacaccctacatgtttcctatgtagcttataagataagtttttttttttttttttgagacggagttttgctctgtcactcaagctggagtgcagtgacgcgatctcggttcactgcaacctctgcctcccgagttcaagcaattctcctaccttagcctcccgaatagctgggattacaggcatgtaccaccaagcccagctaatttttgtatttttagtagacatggggttttgccatgttggccagtctggtctcgaactcctgacctcaggcgatccacttgtcttggcctcccaaagtgctgggattacaggcgtgagccaccatgcccggcccttttctttcttttgtattttgtgttttgagacatggtct

SEQ ID NO: 71354 - DNA, 1028 bp, Homo sapiens
tctagtgttttatgcatgctctttcaggttgttcctcttttttttttttttttttgagactgactctcgctctgttgccaggctgcaggctggaggagtgcagtggcgcgatcttggctcactgcaacatctgcctcccgggttcaagcaattctcctgcctcagcctcccgagtagctgggactacagttgtgcgccaccacgccctgctaatttttgtatttttagtagagatggggtttcactatgttggccaggatggtttcaatcccttgacttcgtgatccgcccacctcggcctcccaaagtgctgggattataggtgtgagccactgtgcccggcccaggttgttcttttcttggacaactgagcacatagtcctctggctaagctaaggattttcagtgagaagtaagatttgcttccttggtcataacagataccctcttgtttgtctcagtacatttgaatgcctacagctggtttctgtattttgatttttccatttttactcatatttataaagtgtaggcaaagtgcagtttcacatttaaagtgttacacaaactggccaactggactgggggctgtcaaagcagcacccacaggacagagctctaagtgccattgttggctgatgtggagaaactgaattgtatatatgattcgggattgattgttggaaaagtatgacagttcatgggctgaaaagttggaactgctccgtactttgtagttcaaggtcactgcatctttctcagaagttctttatctttggaggagttatacgtcttcaggctgaaacgtgacgggcctggaattgatgagctttggaactctctccaggcctagctctgtgaggcccgagcctggaggcttcttggtagatcttatttgcattttctctttattcttagaaactttaaaaactaaatgatattgagttattgaattgaaacaaaatgcatttttactggtatgcctcattcttggcatcttacctgttacctggattaataatgatggg

SEQ ID NO: 71355 - DNA, 1963 bp, Homo sapiens
cttataatctgagcactagtaagcagtggttttaaagatttgtcttgtatttggaagaccgattattattgcaaaggtgcccttgcattgcatcttgccagaaaaattggcattagtaggccgtctgtatttgaaaacaccaagtttagacaggaacaacacaggcccagtactgaactattaatatatagattgtaacagacataatgaaaaccacttaggattagcaaaggttgattattgtttcacaatgtggttgttctgtctttgggaaaccaagacagactgcaagtctggtcacatggtggtttggtgtaagagactttcttgctccattgtggaactgggtgtgggtccccatgtctcaacaactgctgaggccttcattctggatgaacaaagctgtagatttttcatgagagaccatagtagacacacatgggaaaggaagtgttaggagagtgaagccgtcaggctgtattttctacttttgatatcataggggtgcatgacaaaattcacaagcatcccttccttatgacaaatgtttaatcaccattatttgcttacttcacaggaaagatacttaaattccttttcgtaatggtcaagcattctttcctagttaaagattctaattcctttcattcttaggaacttaaagaattgactgatttattaacataaaaactcaaatgtggctggagtggggactgaggaacacacgtgaaagtgcgctgtcatctctgttaagcagagggatttattaggaaactagtcactttggaagctagatggtgaattaattttgtggttagtagtatctttagcttaacaatgtcatcctagtttttcttggcaagcaagagagaggctggagccaatgagggctggccacagttctttgggggtgatatttaataagatgcacgttgtctgttttagaaatagagtaactgtcctttaggctctctcttctgtgggccactgttgctttacagtgctactgtaggaaaagataagttggaagtcttcttttttctccctaagactgctagtttgatctttttatgcattatgacagtgtcttgagtgcagtggactgaattacttttatcaagtagaacaaataacatatcataccttcaaaggatggttatgaactgtgtgtttctctgaaagtgaatgagcaagagcccagatgaaatttctgttttggaggcaggcagtgtgtacatttggtccccaactcaagactgggttgtgttccagagtctaactcagttatttggaactcagatctactagtagtaatttctatctattgtgttgattcagcattgtaagtggtgggtacgttcccagcctagactgaaggaatctgtttaattcacagcagtttttgaaattgtttatggtgatagtggaattctggatcttgggagctggtagtcatgtgaaagagaagtaaggactcatgccccatgccccaggagcctccctgtgcaggctgtgtggcgtccaggggtctcatgccactgcagccctccaggtctgtgctggccctccttgttcttcatcctccttcatctctctcttaatttgaagcttctacttccctggttaagctcactttctttaaatcatggtagcaaagcacatggttcaaattcatttccctgctagactaccgctgttattcagggttgggatgactacaggctttattcatgtcatttcactcatgttctttaacccttttagaggtgtacaatgttaatatttttaaagaggaggttccttactgataaacagattgtctctttgaaatgtttgcattcagtcattacagcaaggtttcaaggggaaagttgagcagaggcatgtgaagtcaggcagaccccacgtaaggaggctagtcctgatacctggaatcaggaagaaaccatgcctgctttagaaa

SEQ ID NO: 71356 - DNA, 1075 bp, Homo sapiens
atctgtctgaattggaaatgtctattcagacagtcttctctattcaggtctgtgtattcagtctctctgtctgtgtgtctgtctgtccattttaaggaaagttcctggcaaaagatggatttttttaggatttgaaggagattgcactgcagtgcttgagataactcttctggttacagtgtgataaagtgtaacatcctgtgtgggaaaagagcctctatagttttatggtatgttaaattaggcctgtcatttggatcttacattaataacaaaaatacagttcctcccgtttgctgcagtaatgagtaattaatataatgcaaaggtcagagtgagagagactataaatgggagtaggaaggcctatacattgtatgtggaaggcagttatattttttcccctttggtcaggcaatgatctacatttcttcttaaaaatttatgaataatggattatatttggcaccagtatctcaccatcttttaaaggatatattattttgggagatttgggagattattgctcaggtacagaggtcctcattcttgactgccttgtgatgatcatctgtggacctatatgaatccagctgcctgggtgtgagttccctggtgactctgaatcacagccagaacaggaagcactgtgggctggtctattcctcattttacagatgaggagactttggtggcaggagcttgacagatttacccaagatcaggaacttaactgccccttcctttgtgtggtatgaattaatttttatagttagttgtgtgaatttatagtatagtgtggattttttatttaacaatgtgaacctgacatggctttccctttgtagtctttgacccagtgcagcagttccatttgcttagcctttcgtcatgctcttttgccagatctgcaaaccaagcctattcacggagttttcttcagttaatcaccacagttggtagcatgtacctatgttgttgttgttgttgctttttcccacatattcaggttgtgcatgtattaaactgtgaagtttggtccaggtttttaggaggatttttagatgcattttta

SEQ ID NO: 71357 - DNA, 1076 bp, Homo sapiens
ttcctccatgaaaacttcctcatctcacaggcagacatttgtccctgccctcatgtattgtacattcatcaggactgtttgctacaaagaactggacctgaatttgagctaatagtctgaaaggtgcctttccatacaaggcagaatgcaatagagcaattcacatggaaggcagactgagattctcttgttcatggcttggtcattagtgcctactggatattcgctgaatgaatgattgtttattgaagttaactggaaagatcctgaggtcagtgggtttctctgattatcatgaatgtctttattgcctatgttaaaataacatgaatggggtaactcccttttgcccttctggcatccaagtccagctcttaccaaaaagtgctcaaatgtaaaactgagtgtttaaaacatttccccaatggcagaacattctcgtccaggttctttcccccgatgaacagtaatgactggcgcacagtctcctcagtagggtagatggccagcgaacacgatttagtcacaccaaatgcatacaggccgaccctgatagtatttggtcagttagtactggaactacccctgtcacactcatgagaatggttgtaaattggattttaagggtgtgtactttcttttcattctttttttttttttttaatgttttgtagagatggggtctcactatgttgtataggctggtcttgaactcctgggctcaagcaagtctcctaccttagcctccgaaagtgctaggattataggcgtgatgcaccatgcccagcctcttcattcttttgttcatgctctcctctcttggggtgtctgactcaaattagtattctttagttatattttgtgttcttatgttcattttttttttttttgagacagagtctcactctgtcgcccaggctagagtgctggagtgcagtggcacgatctcagctcactgcaagctctgcctcccaggttcacgccgttctcccgcctcagcctcccaagtagctgggactacaggcgcccgccactacacccggctaattttttggtattttttagtagagatggga

SEQ ID NO: 71358 - DNA, 1010 bp, Homo sapiens
cattgtccttatctggcagaacgttctcctgacaccagggcctgctggaatagacagaaacatgattaagtataagcagttgctttgtaccgtctgttcagttgtgaaggcaaatagatacctgtttaatattaattcactttctgcattccctgtaaaactgaagaaatgtgcaaaatctattttggacttggttctatacatttcagatgatttaaggaaactagtatttttggtttggaggtatgtttcacagtcataatgtttggctatgaagcataatagtaaacattggatctgagaaatcgcataaataagtagggaaaaaagtgaaataaaactgagaattgtgttgtaccttaggtcttgaagtgcagtgtttcgtggtggaggttagtcgtgtgtactgaggattggacaaagatttggtataaacgtcaggagcacacatttttgacaaatatagaacctatcttgtccatatttattttgattacttgtggaaggtacattaaagcctgatgaattttaatagatacataccgatgaaacataactgcacacaatattgactttttcatgatcctttgttactttgcctgcagattgtgctaatcagcatttatacttatttatatatagtttaggattagattcggtgtcagtgaatagcatttttttaaacaccgttggattttttgataaaagttttatgtttaacttatctgtcacttctgggatccactccaaccatgaggaagagagtcactctaacgactatgagatggaatgttcaaaaggatgaatatcaattcttagttatataagtgggtatgtcgacgagtctcttctttatgatggcaaaattttaatttctcatattttgatttgtcacaaactggtactttagaaacatattattaattggtctgttttacctttgacctcttttccaggggtggggcaataataaatttgagagctacttgcattttcaaggtacaaatcca

SEQ ID NO: 71359 - DNA, 1130 bp, Homo sapiens
agatcgcgccactgcactccagcctgggtgcaatgaaactgggagtgaaactccgtctcaaaaaaataaaatgctgtatgaacaagatgagcattctgtcaggtgtcgggacacctgggcaaagacgaattcatgctgtctgtgaaaaggaagtttgcactgtaacatatgccatagcttggcccttgctttgtatgcaaccttagctgatggggaaaattccaaacataagtggcacaggaaagaggcaggcagaggaggcaggggtctgtgctgtgcaagtcactggttttttatgactatcattttcattgaatgcatttgttgaattgggacaaaaggaacattttctaaatcagcttgatactctttataaaaaacagctgaatcttatcttctgcctcacattaattcatgtggcatgccaaaagttagactgaacttttctacatcttcaccttgcattgatacaggaaagtcttctctttaagtcttgctaagtataagggggatagtggtcacgggaagaggagaaccggggctgctctcggatggtaattgacaatgccgatttccatttctttgtcttacggctacttccgagccttctagcaaggtccctggttgcatgtatttcctaagagcagagtttatttctctttacattccctgcttccttgctctccatgcagggaccccagccaacctctgggctgttgaatagctctctgctgggtggcaagcccttctccttggcaccctgttgcttaagcatacagattgctcaccaggtgcacacagacagctgtactgtccaagcccattctgctccaccctgtcctcttcagctaaagagcattccagtaatctaaagcccttttcccctggagaagtccagagtttgcagcagtgtggagctgagcttgaacagaacagaccctcagcacggccctggactaatgcactcttatctgagggcagtccattctagaaggttgatgaatttccctaccactctcctggggaccttttctctctagtgggaacaaatgctacataatttagtcaagatcctattaagtcatctcacctgaggcatctggagagggagttgccttccattggtggga

SEQ ID NO: 71360 - DNA, 1233 bp, Homo sapiens
ttcctctttaagacagggcctggctctgtcacctaggctggagtacagtagtgcaatcatgactcactgcagcatcaacctccctggctcaagcgatggcttttacctttttaaggagttgtaaaaaaaagaaataatatgtgacagaattcatgtggcccacaaagcctgaggtacttactgtcaggccctttgtagaaaaagttgctgacccctggtttgatttgccacacagggctgctcatggccctgtaggaagaaactgggtaaatgtgaagccctctgcctctctgacacctaaggccagacccttccctcctcccgaccacaagctttgccagccccgcactagcctcacctgtgcaggatggagtaggttgcgtacatgggggaaggcaggtgaacacagttggctgaagctcttccacaattccatcttgccctcagctgggtccgccagattaactcagtgaaaccagaaagccttcaaggaccagctgaattctgaaagtgagtgagtgagccatcatcttaacattggccagaactgtgttccccaaagctattctagaaagcaccccaggagggatctgcaggaacaaggctagttcatattttacctagtgagcacagtttttgcaaaaatcctccctccaggactttgtctccttggagtgatttttaaaaatacatacattactttatagggagctgttttcccactagtgtcaattaaaatcaccttaaaaggtgattatccacttattcctaaacccctgtgggttgttccccctttccctcagccaacaaaagcatagcctcaaaaaatatcaagttcggtatgttttgccaaatcaaatttcatgtggtagatcaatttttgtgtcaaaataatcttttaaatttagtgatgacaggcttttgttggttttttaaccacgtctatgtatgagaatgatatatttttgaaaactttaattttgaaagccataatttttcttatctaaagagttggggggtggggtgtggaatctggagagtacaagttggtctttggcttctggcaaacttacccattcatttttggaagcacagctagcatatcaacatccagacgagagcgctggtcccgtccacagagcagagtgaagcattctggacttgatgcttaatagcctggcctggagaaaagggtaaggtttatttttggaaacccagatcagttgcatgtaa

SEQ ID NO: 71361 - DNA, 2099 bp, Homo sapiens
gaaatgagagcctcccctccaggcctggcccccagtccggcctcgcacccctttccctgcccaccctcatgtttttggtctttggctcatgactgcaccgtctcaccatgctcttgtccccttccttgcaggatgatgctatatttgggatccttaacaaagtgaagccttcctataaatcctgtgccgactgcatgtaccctacagccagcggggctcctgaggcctccagggagcgatgtgaggaccccaatgctcccgccatctgcacccagccagccttcctaccccacatcacgtcctcccctgtggcccacttggccagcaggtcccgtgttccggagaagccagcctctggcccaaccgaacctcccccgttcctaccaccagcaggctccaggagggcagacaccagtggccctggggctggagctgccctagagccaccagccagccttttggaaccttccagagagaccccaaaagtcctgccaaagtccctccttttgaagaattctcactgtgataagaaccctcccagcacagaagtggtaataaaggaagaatcgtcacccaagaaagatatgaagccagccaaggacctgaggcttctgttcagtaatgaatctgagaagccgacaaccaacagctacctgatgcagcaccaggagtccatcattcagctgcagaaggcaggcttggtccgcaagcacaccaaagagctagagcggctgaagagcgtgcctgcagacccagcacctccctccagggatggccctgccagcaggctggaggccagcatccccgaggagagccaggatccagccgcgctccacgagctgggccccctggttatgcccagccaggccgggagtgatgagaagtcagaggccgcccccgcttcattggaaggaggctcactgaagagcccccctcctttcttctaccgcctggaccacaccagtagtttctcaaaagactttctgaagaccatctgctacacccccacctcctcttccatgagctccaacctgacccggagctccagcagcgatagcatccacagtgtccgtgggaagcccgggctggtgaagcagcggacacaggagattgagacccggctccggctggcgggcctcaccgtctcttccccactgaagcgctcacactctcttgccaagctggggagtctcaccttctcaacggaagacctgtccagtgaggctgacccgtccaccgtcgctgactcccaggacaccactttgagtgaatcttccttcttgcatgagccccagggaaccccgagggacccagctgcaacctccaaaccatcagggaaacccgccccagaaaacttaaagagcccttcgtggatgagcaaaagctgacccgccttttgctgcgtcaggctgggcggatattttcatatgatccctccctcactttcactgtggatttggatcgaccccttacatcttgatttcccttaaacgagtgaagtcatcctaacttttcccctactcttgccatagagaggaggagaagaaactaaccaacatgcagcacaagaaggggagctgtcagtcgtgtggcctgggagaaccaggagccgccggccaggagacacaaaactccgctcccaccgtgtcttcaagaagaaccatgttttaggaagaacgtgcacacataggcgcacacatccagactgttcccttcgcatcctgcagaagagtcctggtggtggcagcctcaccgcggcacacgttctagctcattcttggcctcgcagaaaactctcggatggcaacattaagtcctacctctgttctcgctgcgctttttatttttaaaacacacgaatgaccaaggcttgttccagggaataatgctctgtctgaaagcgtttttccaaaaaaagaatttttcgttttgtgttttggttgggaccccagacgtgtcaagacttttaacccgacagccccaagcactgctgagtaaagtcatcagatgagtagtcccacgctgttgttgagctgactctgtgcccgaatggtggtgcaggcgccctgtcctggttgtgttgttacgtgtttgaccag

SEQ ID NO: 71362 - DNA, 1014 bp, Homo sapiens
gagaggatgaatggctctgtcacactgtgctcttacatttacctctctctttttaaccctcgcaagcctgtgatactggtattactttaaggtccttgagggtgacttagttaccttatttcaccgtaaactttttttttatgccttacattttaaaaatgtattacagggcttggtgcagtggctcatgccagtaatcccaacactttgggaggctgaggtaggaggatcgcttgagaccaggagtacaagaccagcttgggcaacatagcaagaccctgtcactacaaaaaaaataatttaaaaattagccagggatggtgtcacatgcctgtagccccacttgggagggtgaagtgggaggactgcttgagcccaggagtttgaggctgctgtgaaccgtgatcacaccactgcactgcctggaccacagagtgagaccctcatctcaaaaaaaaaaaaaaaagggattataaaaacaatgtcatcatagtagaagaaattgtttaaaaactgacctaaacctaaacaaatactttctagttttccaggatcttcccaaatgcattgcagtgcgttatgtgtgtgtatagttgtattatcgtgtatagatctgtacatactccactttgattcccttcatttccctacaatataggtaggagagcgttgttattcttatttgacagagaaatgagagatggagtgtaactgacgtgacaatgaggcatcactaaacacagatacacagattgaagtctagacgcccccgcgttccttccccgttgtcatcagaggcagaaagtcacatcaggcttcctgtgcgagcctggacaacttaggagccagtgctgtttctcatccttgtgtttcttgggaacaaatgaacagagagaggctttacctgaatgagccatggatcgtccctggcgccctgaccttgggcagcccctcactggctcaccgcatactcttcccagcacccccaggcaccatcctcctcccctcaccttc

SEQ ID NO: 71363 - DNA, 1213 bp, Homo sapiens
aaatctaaagaagaaaaaagcattcccgatctcgcaaatccagaggtagtccctgttaacattttggcatatttattttcccatcttctgtttttttgggtttttaaaatgcatatatagcttctttgaaaacgcacaaagaaagaaaggatcatactgtttatgtttatatagtcctgtatcctcctctcttaaaattttttttccttacatggtatttgcctgtgtcattaaatattctgcaaaatttatttgttttaaagactccatcatgaagatccagcctcatttattttactcattttttccctttggacgtttgggtggtttccactggtttattacaaataattataaatatcctcctacctaaatcactgtgtgagttctgattatttcctcaggatagctttttgtaagtggaattactgggtcagagggtgggaactttttcagtattgccaaaatacttcccagaaggtagaacgattcctgctttaattagtggcttgtgaacgtgcccttccctgggtgggaggtcgcaggtcattgcctctgcttacaggacccccccccactggactcttaggaaaggaagtggggagacggagagcaggttttcctggacttgctgtttccctaaggccaaggggccagtgagggccgggacccttccctccctccgtccctccctcccttcctctcatgctctgagtactcactcaggaatctccttgaatatcagccgctggttctctctgttctctgaggccaatggggccatgaaataagacctcaccgccagagctagggcaaaccatgcatcccctgagcagctctgaggctgacatgtgacactcacaggagcttgtgtgatctgtctcccagggctctgaatggaatgcatccaatctggaggaactgcagggctcagggtgagtctcctccccttgtctttccctgtccttccaggcagcttagaaaccctccactctgccatggagggggagaccttggggctgcctgcctgtaattgcctgcaccctggtctctgaagtggctgccaggggttgatgtgcatagctaaacagatgtgcttccaaacaccacgccctgaataattcatggagtttagattgtgccgaagtctcgcgtgatcgtgtggattgaggaaaacttaaaattacactctaattgctgtaggaccgcctgg

SEQ ID NO: 71364 - DNA, 1231 bp, Homo sapiens
ggagaatgctggtcgcccctcccctcggggtcaggaccctgctcccacagtgtggtgttcctccaggacactgcattttgggaagactatggataaaccacagtgtgttcagagggcagagacctgagggatgggaagccacattaggagagggccttgaaatcacggaggaagggtagttgcctttgaatatttgaagattcctcatggggaagaaggattatcctggtctgtgtgtcccctagagttaaaaccagagcagggaaatacccagattttgattctgaggaaaaaggggataatgggatctgctgcagctgggccgggctgcctcagacagtgaggtcctcatgcccacacgtgttcgagcagagactcaagggcccaggggcctggggatgttgcgctgggcatcccagcatcctgccctaagagcgtctgagcaaggagtttccacactgtcctctccccgcttgacctgctccctgctctgttgactcccgtgggagttctagagctgcagcgggttttctgtgcacctctccctgctgcctgagaacatgcacaccaagaagcgtgctctccttgccaagccgtgttctgtttagacccaggagcatctggcattcctgtaacctccgaccacaagctttctacagctccttgctctcctaaacgtcatttctttccaggcccactgaaggggaaaggaccgagcgcctcatcaaagccaagctccgaagcatcatgatgagccaggatctagaaaatgtgacttccaaagaggtaagacaactcctcccttcattgcaggtcagaggtcatgcagcctccatgtgtcctgctcccgaaagtgcagcaaaagcaggcccaacatctggttgtctttacctgtcctctggtatcagcccccggaggcttttttctgcctcgttctacaattgtatcaggcctcggagtcagactccagtttgagtccagatctgccgcttatcggctatgagacattgagtgaatttcttgacctttgtgagcctcacctatatggcctttggggagaagtccatgagatccacagactgcaccgagaagcattgatctgttttaataacacccccttgttctctcttctgctccctattaccttgggttttatggaagagacagcagacttatttctccacaggatgacagcttgacctgcaagtatcaaattctagaataatttctc

SEQ ID NO: 71365 - DNA, 1106 bp, Homo sapiens
cagccgggcatggtggctcacgcctataatcccagtactttgggaggccgaggcgggcagatcacttgaggctaggaattcaagaccagcctgtccaacattgtgaaaccctgtctctcctaaaaatagaaaaattagctgggcgtggtggtgggcgcctgtggtcccagctgctcgggaggctgatgcaggagaattgcttgaacccaggaggcggagattgcattgggccgagaacgtgccactgcactctagcctgggagtgacagagcgagactctgtcccaaaaagaaataatcaaccaatcaatcattgcccttcccttcccgtatttgaacccctttgtcagaggagaaaaccctgcatctcttgtgccttcccaggcctgaccctgtcttctcctcgccccaggtctgccctgcaggtgcttcacaaggcctgcgaagtggcccggaggcacaactacttccccgggggtgtagctctcatctgggctacctactatgagagctgcatcagctccgagcagagctgcatcaacgagtggaacgccatgcaggacctggagtctacgcggcccgactcccccgcgctatttgtggacaagtaagtgaggtgcctctggtgtgagcgcacccaagcccacaggcacctgcctctcccccacctgccctgtgcccgaccctgaacctgcattgggccacacctcccctggagtcccttgagtgagaaccctagctttctcagaaccagcgtttaaagcaggggtctgtgacacaggcccctgtcccatgcaaaaaaaagaaaaaaaaaaaaaaaattactgatgaatttggtgaatgcatttctggggacggggtccgtaactcccatcagactctcaaaggaatgtgtggccctttgtgtccccaactccttccagagctctgtggtctggccttttctcttcagattaccagagacttaattctcagagcctcccgctctgctctgaggagagttaggaatgtgtcctctgcttccttggatccaaaaacacaactggtgagggcagcctgccttagcagcagccatggtgaaccacatgacctgtgtcgtgtgaccta

SEQ ID NO: 71366 - DNA, 1552 bp, Homo sapiens
ttctgcctgtcggatttgggctccatagggaccctttccttgcctcctcctggggctgacacagccacgtggtccctagagctctgtgaggcccaaaataaattttatttttcagtgctataagagaaatactagttagtccctccagagtgggtaggatggcacggagggacctgagaatttgcccaacccaaaagcctgagtgtcattggccggaagggcttggaacaaccttccccacagatatagaagcatggggttgagaagagtcctgcatggggcagggcgctacctgggaggggagctgggtctgtgatccccagaggccccattcacacgggcacacataaaacatgaccgtggtgttggcagcagcagagatggaagcatgagattcctgaggtccacagagctggctcttggcacggttacagcggcttctcacaagtcgacttttaaatgcctgaagaattttcatcataatctgaggactctccgataagccctttctttccctctgtttttcagtggcgccagtctctgcagtcattcggtctcatttcactggtaggatgggcaaaacaaaaccagattaagcgagattgtaaaaccgcagccacactaaaggcgcaggtgcacaggtctgaaagtgagctccgggaacggtgtgagcacgctccccctgccgccacccaggacaggccaggccgggcttggctgccggtgcttgcctatgtacccccaagtacacatgtggcctccgccagcagagcaccagccctgggcagctgcctccctgctgtagagtgggcgtgcggtcagcccacactgcacccaaaagcctcagctgagcacttacggagttgtgtccacagggccatcccagacctgtgtcttctagaattcatcagtgaacggttcctatgcagacagcctactcccacacgtacgtccaacagcccgtcctggaccaggtggtgagctggaaaggctgtacacgtaggtgggtagacgctgactccacatgtcttctctcccccatcgcagtaaaagctgcaccattgggatggttctccgactgtggagcgacacgaaaatccaccttgatggagatgggtaaggaggtctctttaaaagattctctcactgtatgtagtaggcattgaaaacacgagctggttcaggcatccttggatgatcattagcactgaatgacacgtgtggcgggagtgtcacagcgggagaaatcatattgccctcgagtgagagggcacgagggagggtatgttttggacgtctgattggggagtttagctcatgaagtatcagtgggagtgattacaggagatatgctgctgtgtgaagttcaagacagcggtaaaccgatacccatccgccacctcgatgggttaagtgaactctcaccgcatgccctccatggggcttgtcctgaaagttcacggactaatgtggtgcagcaggaactcaccagctttgggggtacaaggagagacatacaactgacaggcacaacaaggtttcaagcgccacc

SEQ ID NO: 71367 - DNA, 1089 bp, Homo sapiens
ccaagatgcgtgtgaaatgagggtggagtcactcccctgacatcacaagataaatgaatgcctgtgagatcattgcaaaacctggatttgttaaaactagattagattccctttattcatcattcattcatcgactcattcattaagcatatgatttatttgcattctcctgtgtatgaggcaatgggctaggcccaggtaaacaaagaagcaacagtacacacagttcttggcctcagagagcttctaagtgagcatggaagacagtcacaaccagataggagggagagagtgaccgagaggtgctggggttttgtgagaccacaggagggggtgactgttgagagcacctggcaggacctttctggcaggagtgaagcctaagccgactcttaacgggcaagtgggcagtcaggcgagctctagggtggaggcggagcagcaaggtgcatttgaggagcatttgaggcagaatcaacagcagaaaccagtcagggaggccgtgagtgtcacggtaacagtatggtcttgtcttgttcccatgagagcttctgtaagtcacatgctagcgactgagactttgatgcttgttagaaggagatgaataaaaaagggaggacatttcttttatgacatggcccccacccccgcagtacataataaatagcactatgagaaagtttcctgtgacacatgtagaagatggagttggggctggcctctgtggccttggggtggttgggaacctggggctagaagaacctgtagcataggaggtgttcggatgtgagctctgaagagccacttggagactggagggcatggtccattaggatggggtgccaccaggcaggtgctctcagaaatgcccagagccccatctatttggccattatctgtacggttctgaggcatagcggtgtttagtgtttgaccgtcttgcggttgtaattgttcttccagtgactgtctagcttttctgaatctttctgaggcagggacttccctcgcaagtgtggcctgttccaataatgctttctgatcccgaacggaaatcggcctcccatggcctgtgcccaatgtcttgat

SEQ ID NO: 71368 - DNA, 1024 bp, Homo sapiens
accatgtctctactaataatacaataattagctggccatggtggcacatgcctgtaatctcagcttctggggaggctgagacatgagaatcgcttgaacccaggaggcagaggttgcagtgagttgagatcacaccactgtactccagcctggatgacagagtgaaactgcgtctcaaaaaaaaaagaaagaagaaaatgttatatgacagtgagatccctgtccagtattctgcagaaaggggccctggagagcctatgtagaactttgggtgttgtcacagaagcattattttgtcacgaaaattctccagcagcaagcttttagcaaaagcaaggtttgagaaaagtactacgtggaattattataaaagcagtttcatcctatttgcattttacatgccatttgtccacgctaaagctttttcccctgcagtaattctttgtccattttcctgtctgaattccggtctaactgtgctctggtcttatccttcccagcttaagtgagagctttttcatggtgaaaggcgcagccctcttcttacaacagggaagcagccctcaaggccagcggagtcttcagcacccccacaagcatgcaggtgagggctctaagttgatactcttacattggagcttcttttctggacagcagaggaaacttccattgttggtgatgttgctgagtttgaaggccttagacatagtggacgcaggtttgcagtgaccagtgcaggcagaggctcagatgctctctcttgagcagaccacgcacattttccaaccttttatgtcatgtctgtctgcgtcaggagtaaggtcagcagcatcctgctgggatgcaaagatttcctctctgtagtttatcagttaattgcaggctgtaagttacagcctgactttttaacaaatgcaccaaaatgaattatagccagatgtcgtccacttgaaaataaccatctggagtgctgtatacctaatcttgggatggatttctccaagcatttgaaaaacactcattt

SEQ ID NO: 71369 - DNA, 1086 bp, Homo sapiens
tctttgccaaaaattaagttctgcctttgtttgggtgttttgttgatttatggaagattcagccctttgttatattaatatcatgtattccttcataccaaggagccagtcttaaactctgacctcatagttttaaaaaaagtaaataaattttcaggaatattgttctttaaaaaaaaatagtctgttttatctcatgaggggaaggaaaattaattggaaaaggaaatatgtgttcagaaattggggtcaaccattcattaccgacagcagggtgttctggtcaaactcatatgcagaactggtagaaatatgctcagcttttctccgatgtttctgtgtgcttgagtgaagggaggggaaatactcacttttattacggcacacatgatttctaaagattatgtgggtagggaaacactagcctgcaagaatcaaagagattccttatttctgggtcctcgctgggggacttctgctgggtcctcacttttaatgttatgctcaagatacaggacacatttgctccatcaccctggggtttttgattggtcaggtcagggcccacgtcagggttcccaggctagaagcagctggattcccaatgggggcagtcatgggccgagttgcagatcagactgtctgggtggaagcagggaggggtggagtggaagtctggagactgactgtcgaggaggaactgaaagaggggcttgcccacctcacagcggctcctgtgggcgcccagctcccttccccccaaatctcccccagatgcctgcccccaactgccctccccaccagctcctctctccacctgttctcctccccaaaatccccttccccagatccctccctccaggttcccctcccccgactccccatctctcttccccactcccctcccccagatcccctccccaagcttccctcccccaaatcccctccctagatcccatccctaaccatccctccccaatcccctctcccatctcccctccctgaagtcccctctctgagctccccttcccccagctcccctccctaaatcccctccccaagttcccctccctcagctcccttgcc

SEQ ID NO: 71370 - DNA, 1013 bp, Homo sapiens
cactgtgcaagtcttgcctgggttggttttttgaaaatggtgttcatcactcagctgttattgcctggctctgcggaggaagtggattctctttaaacatgaccccctccccttaaaagagaaaaacaggataaggtccagaacaacctcggaaagttgagggctgagggctaaaagaccgtgctgggtaacaacaccagataggaaatgttgagctaacaggactccatcccctggactgcggcaggaatgtgggtcaacatttggaaacctgaaaattcccccacggaaatgactccaagggacagaccgggattggtgaggaaagggcacggctgtttagaagtagctaggtttcctggatatctttatctttttccagtaccggggtagaaaatgtgagactgccgcccgaggcgtgttgacagtggtgcctgtggtgtgatattctctttctttctctgtagttggaggctggcagcgaagaagatcgaaaattaaacctcaggtaagcagactttcaattcttgttcctaagtctttctcccaagcaggtaaggaatgctcttgttcctctcccaaagggaaaacgttcaaaaagaatatgccaattttgggctgggtgcggtgggtcacgcctgtaattccagcactttgggaggctgaggcgggtggatcacaaggtcaggagatcgagaccatcctggccaacatggtgaaaccctgtctctactaaaaaaacagaaaaaattaaccgggcgtggtagtgtgtgcttgtagtcccagctacttggggggctgaggcgggggaatcgcttgaacccgggaggcagagtgagccaagattgcgccactgcactccagcctggcgacagagcaaaactccgtcttaaaaaaaaaaaaaaaagaatatgccaattttttagtgctttagaaattatacctaaaacacataaaactgaagtgctttaaaatccatacatatgtctagccactttaataatattatataa

SEQ ID NO: 71371 - DNA, 1121 bp, Homo sapiens
aattctcctgtctcagcctcccgagtagctgggattacaggtgcccacctgtactttttagtagagacagggtttcaccatgttggccaggctggtctcgaactcctgacctcaagtgatccacccgcctcggcctcccacagtgctgagattacaggtgggagccactgcacccggcctgaatgatgactcttgaggggaaaaagtttactcaggtttgcaggtacaaaatccaaaatccagggctttgggttttgtgcatgggtagacagctgaatgggcagagaaaccagaaggatgctacacccaccatctcatcccatggggatcaggggaccaggattccctgatgcgaagctgctcctctgtccagggacgtcttgatcattacacaaaggcagcccctggagttccattcatggagcctgccgtggagtggagaggggtgggaggactcaggtgtgtgaaatgtatatgttttcaaaggaagcagtgggaggccagttggttttgagttggtctccgcaggcaacatcacttctgggatttggtttactggagccttttttcccatggtgaaggcaggggacatagacaaggagggaggaagctggcagatcccatcaaaggccagagcagacagacctactgcttgaagtaaacattgcaaggaagccaatttgtgcgttcaactcttattaaaacatgtcagtgatggacattgcaagagcctaagtttattcattgtcatcatgtcctagtgacagtccagcctaacggtctgactacctttgttcatcggaattcatctcaatgctttagtgtgataatctcctttccaatgagtggggaaagacataccgttggcagccaacattgtggctgagcttgttggagacaacactttcttctaatggtgtgcaggtcatgatgggggacttcttccagctcaagttctaaatcaactgcaaacaatactgtgtctctaaaatgtgggctgcagccccctccgcccaggcagttgaagaggagatggcttggcagatctctgtctctctctgacaaccacatttccttgaaccacgtgtggctgtagctctaattatttctggacagctgag

SEQ ID NO: 71372 - DNA, 1049 bp, Homo sapiens
agatgtcatctctaaagaaggaaaggaaaggaaggaagggagggagggaagtggggggagggaatggagggagggaggaaagaaggaaagaaggaaggaaggaagggagagagggaaaaagtgtataatacacttagaatatggtatggagcggtcactatctagttcaaaagctattaggtctatcttatctttaagaaggaagtgaaggtgcctggcaggcgctcggactccctctgatgatccttgggcctcctcgacctgtaaatactgtccttcggttgaacgtgttagagaataccacaggccacatttggcccacgagcaccaggctttctaggctacaagttgcaaactggtaacccataggccaaatatggcccccgatgtgttttatttatcctgcacaatgttttataggattttgaatcagttgcctccatttcaaaaatgacatcttgcataaaaataaagttatgtgttttttggaaaatcaggtaatctggaggcctggaacccacattttgtcatggtatcttttggctagagttgaacagaggctgacacgacagggaaagttccctgtaattccaccaggcccccatccttgctgtgttacatgtgcattgtgcatttatgttttctgtcagaggtcacagggagccatcaaaggctctagaggaagggagtggctcattcaaggttggaagttctggctccaactttggcaccacttacggatcttcagcaaattgctcaactacttgggcccttgctatgctaatttgtaaagtagacatgaaaataacaacctttgttcacagggctgctgtgaggacccagtgtaatgttgtgacagtggttaatgaaatgcaaatgaaagttccatgaagtcagagactctggctgtcatgttccttacggtagcccagggcctagcaaacagcaggtgttcaatatatgcatattttatgcatgaatggatgaataatatatatcagtatctttaatgctggctacacagcatgtgttcaacatgtgtttattga

SEQ ID NO: 71373 - DNA, 1035 bp, Homo sapiens
tagccactagctacatgtggctatttaaatttaaacttaaatgaatttaaagtatgcattttgtacatgaaataatttatatagtataataaagaatataaaatgtatatataatatacaatagaaaatatgtggccaggtgcagtgggtcatgcctataatcccagcactttgggagaccgaggtgggtggatcatttgaggtcagcagttcgagacaagcctgaccaacatggtgaaacactgtctctactaaaaatacaaaaaaaattagtcaggcatggtggcacatcccagctacttgggaggctgaggcaggagaatctcttgaacctgggaggcagaggttgcggtgagcaaagattgtgccactgcactccagcctgggcaacacagtgagactctgtctcaaaaaaaatgtgtgtgtatatatataatgtaaaattttaaaaaaatctgtccctcagtcatactaaccacatttcaaatactcaatagctacatgtggctagtggctactatattggacagcatacgtgtaggccagcagtccccaacttttttggctccagggactggtttcttggaagacaatttttccatggatgggggtggttaggtagggggatggggttggggtttcaggataaaaccattccacctcagatcttcaggcattagattctcataaggagcctgcaacttagaccccttgtgtgtcagttcacaatagggttcacgctcctatgagaatctaatgccgctgctgattgacaggaggtggagcttgggcggtaatgctcactcacccaaggctcactgtgcagcccggttcctaacaggccagagaccgttacgggtccttggcccagggattggggacccctggtctaggacatttccataattgcagaaagttctattggacagcactggtttggtaggagggaggacactgaacacatcattgcaaataattatgagaattgtcttaagtgctatcaagaactactgcaagcctggggaatatattgag

SEQ ID NO: 71374 - DNA, 1110 bp, Homo sapiens
gtagagacagggtttccacatgttgcccaggctgatctcaaactctggggttcaaaggatcctcctgccttgacttcccaaagtgctgggattacagggatgagccaccgtgcccagctgacttagattttaaatcctaatgtctaaacatcctgattttcaagatgtaatcctatgactatatgttactttaacttgcaattaggtatttggtgggttattttgacaaaatgttattctgtctatatctgtatatttgccttttgtgtttgtgtgagggaagacagtaaacttgttttcttttttagatataaagtcatgaagaactggggagttataggtggaattgctgctgctcttgcagcaggaatatatgttatttggggtcccattacagaaagaaagaagcgtagaaaaggtaagaatgagaacactgcatcatggtctgtagacttgacccagatccctgttatctgaaaacagtacaaagaaggtggggaggttggtcatatttgttctctgtatctttaaaattaggatttcaggttttcaaacagtacttttaccgttagtcattattttataccatgtagtaaaaagatttctatttcagcccctctccagactggagttggaggcatgctttgtaatgaaaaatgtcaagcggcataattgtctaagaagtgttctcattagtacggcaattgtagttttcagtggtacagactgaccaattacatcatacatttgtgttctctcagactagcttgctagtaactggtaaaaatttcaagttagtgccttcattactaaaaaattattttctttttttttttaatgctcccttttgaaagtgtggctctatgtaacattgattaaaattcagcaaagaaagaaagaagaatgtggtgaaatttgatcattgttaaatctggggacagttataattgaggtttattttacattctccctcctttttttgtgtctttgagaactttgataataaaaagtttttttaaaagattgctagcagaagagagaagtatattagatttcattgatctctgcagaaagactgatcagaattggtatagtggtgtctttcccagt

SEQ ID NO: 71375 - DNA, 1371 bp, Homo sapiens
cccttttccacaactacagctttgctgccttttttggaacttggccaccctcctccccgccagaccgctgttaccaacagcaagtctgaagcagaggccaagagaatgaagttctagagatgaaaaaatctagcccccagtgacatacaggtgcatcctccacagccacacttccaagatggccttgtccagcttcgtgtaggcgttgtctgccgccactatccagagaaatgggaggcggcatcttggacctcccaaaactgtggggccgacgtgaggggcatcgagagacttttggaaagggagctggggaggctttctagcaccccttatttttaaaggtgttctcttgtttttgctttattctgaagccacaggtcactttttagacatggtggtggtatctatactttcttaaaatgtatctcagttaatccaattgtatgttgcaacgtttttctatttagaaaatacttttaaaatcctcctctggtaactggaattatttatctacattttacatttccctaaactgagagaataacttggagatttagtcaccaaggacatcagataacttttttaaggtccgacttctccatcaaggactcacttaggtcccagtcactccttggaagtatttccaacatcttcagcccacagcagtcactgagcccacatcgtgctgtagtctgcaggaaaaagaggtgaacacgtctgtccggtggcctttttctctttgaaggtacccagagcgtctagcatgggccttgcccacatctttattatcagcgatccagtcaatcaggagcagattttccctgattgtcaacccattttctttgtctaaagctagagcttcagaggatgcattgggccaaaggcttgctttgtgcaaattacctgattttattatcacaataaccatgtaaggaattactgttgtccccattttacagatggaaaaacactgaggctcagagaagtggaatgatttgcccagaatcatgcagctatttaaggggcagagccaggatttaagacagtctagtgctacagtgcacattcaagctccccctcctctgcagtgctgtccctttccttaaggcctagttgttacatggctgacccacggtttaggttatagatccacctccatcctttctcggatctgcttcaagcctgggcccagatgcctggtgtgtgagggctccttgagcctcccaggaagtgctgattctcctccaggttccctgcttcctgttcatctgtacagggctgcacctctggtgtgccgttggctaatagctaggctgccacacctcccctggattgtgagtccctcaggggctagagccttgccttatttat

SEQ ID NO: 71376 - DNA, 1688 bp, Homo sapiens
gatacatggttggttgaaccctctcttaactttcatatggtggcatgattatgggagagaggaaaatgaatcgtttttcttttgctccagaaattttggctttttgaatacacacgcacgcatgcgcgcacacacacacacacacacacacacacacacacacacacagacattaacctcagattgaaagatacctaaaacagcgtggaagtccacaagttcgtgcagttacatcctcatgctctagaatctgtccgtagtagcagtctagggtgctttgagccccatgtttgtccaggaaacatccagttgtgactataaaactttattgcctgcatacatcaaaataaagctctggtcttcacactgccatctgctaacagtttcagtatagctgtcctttgaattgtagtaattttcttcttctcatgctgtagggtcacccattgaccctggaccactgccttcaccacttcatctcatcagaatcagtgcgggatgttgtgtgtgacaactgtacaaaggtatgcattgaaccccaaatgtcatcgccagctggcctgtgtgtgctgatgtagcgcctctcacaccagtgaccctgagctcttctgactgtatccagtgggtcttttcagccacttctacttctccctaatttggtttggacattggcagctcatggaccaaatctctttcccagatgagttttgtttcatgcacagtgtttaaagaataaactgtcacgctgagatgagaaatgccctctccagtttgctgcagttgcctccaatcccatttgttttacacccttccttttaacctgtgctacctgcctgactcccctaagtaacttgagttttcccctctgactcaagaggaactgtatggaacagaatttttgaagacagagaacaattaatagatgacatgccagtgtcagagcatcagtgttcgctcttcacattctcttccctccactgtttctgttatttaatgactaagagggatcagggaaaacaattcacaaataactgggcagctgggttcatttcagcaggtagcagtcaagtgccaattgtgtgccgctataacaccactgtggtctgcagcactccaaagctgtcctattttaggcattgctgcagagaaatgttccttttatttcagattgaagccaagggaacgttgaacggggaaaaggtggaacaccagaggaccacttttgttaaacagttaaaactagggaaggtgagcccacactacacaccctgttggctttgttttgaggactccgtgtatcctgcccctgaaacaactcggttctcccgatttctcttccacccgcagctccctcagtgtctctgcatccacctacagcggctgagctggtccagccacggcacgcctctgaagcggcatgagcacgtgcagttcaatgagttcctgatgatggacatttacaagtaccacctccttggacataaacctagtcaacacaaccctaaactgaacaagaacccagggcctacactggagctgcaggatgggccgggagcccccacaccaggtgtgtgcgcgcgaggagccgatgcagcaggaattttcagcacagagaaaagcagtttggcatcaccaccttctgggtcccttatgacaggagcacaaggcttgtacaatggtgcttaaac

SEQ ID NO: 71377 - DNA, 1088 bp, Homo sapiens
ttcagagacttacctgaaaagggaagaaagtgctcaatatatactttttgtattaggctattggaaatgaataaattcagaatatggacctagagcaacatgacaatactagatgccagctgtagttatatgttttttaaaaagtcaaaagctgctttctccttttcgtgaaaagggctgaactttggtggtcatcaaatctaacccttcacttcacaaatgaggaaactgaggttcagagagactgcagccccatagtcagcccttccttcctaagccaggtgtcaactcagggcagggattatttttttatacagccccaagctcccacctgtaaaccttaagagctctgcatgggcaataaataaacagatgaaagtaaccgtccacagtggatccttgtgtaagaaaaagttttccacagagcagaggaatcaggtgttgcaaagatccagctcagttctggctattcacagagttttataatacagtgtaattacatctcagtccaatatacaaaagataaaagcaacaagtaagctcttcacttataactgacaaagtagtgaaagagtttccccagggggcagatttggcagatgagcctttactccatagaaagaattgaaagattagaaaaggcatagaaaaaggaaggtgttctttaggcatcatttacctgttctcttgctatcctttgagtagcctggaaggaatatttcacaatggacgtgctacaaaagcaatcgaaagtgaaaggcactttttcttctaaattgttgcctttaataatttcattaattcttgtcaacaatttttatgggcctgcttattaaaaataaaagatctaagtggaaacgttgattagacaaaggtacctcccctctgagaacacctaacattacaatatgaaaacggtggcttcaagaatctgagttcttttaattacctgtatcagatgagtaaaaagacactccggacataatgaatgctttcttaacacaacagaaccacctacacacatgaacaggactgttcagggagcctggtttggtgtgaactggggctggctcccaggtggagcctgc

SEQ ID NO: 71378 - DNA, 1055 bp, Homo sapiens
cccttccggctttaacatcttctgtttcctttctaggacatggttttaaactttaaaatgaaaatgtgaaactaggaatgttgctgtgagaccccttggacaaacagatttttgcactggggatagaacttgagcaatttctgtcttggcctcgccactgacgtcccttctttcctgtggggacaggatggacagattcctggtgaaaggggctcaagggggccttttgaggaagcaggaggagcaagagccaactggagaagagccagctgtgttgggaggagacaaagaaagcacaaggaagaggcccaggagagaggccccagggaatggaggccactcagcaggccctagctggcggcacattcgggctgagggcctggactgcagttacacagtcctgtttggcaaagctgaggcagatgagattttccaagagttggagaaagaagtagaatattttacaggtaagcagaggggtgtgtgtgtgtgtgtgtgtgcattgagggcttgtttggtgcaattaatgatcgtatgtttggagaaatctgaactcaggatccattatttactgatgggttcactaatggattcatccaatattctctgagcacctctgggctaagccccttaggtgcttgggacataaacttgaaagaaactggattgcctgtctactaggagctgacagatgactcgagtgaatctctccttggctactgatgagtatcttctgggaaagtttacaaaacaaagtaaaaaaacgtgctgggttctactgcagagcacttcaatcagaatcgctccgagtgcaggctgaccacttgtttgtttaaaaagcttccaggtgattctcatgggcagtcagggtttgagaatcactggtctcataggagagatggcaaataaccaggtaatttctccacaccagtggttctcagcatcacctggtggacttgctgttggcaggacttggattgctggaccctacccctgtggtttagtttagtttctaaggagagtccaggtgctgctggtctggggagcacatgttg

SEQ ID NO: 71379 - DNA, 1090 bp, Homo sapiens
tgtttccgtaggcttaggttgtacccccttcaacctcctttactcacaaagggggtaaaagaaagccatgatgtttcactctgcagctttatattggttaaagttgttaacgacccgcgagatgatatcatggattcatttaagtcacatagtctattgtccaggaaaggctggcgtagtaaaatcaccaaccatcctgaatgaaacctggcttgagctttaaaaagccgagaggagtggcactgtcaggacccagcccagagaaagaggcaaggaattgacctgattgaaccacttaggtgggggggcaggcactgtttttgtttgttgttttttaaaagaatttggacataacatgacaaagaactaatgatgttccaaataacttgcactagaagctttcttattgaattcttatggtttccaatgagaatctgattttaagtctagtttatctttaaatcagctaatgggatttgttgcagaagaaagaaagcattacactgtttatccacccccacaccaagtcttcacctggacccagatgtgtgacataaaagatgtaagtacaacttgttgataatttttattggggagaaggagtcaaatagtatttttaaattagggacactggagttaagccacagtccatcattcagtagtaaataaaacactgaaatcccgaggtttggctgactgtatttcagcctgtatttactctttttaatgtttaccacgtggtatttatgtggcaaaaaggaaaactatgtacatcctgtgctcttatttcttgtattttttttaaatcctgaaactaacctcccgcggtgtcagatgttatggtggtggtgaagttcaaactgacacacaaagcagttaaatcttttgcagcttgttatagtcaaccccaccttgacctgaccacactgccttatagttagcactttcaagctcttgacttctggcctgaacagttttgtggttctgttatcagatccctttgctttagtttgtcttatataacagttgctggttggcggctctcatccatcttgtgttcagaagttcgtggggctgggcacggtggctc

SEQ ID NO: 71380 - DNA, 2465 bp, Homo sapiens
gtgggaggaccacttgagcccaggagggcgaggctgccatgagctgtgatggcaccactgcacatcagcctgagcaacacagcaaaaccgtgtctcaaaaaattaaaaaagcagctaggtacatatctttacaagtttaaaatacgcttagcctttgaccagcaactctgctattagcaatctatgccatagaagtgttttatttgttttgtttatgtttgtttgaggcagggtctgtgctgcttacattacagtattgtttaattcctgacccctggtggttcacaggtgaaggttgtcatcctgggacaggatccatatcatggacctaatcaagctcacgggctctgctttagtgttcaaaggcctgttccgcctccgcccaggtacagttgctttacaggtgactgcagtccagacatgattcctttcagatgtgtacttagcttattacaagtgggactatctggggcactgttcactagccttggaggaggatttctcggcctcagcaccattgacatttggggctgagtcattctttgttgtggaggaggagaggagtcctgtgctattgcaggatcttgtgccacatccctggcctctaccactggaaaccaggagcaacccccagctcgtgataatgaaaaatgtgcagacattgccaaaagtcccttgggggcgtaaaatcacccctggttaagaaccactgctttgggccgggcgcggtgactcacgcctgtaatcccagcactttgggaggctgaggcaggagaatcgctggatcccgggaggcggaggtggcagtgagccgagatcctgctactgcactctagcctgggtgacacagcaagactggaaaaaaaaaaaaaagaaccactgcttttggaggatttggtgtatgatatacataaatatgctaaggacagaaaactgtccctgagcaacagtgggggtctgggttgtaactgctgggttgatttacttaggttttccagagtgctgttaaatccaagtacagactaaagtaaaggtctttggcagagtcacctgttagaaggaggactggcagtgttgatctcattaatcggcgccatatgtgccagtgtcccttccaagggctggctgtaacttctaaccttttcacatatgtcttagacgttactgagctttcaaaattatgcttaagattctgttttttgtttttcttgtggcttgctttcagtttggagaacatttataaagagttgtctacagacatagaggattttgttcatcctggccatggagatttatctgggtgggccaagcaaggtaagccagcgactgctagattttttttttttttttttttttgagaccgagtctcactctgttgcccaggctagagtgcagtggtgcaatctcagcttactgcaacctctgcctcccaggttcaggcgattctcatgcctcagcctcctgagtagctgggaccacaggcatgagccaccatagctggctaattttttaatgtatttttagtagagacagggtttcaccatgttggccaggctggtctcgaactcctgacctcaggtgatccgcccgactcggcttcccaaagtgctgggattacaggcataagccaccacgcccagccccgactccattgttgatggtagtggctgctgccattatgccggctgcagcagggaagcacagcttgctacactggatcccatcaagcattggtttcatcatggatttagctcctgttgctgggtattgggctgatttgcctgagcctacatttaacctgtttctctcatgtgtataggtgttctccttctcaacgctgtcctcacggttcgtgcccatcaagccaactctcataaggagcgaggctgggagcagttcactgatgcagttgtgtcctggctaaatcagaactcgaatggccttgttttcttgctctggggctcttatgctcagaagaagggcagtgccattgatagggtatgttttgttttctttcttttttttcttttttttttaacactataaaaacaatgtaaagaattctaggagtccctgctgtgtttggtcctggaaaatccatgttataaaataacttttattttcccttaggcctgttataagggtttcccattgaaaactgagaagaatttggacaaattataggggtgatgagttgtgtatgaggaaagcaaagcaactggccaacttgtgactgaatgcagttggtgctgtaggcatgaacttggtgtctacaagatacaagtccctgggtaccattcacttaacaagtgatggatgaggcatgtttctggcttccaagaaatttgggaacatatagaaaacacaaagaattccactcaatcacaaatttaacttgcccatgaaaatactatcagtgatcattattgttttgtttctgggttttttgttttttgatggagtct

SEQ ID NO: 71381 - DNA, 1543 bp, Homo sapiens
ttgactggaaggagctgtgatcatcagctgaggggtggcctttgagaagctgctgttaacgtatttgccagttacgaagttccactgaaaattttcctattaattcttaagtactctgcataagggggaaaagcttccagaaagcagccatgaaccaggctgtccaggaatggcagctgtatccaaccacaaacaacaaaggctaccctttgaccaaatgtctttctctgcaacatggcttcggcctaaaatatgcagaagacagatgaggtcaaatactcagttggctctctttatctcccttgcctttatggtgaaacaggggagatgtgcacctttcaggcacagccctagtttggcgcctgctgctccttggttttgcctggttagactttcagtgacagatgttggggtgtttttgcttagaaaggtccccttgtctcagccttgcagggcaggcatgccagtctctgccagttccactgcccccttgatctttgaaggagtcctcaggcccctcgcagcataaggatgttttgcaactttccagaatctggcccagaaattagggctcaatttcctgattgtagtagaggttaagattgctgtgagctttatcagataagagaccgagagaagtaagctgggtcttgttattccttgggtgttggtggaataagcagtggaatttgaacaaggaagaggagaaaagggaattttgtctttatggggtggggtgattttctcctagggttatgtccagttggggtttttaaggcagcacagactgccaagtactgttttttttaaccgactgaaatcactttgggatattttttcctgcaacactggaaagttttagttttttaagaagtactcatgcagatatatatatatatatttttcccagtcctttttttaagagacggtctttattgggtctgcacctccatccttgatcttgttagcaatgctgtttttgctgttagtcgggttagagttggctctacgcgaggtttgttaataaaagtttgttaaaagtttgttttgtgcaagtgtcctttgtgcgtccaggccagggcatccatggacgtccttgggctgccctttcccttggcgcctcccagggttcccatagcaaccaccgtctgcaggaggggccgcccttgcccctcctccccgccctgccgctcagtggaacggcccaaccctcccctggctgcggtgagcgctgggcccaacccccggcctggagcagcgccccaactccgagcaccgtggagcaccggctgccagctgagaccccagaggggtaactaacggcctgaggaaggcatttcttcggggaacatggcgtgcccgtcgtggctacgttctgccaagccctgtgacgttggaggggagccgcctgcatcccccgctcagccagtgtttctagactccgagacatctggaactcggaagtgaggccagggctccaggaagactccctgatgacgcactggcccgcagcccaggctcaggtagtgggggctgtcaggat

SEQ ID NO: 71382 - DNA, 1047 bp, Homo sapiens
gcagtcttgacctcctgagctcaagtgatcctcctgtatcagcctcccgagtagctgggactacaggcccatgccaccatgcctggctaattataaaattttttttgtaaagacaaggtctcactatgttgccagggttggtcttaaagtcctgggttcaagcgattccccccacctcagcctcccaaagtgctgggattataagcatgagccaccacgcctggcagttagtttcttaagcttgatttctcattcaaggttgggttagttcttgaggaaatgaaaagccattgtgagaagctgaagggagtgtctgtattccgctggtccagaagcccaggtctagcactatgtcagcagggagaggcgctgtggtttctgggttgtgtgtgtttctcctggatttgggaggaatcaggtttctttgtgactctccaggcctgacagtggagtggacagaagatgatctgcagcagggaaaaagaatcagtgtcccagaagatgtttatgacaagggttgcgtgaaagacgtagatgagggcttggaggtaaatgcagagcctgtgggggccaggggagccagaaccgaactgcctctgtcctggtagcagttggcaactggctaacctctaaagaggtctgtttgtcctttgcacccaggcagcagaaagaattggttttccattgatgatcaaagcttctgaaggtggcggagggaagggaatccggaaggctgagagtgcggaggacttcccgatccttttcagacaagtgagcagttcttgctgtgtcttttcgcatctgtctttgggaattgtttgtgggctgccagattatttctcttagcattattctgtgacagtcaagaagacatttgtaggagctggatgtatcgttgtatcgtattttgcaacaaacgcgtacatttttactcagaaaagcccatggttttgtgtcgatcttgacagaatcttttaggtagttcaagtctataaatcagtgtatctagaaatgatttcagagatacaggatcaaaatagctgtttg

SEQ ID NO: 71383 - DNA, 1159 bp, Homo sapiens
cctttacatttaaaccttatcagtagttccctaatgggttgtatttcacaccgaagactaaattttaaggagtgtgtcctgctgtgaaccacccaccactctgaggcctgtgacagcagccccatgtccccagctcagccaagtcctcccatacttgtgatagtttctgcagagctgagaagcccacattgacagagggacccccaaattctgacacaccatctccgacacttctcctggcttgacatgggtgtggaaaggtataaaactagtttactttgtaattaaatgtttttgtgtgggtaactgcccttcggagtgaaaaaatcccaaaggccttagcattaaaatctgacgtggggcacttagccacgaattaaattgagttgggcagttttgatgatcaggttttctttgccagcttagaataattaattttaatcatgcttagtgaaaaatcaagatccttgaagtttatggaagattgcagcaaaaagggcttacttaataggagtaggcggaagacaggtcagccagcccagacccctccgagtgaagtgacctgtggcttgtcacatgctacgagtggaccaaccgcaacttcaacagaactcacaggcagaaattccagcttttcttattgctgttagtgagagtccagtagggggatcaactgtcctcgttttcctggcaccggtttctcaggttgaaggacttctcagtgctaaaatggggaccaccccaaggaaactgggacaagtcactcacccgtgagaccagcgggttaactctcatacccagcttccagacccacagctgacttttcatggcctatggatacccttgtatgaccttactgggtcttcattttctcacccccaaaatggggtcatcagtgtccttccccgttacctgctgacagcacacaggatgctgcaagacatgaaagcttactcggccaggcacagtggctcatgcctgtaatcccagcactttgggaggccaaggcgggcagatcacttgaagccaggagttcaagaccagcctggccaacatgacgaaaccccgtgtctactaaaaatactgaaattagccgggcatcctggtggccatctgtaatcccagctactcgggaggctgaggcaggagaattgcttga

SEQ ID NO: 71384 - DNA, 1036 bp, Homo sapiens
atctgggggattcaggggacccatgtggaggctctggcctcactagttcaggtagttccagaaggaagcagtgcaatggcttgagtcaaaggcatgtaaagatagtataacatagcagtactagttcagtcacttatcagcctcagtttccttatctgtcagtgagggattagaaaagctcgcctctcttgagtacttacgaaggcaaaatgaggtagagttttaaatgcttagcaagagccgttgcttgttattagttaatactttttgttggatacacactatgtcccaggcgtttttgcagtcagtatatctcatcctcttattagtatcagtgctattgcaaatgtccttgggatgtcttggccctgaaactggaattgctgtgttttggggcagatcgaggagtccgtgcgctacatggttatgcgctacggcagccggctgtggaaactccgtgtgctacaggctgaggtcaagatcaacatccgccagaccaccaccggcagtgccgttcccatccgcctgttcatcaccaatgagtcgggctactacctggacatcagcctctacaaagaagtgactgactccagatctggaaatgtaaggctggcccgcgccgtgggggtctaagtcaaagcagaagcaggctgcttgggccatcaatttgtagattaagatggcatttggaggcggtcttgccttgctctcccatgtcattctgggttggggtagccccctctgagtgttatgttaaatgtgttagcctttgaatcttggtttttcactcacctaaaaaggagagtgaatctccaagtttaatccattctgtggccatgttggatttttgatagagacaaggtgtcaccatattggccaggctggtctcgaattcctgacttcaagtgatctgcccgcctcgacctccaaagtgctgggattataggcgtgagccaccacgcctggccatatggccatatttgggataagttgtgcactactgtggttgactgtaatgcagtcctcagattggttc

SEQ ID NO: 71385 - DNA, 1089 bp, Homo sapiens
ggtcgtattttttaaagatccccaagagattctaataagcagcaaagttcagggaccactagtctgatggctcggtcagtttggacctggaccaggggtagaaaccgttgttcctgtccagcattcacccacccctcaccattgcaaggactcccacagtcacctcctacccatgtccagtgctcattggttctcttgctgcattgttctccctcccagctgactcatgcctcacacgagcctgtgtttgtgtcggttgaggtagaagtgggtgccaggtttttatgggggacattttttcaactatggccagtctggagtcctggtgacgtcctgcctctgagcaggtgccttctcctccctgagcctcagcttacttgcctgggatgatctgggaatgatctcagagcctgggcccagccccgggcagccactgtcatgggtgtggtcagagccagtgtcccgtctcctccttccctttccggggattcaagcctggctcgtccacaggacatcctggagtggaagaccgcacgcaccttcctgtattggcgtctgcgccgcctcctcctggaggaccaggtcaagcaggagatcctgcaggccagcggggagctgagtcacgtgcatatccagtccatgctgcgtcgctggttcgtggagacggagggggctgtcaaggtgggcctggggtgagaacgaggccggtgagcacagggggtgctgggggctgagacagctggcccacagctgggtccctctctgaggcatcctctgccccctccccaggcctacttgtgggacaacaaccaggtggttgtgcagtggctggaacagcactggcaggcaggggatggcccgcgctccaccatccgtgagaacatcacgtacctgaagcacgactctgtcctcaagaccatccgagggtgagtggccaccgcacctgcttcccagcctcctggcaaggacccgagcctggattgacccctagctacccgactcctatgcagccacttgaacccgccaccctgtgcagtctggggttgtccccgccccctccccgctccccagcaaagagaccacactccc

SEQ ID NO: 71386 - DNA, 1038 bp, Homo sapiens
ccgggtttggtggtgcacacttgtaatcccagatacttgggaggcctgaggcacgagaatcccttgaacccaggaagcggaggttgcaatgagccaagatcacaccactgcactccagcctgggcaacagagatagacaatgtctcaaaaaaaaaaaaaaattacagatcggggaagatgcaaatattgttttcactcctgcttgcctcctgcttccaacgtaatcaagcaccatctctaccagtaaggggtgagaagcctctagtgttacatcctcgccccttcccataagtaacttttttccgtcttcatccctgggatcttggccttcagagaaatgaagtcagtgaaggcaggatatcctggagagctgtttcttttccctcatcctgtgctgttccaagttttaacaaccagagcacatttgtaggtggaataaggagagagagttgagtgctttgaaatgtgttgtctttgtgttgctgtacctgagggaatactcagcccctcagagtttcagtgtgatatggaagtagttccatagacatcaactgaccctttgaagaactgaatgtgctcatttgatctcatggtaactacagaaacatgtaagttgcccagctgtggcaacagcattcttcctttcctcaaatatgcaataaaacactgtaataaaacaggaatttgatcttgaaactagtagaatttaataagtgaatttcttctgtagaccaaaggttgagagaagaaaatacagtatgtcagtaatgtgtcactttgtgtattttaagtttacagttttttattagtccgggaaaagaaggcacaatagttttcgacactggactggaagaacaagtctataaaaataaaaatggacaattaacagtggtgagtggccgtctctgggagggaagtaagccgttttagatgagaatataagttaaagttctaccaatttcagtcctgtagattgactggaatcataagctattaatagttcatttctgccctctattcctaattctacatctgtaa

SEQ ID NO: 71387 - DNA, 2216 bp, Homo sapiens
ctgcttaaagtccaggtgttggcagagggggtgggccataacttacctgccctgtatactgtgggaacacaggtggagtttcccgaagcccggatttatgaggagaccctgaacattttgctgtatgaggcccaggatggccggggacctgacaatgcgctcctggaggccacaggcggggcggcggggcgctcccaccacctggacgaggacgaggagcgggagcggatcgagcgcgtgcggaggatccacatcaagcgccctgatgaccgggcccacctccaccagtgagcaggcaagagaccgagccgccctcctctcaccgcccccactccctgccgtgctacacccagatcctgtgcaggctgccgggccccttctgcttcccttggagcctggagatacttttgtaacaagccagatgattattttggtattgcttgacaaggcaaattgattgtcttgacccaggcgtatgacccctgtcgttgaacaagctgtgtctaagatctctacttttcatgagaatctgagactctttggagccaggctttctcggttctcagaggaaaagtatgaatgagtgtgaagtgtatgtgagaacttttgtttgcaatatttatttttgtgggtgtcgacttcctatgtgggctttttgggtgacactcccttaagggttcagtttgacaattctgagagttgtcctgcagttggaggccaccagaggtatctgagctccctgcttcctatttcataatcctccagccccagcaggtccactcctggttcctgtgtgtttggcccgggcacaatccccactgctttgctagacgtgctttctgccatgtggctttgggcctagagcttgttgataattgcagcttgtggcagtggaaatatggctgaatgagcgtctaaatcgttgagaccagtgcaactttgggtgcaaggctttgtttagggatcaagccttttgccaccttgggctggtctttggcctggtgctcactgggaccccatatgtctgcgtaggagcagaactttccatggcagtaagtgtccagctctgtttctggttctttccccaactccagccccgtccagttgttctcctgattgacccgactccactccaggaaggccatctgaccctgtgacaggcatagctcataaactacccctccctgggatcccgctcctcttcagcctccttccccatgaagctgggctaactttctaagtcattttgcttagaaattcagtgtggcccataccctttgtcctcccagcctggcatccaggcagggacaccctcacaccaccagccccagggagcttccctgctataaacacagacccccttgtctttgcctctgatttttacacagtgtagagtggccagcagtgaacaggttgaggatgtgcgggtagatagataactttgggtctggtttgtgtctgtgttcatgtttgtttaagggatatgtgtgactgtgggtggggacgtgtgcttgtggggcacaggtggcggcccctgctggagcccggctgggcgcagcgcctatgtaggacgggtgttctcagtgacctacctcccaggctcctctgcacctgcaaaggaacaggagtgagtcgtgactgacaggggtggttgagactagactaggtagagtagttaccaggagatgtgaatgtgcgtcaggtgatggatgggtttgtcaagggaatcgttaccgttttataccaaaggtattaacatgggcagcctttgacacatgtattccaaaaacgagtttatattttcaaacggtttttacagcttagactttgtacttactgccctgcctgtgacagttgtatgccttcattttgtatccaacagcaaagtctacaataaaactttaaaacaatcatgactgaatgtcaaaatcgtgtattgggcagatgctttttaaactgtcgtgtgagaaacttttatattaggccatttggattttattaagtgctaaggaaagagggcttacaaaatgtttcgtaaatattttatactgtttaagtgttaaacaccaaccctgtctttcttttgggttgagcttttttagaaagtcgaagtgaatgttggccaggaaaatggaaaagccattgtataaatttttttttgaggcggagtcttgctctattggccaggctggagtgtagtggcaccatctccactt

SEQ ID NO: 71388 - DNA, 1040 bp, Homo sapiens
ttatgctgaatgaaggaatctggtcacaaaaggccatatattatgcaattccattcacataaaaatgtccagaacaggcaaattcatcaagacagaaaacagattagtggttacctagggctgtggggttggggaagcaatggttgagggaaaatggggagtgactgctaacgaatagagggtttcttttcaggcagtgaaaaagttctaaaattagatagtcgttatggcctcacaacttgtgaatatataaaaaccacatattgtgaatataataataactgtacactctagaaagatgacttttatgatatgtgtgaattatagctcagagttatacccctgtatccatctgtctacttatctatccaggcagagaggtacagaggggtcatcctcatctgaaggtacgaagaagagctgggcctggctggtgtgagtggaggttttcctagtaaatggagctgtctttcccggctgacgccttacctggtatatgagtatttgttgttacttctgttgtagagcaacttcacggctggctgtgggttgttttaaaagaagaagaagagagttacttggcaggcagatgcaatgaactactagcttcccatagggctggggccctgccctgcatcagaagaggcagacaagcatagcttgctggctggagagggggaccacatgacccaatagcaggggcacaaaagatgacctgtagcttcccactgtgaacccattatcaggcctcactcaggcaattatacatgtttttatttcaaaagttattcagaagaacctccatcatttctggtagcaaaagaaattccacaagggtgcctccaacataccttatttgaagtcgctataagtttttgttcttccttggatgaggtgatcacagggaccttgcagaaaggctcataagtatctttgttctgctggaacaaaacatgctttcagcctaggaggcctgcctagcactgcatttttaaagttgaccggctggacaggctctggcgaggggagatggggcagtc

SEQ ID NO: 71389 - DNA, 1100 bp, Homo sapiens
ccttctgttccatgggttgtcttttcactttcttgatagtgtcttttgaatcacaaaagttttaaactttgaagaagcacaacttacctgtttttttcttttgactcttgtgcttttagtgtgataacctcagaaatcattgcctaacctgaaatctcaaagctttactcctgtgttttcttctaagaattttatagttttagttataaaactagcatttaggtctgtggctcatttcattattttttatatatggtgtgggatagggaccattattttatctaatagtatttatctttttttgattatggaagcaatacatgcttattgtagaaaacctagataaagcagaaaaacataaaaaagaaaaaaatttctcataattctacaaccagagatacattgttaactttatctgtcctcaatcttttaaaaatgtatctatatttgtgtttatatttcgaaacattatacaatatatatacttatatatagtatacatactatagatacactacatgtgtatatattgtgtatctatagtgtatatatagttttaaataaactgcttaactgaattatgagttattggtgagttaccacagagtgaacacacctgggtaagcaccacccaatagagaaatcgattataccagcactccaaaacccccttttttccctccctccccatcacaaactccttcctcttccatgtatatagtttttcatcttgcctttttttaaagttcattgtagcatgagcattctctcatgtcagtaaaatttcaaaactggtttttcatagctgcacagtatggcatcagcaactggaccatcactgacttgtccatttccccagtgtatgtccccaatttcagccttcagttttctcagaaatcccacgcagaataatttctaggaatttgagcacgttggtggggttgtgcttttgttctggatgcacacggagacctgtctgaatgagtggatctatctgtgtctagccctgtgattgctgcacagttctcagacaatctgattcggccgttcctcatccacatcatgtctgtgcctgctctggtgactcatctcagcacagt

SEQ ID NO: 71390 - DNA, 1063 bp, Homo sapiens
gtttcttcctatatggatgttccgctgtgtttgtgggatgctctaactttgtttttgttgttatcgttcttgttgttagagacagagtctcactgtattgcccaggctacagtgcagtggcatgatcatagcttactagcctctaactcctaggctcaggtgatcctcccacgtcagcctcccaagtataatagctgggactacaggcgtgtactgccatgcctggctaatttttttttttttttaatttttgtagagatgggggccttaccttattgcccaggtttgtttccaattcctgacctcaagtgatcctcctacctcagcctcccaaagtgctggggtgacatatatgagccaccatacctggcctccagcttgttccacaacaattttgaggcttgttaggtcactaagttcatatatagcaaaacaaaaaatccataagaatagaaaacaaggattggggaaatagaaataggtgaacacaatcaagattgggtcataaaagcatgtccacacacatatgttacattagggccactgtggctacctgtgaacttcagtttggctgtgaaccaacatgaaatgtttcagaaaccgacatgaaaaggggtctgtggatgctttcttctaatttcttagaagtagagcttttctgagttcttaagaaaataaatctcccatgtgggactccttataaaggagccactcactgaaccacaggcggggctagcgcttcagtggctttcctatcgcagggtcagtaatgggttccatgggaaggttctcgttgcacgctcttattaaaagttatggaaaggccactaatgcataatttgacagagttacctgcctgtggtgggttttcaggttcagggtgtctgttcttctactgagtgtgttgcaaaactctgtctcatagctagcagtaagcgtgggctcagcaaatgtgactccagcaggatatcaatgggaaggttgaaaacaaaggtagaatatcattcaaaaccaggtgtcagaactagaggttgtcacgccttacttccctctaaaggcacag

SEQ ID NO: 71391 - DNA, 2695 bp, Homo sapiens
acgcccggctgattttgtattttttagtagagacagtgtttctcatcatgttggccaggctggtctcaaactcctgacctcagatgatccacccgcctcagcctcccagagtgctgggattacaggcgtgagccacagcaccgggctgccaaatctgtttctttacacattgtctgtggccgcttttgtgctgtagtggtagcactgagtagttgtaacagtgttagactaaatttggcctgaggatgcctccatattttgagtccttaagtaaggaactgcagcctaacttagtatgtaaactgactagaagtctaacttaggactattcagtatttttgtaacaaatagctgccaatcacagcagcctagcttcaatcaatcacaggtggccatctgattagaccacattcaaataaggcaaagccgaggtgtaaccagtcaagctgtctctgtacctcacttcagttttgcccctaaatgttgcctgcccagaatgtggactggagctgtctgaacctcgtctggttctgagggctgcctgatggatgaattgttttttgctcagacttggctagatttaatttaacagcagagaccttctggcccacagtgcctaaaaatatttactctttggctgtttcctgaaacaaattgctgatccctgatttaaagcataaatgctaagtcagacctgagttctattcctggctctgacatacaggctgtgtgatttggggccaattatttaacctttctgtgcttcagtttcctcctgtataagatggggataacactgggcttcagaaaatggaaagcaaacaatacatacggagtgcttagaatggtgcctggcacatagtcagcacccactgactactggctcttatcattgttactctcgtggtgataatgcttttctccataatcccaccttcttttcacgcacattaaatgttcatggataggtttaagtgttttgtttccccactggataggagaaataacagaccaggtggagtctccacctgaagcttgggtttctctgtgttttttccaggtctcacttaccttgatgacctgcttcccaaactgtgggcatttatctgtgagctcgggccccacggagggttaaagctcttcttggaatgcctgaacaatgacactgaagagtccaagcaactcttggccatgctgatgctgttctgtgactgttcgcggcacctcatcacgtaggttgactgctgtgggactgaattcctttcctagaatatggagagaccaaaatacagtgtcagtaaggaagtaattgctaatgtgattactgcaaacatttggacctgtgtggcagggcattgtaagaactagccatttaccaagtgagcagtgtgcagtaaatgttcagcagttgttagggtggggcctgggagttaaaagttcccatcctttcaaggaagctgatcagtaccactggctgtggcttggggtctcctggagatgggtttagatcatggctcagccatttattcactgtgctagctagattcctggaaaattccaaagtcagagccagggtgcagatccttgctaagcagatcttgagacaccctgggcaagggatcacggattcaacctctctgagactcagttgactcatctgtaaatgggaatgacaatagcacataccttttaggcacatggtagggattaaaagacataattattgcaaagtgcttatcacagtccctggcacataggatgagttcagtacttgttggctcttattattatcaagccgaccctgagcaagtttcttaacctctttgagtctctatttcctcattagaatgaagagaatattaccagttcaatagagggtaagtgaaaaaaacagcgtcaaatacttagtgcagtgcctggcacagagtgggaaattaacaaacattagtcccatttagttcctttggtttttaagcttatgcatcttgtgtgtttggtattcttttcattccaccttttcccaaaaggttggtgaagaattataagatacaatggacctcaggcagttatgttcaggctggaagactttagccggagaggatcagggacatgtaggtggcagattgggtgaggatcatggaagaactcactgagcagttggaggcaagagcaggggtctagctgctggtgaagacatccttaatcactggatgggggtaagccaagagtgaatcttattctagtgtatggagcagtgttaggaaatgttcagatagagctgtgtcttaaatggctcatttattcatatgttctttcaaacatttattcatttactcacaaatgcttactaagtacctgctaagtgtcactagtatgtgtcttagatatcgaaaagattctgcagctttcctcagtaaacatcgactctcagtcaatgttccttgatatgcagacatgaataaggaaggcgtgaattgaggtgtgaattaagaaagtgtcacagtcagatccttatgaataagaaaaatatagagtacagattttttcttaattgtattttttaactttttactatggtcgatttcaaattaatagaaagtagaaaggataatataatgaaccctcatgtgcccattatcagcttcaacagtaccacctcacagccagttttgcttcatccaaatgcccacctgct

SEQ ID NO: 71392 - DNA, 1018 bp, Homo sapiens
ctcaggtaatccgcccacctgggcctcccagagtgctgggattacaggcgtgagcccccacgcccagccttgaggaggattttctcgtgggccattcctagctggaccctagctgcagccagaccactctttccggaacgttttttgcttgtgtattcaacagtatttctaattcccacaagtgttccagggaatgcttctgttctcacaggacacttctaactggtagcacatgttaaggcatcccattctgcttgcatctcatctaacttcagtttcagtcatttttgcagagtgtttttatggaatcgtcagtttgctgaccctgttttctgatcccgcctttgttcattttagagagttctactgtttcgaaccatggttaccaaggagaaggagaaactggggctggtggaaaccagctctgcctccccgcatgtcactcacatcaccatccgccggtccaggatgctggaggtgagtgtgaagcctatggaatcctaccacaaggaagtgggccctgcaacatggaagctctttagtggacggtctctggcttttgaactgttcctgttactccttgatctgaaattaaggctctgggagcaggaaaggggtcatttgtcctgttgactgctctgaacagctgcttggttaaacatgttctcattgctggagacccagcagtgtcttcctttaccccatgagagctagagtatcctgggctagagcatccacctcttcatgtccctttgaaatgaggacaggagctgccagtcacagcggctgcactaacactctcaggtctgtgcaaactccatttgtcccagcaggcactttgctgagactctcaactgtgattgtagtatataagtggagtggaggtgttacatttactgagttatgtagagaaatacttttatcacagagccagaagttctttgtagacagaaacttacaagataccactgaagtgacccacctgagctaaatccgttgtctggaactaccactatac

SEQ ID NO: 71393 - DNA, 1027 bp, Homo sapiens
ttgttacatcagtggccttttttcacctttttagtaaacgcacattttcatcatattgtttagtacctgcacagtattccagggtatggatgtaccagtgtttatttaaccgtcctactctactccgaaatgccaacacattcccctccatgacatcccgaagtcttaatacaaatgtttgaacaaggattgggtgagaaaaaaaccttttgtattgatcatgcagggtctgcttgttgatatttcagccttgactttttatgagaaaggatggttcccaagcatgtgccatcttaattccatcattatcatggatgtttgtgctgggccctctcatctccgggaagctttatttccccattagagtcctccctattaattactcccatcttctcccccagcttgtttgccatgaactgattcctggagggaagaccattcctgttacaaatgaaaataagtgagtatagcaattaggtttttaaggtcaccacttgaaaagacttcattctggctctctgcgcttatgttgagaatttattaagatagattgaagtagaaagaggccataaatatcataatggaatttactggttacagttcataggccagaattgtattaaattcaatttgcggccgggcacagtggctcatgcctataatcccagcactttgttaggccgaggcgggcggatcacgaggtcaggagttcgagaccagcctgatcaacatggtgaaaccccgtctctactgaaaatacaaaaattagctgggcgtggtggctcatgcctgtaatcccagctactcaggaggctgaggcaggagaatcgcttgaacctgggaggtggaggttgcagtgagccaagatcgcaccagcgcactccagcctgggcgacagagtgagactccgtctcaaaaaaaaaaaaaaattgatttgcaaaataagaattgaccatttattttttgcagtagcacttctaaggtcagaggcacccaggccacggtgttcttaggagtttaataacgg

SEQ ID NO: 71394 - DNA, 1036 bp, Homo sapiens
tccttgccatgtttccatcaaagtagagcacacactcttttccagaagcctgggggctcgacctgggtgggacaccaggatgcagctgaaactctgaaggactgtggagacgggtggcccctgctttgctgccactgtgacagctcttgttggaaaatgttttgcgtctttgaggagagcagaggagggactgggccttcctggcttcgaatccggcatcaaccttggtggtgcaggtgcaggagcatgaggtgggagagggtgggtggctgtcaacacagaccacaaacagggcctctgcctcagttccctggagctaaagttcttacaacaaaggtaaagaatgagggcagaggaacacaatgggttggaagagaaatgaagtttaaaaaaaaaacaaaaaacccagagggtgtgagcctctgtcagtgcaacgggcttccgggttccctgtgctgaggaaggatgggcagcaagacccaagtttcctgggattttgcagactcaggagtgaagccaccgcccagatgggatgtgtaccttaggttagtgtttgttcctcattagataaccagtgagacaaataagcagggtcaaaggcagccgtcctccgcgggacaagcaggctttggggaacaggcagcacattctggaaacggggctgctgctaagggccgttgtttttcttcccccaaaccaggatgccaatgtgaatgcataggacgggaataggtccgggaagactctctggcagctcagcccgctgaggacgcagaaaatgggagggccgcggcgtggagcgcgtggcttcaaggcaggagcagcgccttggactcacggtgtccatagcgtccctagcaggcgcctgcgcttccctgggcagcagatgggcctggctgtctgggaagaggcgctgtggacggcatggaggcagaaactttgtggggtgcatagaggcttggcgaggccttacctgagtaagagatttcagaaacggaaggagaggatctcacgcacagtaggctttgtacactca

SEQ ID NO: 71395 - DNA, 1035 bp, Homo sapiens
gccaggtggctccctcaactcaccagccatccttgatccctccttggccaggccgtcctgcgatgtgctggtggaaagggggccgatggcctgtttaaacccacctgtgatggatttgtcatctccactgccggccgagcctgtgcaggttcaggttgagcggtggcaggatgtgaaatgctgctcaaggtttaggcccaggtcagagcctgttgagccccataatgtcacgtgactcagtgtctcctccctttctagtgtggtgcctcttgtccagatgggagagaccgatgcgaacgtggccaagttcttaaacaggtactcgcgtggaacctgggggttcctctctgaaagccgaggctcatctgtgggaagtagcagcggtgcagcggtccgggaagcagtgtggggcagcattcccgcaccccctccttcattcccttagtgtttatgaacatctgctctgtgccaggcaccacgccgggcacaggggaggcagtggtgaacaaggtgggccctgtgcctgtcccgataagatttagatcttattgggagaggctgctgtaaaaaccaggaagaaaaacctaagtgcaaagtggcattgcgggggcaaagggcgttcttagaggctgggtgctcaggggaggcctctcggtggtgactgaccagggagccaggcttcaggccctctctcagccagtttcctgtccccgagagggcctgcggcagcatgaaccaacaagagagccgggccaagctgcgctcaggggaccccatgcaggccccagtgagccaggctagcccagggagggcttcctctgcctcgcggccggcccatgaggctggagccacacctggcccaaagcctgctctgcgggttcctgccccagccctggcttctgtggcatcagtgtgggcaaggccagagcctgggggcaggtagagagctgggggagcaggtctgcaccccaggagctgtcctgggtgtctagaaagtgacctcaggcccttgactgtggccactcctcccagaga

SEQ ID NO: 71396 - DNA, 1506 bp, Homo sapiens
ggaggccaaggtgggaggaccacttgagcccagaagtccgaggccagcctgagcaacagagagatcccgcctctaggaaaaattaaaacttagctgagtgtggtggtgtacacctgtagtcccagctgcttgggaggctgaggtaggagaatcaattgagcctgggaggtagaggctgcagtgagccgtgatcgcaccactgaactccggcctgggcaacagagtgagaccctgtctcaaaaaaaaaaaaaaataatatcacctacactccttccactaaccctccaaagtggattcacaaccaggcttggagtctcacagcctggattcaaacccaacccctgcaatttgcctgctgtggtaaccttggtcgggctgcctcagtttccatatcaagaaaatgaagagcttgagcacacccacctctctcggttctggggaggactgaacaggataattgggtgtgtggcccagatcaagccctcagctgatggaaggttcctgttaccaccccatttgacagacaggcacattgaggctctgcagggagaagtgcttgctctgaggtgcctgccgccaggtgggtctgatgccacagcccatgctcctaccccaccaccataatgcccccctaattcccaccagggaggactggggaagggcctgaggacccactgtgcagtctgggctgccccatctggccattgtgaccatctccaggggctctcagggtgtttttaccttccgtctctcacttcctttttgctccctggagagagtgcccagcagctttctgcaggagccaaggcatggcagagcccaccacggggtcttttgcccctgctgactccagcccagtggagccagcaccatgacctgcccaggcctgtttttaggagccagccctgcctcctcctcctgcccacagacccatctgatgaaaacgccaacggagaaaaggaggttgttttgggtgacaatgaaactgccaataaaatctcaaacgcagagataggcaatgactatttcacttattctgacagtttgagactttgctggggaagggaagtgacaggcacctgccgacatcaacaccacttctttcggagaacagcccgtgggagggggcttcccgggagacctgccttgcccagatgccaagcgggctgtggctgctgctgttggcagcaggggctgcggtcacccacggggagagactggacactctgactctatccacaactcccctctggcacagacatatgccaggctctggctggagaccacagaggcagaaacaaccagcaaaacccctgcccttagggtttgttttgtttttttaagacaaggtctggctctgtcattcaggctggagtgcagtggtgcaatctcggctcgctgtaacctctacctcctgggctcaagccatcctcccacctcagcctctcgaatagctgggactacaagcattcatcacgacacccagctaatttttgtattttattg

SEQ ID NO: 71397 - DNA, 1043 bp, Homo sapiens
gtgtctccattcactcacagggtcacctggaccgtgccttgcagacacatccacagtgttacagagatacacacggagtcccaaacagatagagaagagagtgtctgcaggacagcagcagcagacagtggcacagacacaggtaagcaatgcccatccacccgccagggtcaactggacagtgtcccactgccacagataaactgcatcacagacaacagaggcacccagcagtgtccgcagacatggacagacacattgtgtctggtacagtgtcaccccagtagacagtgtcccacggcatctgctggcatgatgcccctgacatagtgtgacaccatgtgggaccctatcacatgtgcatgtgtggccaggaccacacacacgcacacacacacacacatacacatgcacacatgcacagacacacacatacctgcacacgcacatacacacacatacacacgtgcgcacacacactccctcccaccacaggtccagggcagagggccgggacctcccctggggacgcagacctgaagttgggccctggcccctccctcccccatgtgtaccctcccttctctgagtcacagctcctccctgagagaatggccacctgccaggtaacggggcttcagtgagacatgaaagtctgacatttgcagtgggattctggcgatggaaggcccagcctcagggtgaggcacagcgggtctctgcttctccatagcaggccttggacgggcagtgccggcgaggtcaccatggcatggaagcccctcagggacttcagaggctggccttggatagggagcggtgtggaatggaggggcccaagatcaccccctcggcctccccaacacccccctggccatgagcaaggatagcttggagatggcatcaccttggacctggactacctgcttgctacttagaggactcagctgagccccctcccacaggggacgtgcccaccgggggcctgcccctctcctgaccgaatccagaagctgagatcctggaatccccttctccaacag

SEQ ID NO: 71398 - DNA, 2537 bp, Homo sapiens
gtgtcccagtggtcaagtgataagaaatcagatggcccacagcctctagagggagtaagatgagtctgcagttaactggaattctagacagggctggagcagggctggaggagggaaaacctgcagctggtcctggagggcttcctgacaaagcgggctgtgctctgtgccctgaggactgagtggctctccccagcatggagtaaatgggggtgtctctggcagagggagtttggagacccgggagcatgaccaggaagggcagggggagcttataagatggtggaggtgaaagggagattaggagggtgtgcagggggcatcgggtgctgagctaagggtgctgtgaggccctgaggaagagggaagccagtgaaagcatctgagaggcaggggccagctaagatcccagtgccttagaggccaacagagagcttgggagtcgcagacctgggctgaaacccggtgagagagagcacctgcactctcactggctgtgtcctcagagaaattattttacccctctgtgcctcagtttcctcttgttcaggagagtctcaacagctttctcatgggcttgtgggtggggtgagcttgcatgtgcatagtgcttgcagggggcttagctgagcccctcagagctgggtgggctgggcttgaatacaggcctgggccagtcctggccccacagcaagccagcatcccagccgcagcagctgtttggggccctgggggcccctgctattgtgcagagggcacaggggacaaaggcctgggaggtcagggggtgaggccgagactagctgtgaacaggctcccggggatggggacttaatgacgcagaacttaatgacccagagtctgtggggaggggggcctcccttggaggaggagggaggtccagccaccagctgtctgctccaggattcgctgccagggcacgggcagctgcctcacagagtccaggcctgagcttggcactgggggaggcagaggtggcagggcctcctggcatgaaatccccaggcctgaatgcagggcttggccctgcccctcggcatctgcagatctccgtctcttcatctgtgatgggccaagggaccaccttagagggcagctgtgaggtttggcagtaaccgatagccaatgggcagtaaacaggaactgctatttttgctctttatccatccgttcattcagagagcttccctgctccaggccaggctccctgccagatgctggggacatgaagatgaacaagccccagttgccttgaaaggtggtgtgtacctaccgagggagaggcctcgagtgcaccccctcagccacccaacaagtgcatgtgggttaattgccacaatggaggaattcacagtatgtgggcactgtgccaggggcaggggggcacagcagtgaacaagccagacgtgggccctgccctgggccaccaccagtctctcaaaggaaatcagaggtggaaacaattacttctggctggagtagccagggagggctccctggaggaggtggcacttgtaattgaatacttttgcctattatgagaatcacaggacactggtatctgctgtgtgccagactgagtttcctactttggcattttgttctctcatttaatcctcatatccctctctgaagggtgtttttatccctgtcatgtgaatgaagaaacttagcctgatgatgtgaagcagcagccctgggccacatggcaggcccacagaacccccttcattatccacacaagcttttgcctcttcactgcctgtaagggtactgggcatggtaggatcctcgggcaggggccgaggggacgctgttctgggccagctgtctcctttatgagcttcacgaccttcagcaggtcaccttcccccacccctcccaacccagactcagccgcgtccttcataaatgtcaaggatggcaaatctgtggcaggcctggcttgccttatgccgctgtgcccttggcagacattgccaatcaattgctgccctctttccctgctgagttcttcccctgaccttgggttccttccagggctctgggcaggcagcgccaatcaatcagcagggcctgtgagctgaaaccagttgcctgcctggcctcaatgagctcagggtgcctctggcccgtctccatgtggctcagaggaccaggggggacagcgagggattctaggggatctctgtgtatccaggttgttcttaagccacaaaagccttttaggtgggagggtctgttaccctcttctaactcccacttgtgttcatccatgcagattccgagcactgacagtctggatgatgataacagcatgtatttagttcttcctgagagctaggtccttcctgggcactctctcgttcatcattctgcagaacacctgcagcaagcctccctgcacctccagggagaattcttaacccattttagagatgagggaactgaggcttggctcagctaagcagagtagggtcacgcacttgttgggtggccgagctggcattcagacc

SEQ ID NO: 71399 - DNA, 1104 bp, Homo sapiens
ggagaatgatgaaattcacttagccacaaaatctccactgaacaccactaaatctttctttagcaattccaaggggcatcacttcaggatcctgtgggacctcaggattaattgccagctaattgaatgttcttgttaacagaatgctggggaaccctgctaatccactttgtttcttttctgggggtctagaaggcattgggaagtcctgataccctggagggcttggaggcgtgtcttcccctccagagcctcattgtcccctctcccctctggcctctcttgtggtctctgctgcactgcagcttcatctactctgtcctggtgatcgtctcagcagccctctacctggcagggatcgaggcctacctggccgtgatggtctttgccctggtcctgggctggatgaatgccctttacttcacccgtgggctgaagctgacggggacctatagcatcatgatccagaaggtacgggctgggaggaccctctggactcgtgtgttcctggagggagtcacacacacaccacatgcacacttatgcacctgcagacctgaggatgctgggtaccgtgggggcaggaggcatggtctggacactggggtgggaccagggtggagatggaggaatggggaaagtgagaaaccatgtgtctcctctttgcctccataatcccgctggggtctttagattctcttcaaggaccttttccgattcctgctcgtctacttgctcttcatgatcggctacgcttcaggtgagctctgggtgctcaggtggtcctggcaggggtggtgcaaggacgggaacagtagccatgatgtataggggacaatagcagccttgctgagttcttttttttttttttttttttttgaggtggagttttgctcctgttgcccgggctggagtgcaatggcacaatctcagctcactgtaacctccacctcccaggttcaagtaattctgcctcagcctcccacgtagttgggattacgggctcctgccaccacgccccactattttttaatttttttttttttgtatttttagtagagatggggtttcaccatgttggccatgctggtcttgaactcctga

SEQ ID NO: 71400 - DNA, 1020 bp, Homo sapiens
ggtggatgggtagatggatggatggatggatgagtgatggatggatgggtggatagatggatgagtgggtggataggtagatggatagatgagtgatggatggatggatggatagatggatgggtcggtgagtggatgtgtggatggatgggtggatagatgtatgggcagtctgtgcatttctttctgtttgtctccacccaacacacagtaggtactagctatagtttgttggataaaacattacttagtttttacatctgccccaactacctcaccctgttccttgtaaggcttcagctgcctgcccgccaccacagtctctgggtccctaaggccagggacagtggggcaggcaggggatgagccctcccatcaacttgcctccctacctcctccaggaagcagccgcagagccccaaagcccctgcccctcagccgccccccatcctcaaagtcttcaaccggcctatcctctttgacatcgtgtcccggggctccactgctgacctggacgggctgctcccattcttgctgacccacaagaaacgcctaactgatgaggagtttcgaggtgagccacccagatgggcatagccagtgggacagccaggggtgtgggggaagcctggcattgggggccccctttcccctcagcttctttctttgggtcggtggactgcattggcctggaaagtgcactggacagggagtctggtcctgtgtgtccttcaccatgttacttaacctctctgtgcctcagctacctccatttattcattctttcattcattcagcccttatgtatgaaaaggttagtgtagtgggtaagcagagtccacctacctgggttcagattctacctttaccagttaagcgatgtgtgacctctctgagcctccgtttcctcatctgtaaactggggaataatcatagcatactcctggctctcatcccacagagagcccagcgcaggcagctggagtcctggagctcctgctcccctgagggaaggtctgg

SEQ ID NO: 71401 - DNA, 1081 bp, Homo sapiens
ttttctctgttcccctactctcccctcttctccctcccagaccctgtgcctccatcttcctccttctctttagtctcttattcattgaacagagtcttactgcatcccaagatgtgccaggcactgggccaggtaagaatgtgacagagagagcattcctgcctcatggtggccctgggctagctctttctctctcagaacctagcacataataggtgccgaaataatgtttgttgaatgactgaatgagtgtctccaagccctccagctcttagtgtctgtttccttcctttctctctctatctcttctcttcccagccctctctgtgccacacccttccgccatctgcctctgtagccccacatctctcccatgcacatacaagctccagacacacagtaggcactcattaataatggtaatatcaactaacatttattgaatgtttaccgtgtggtgggccatgggcaggtacatatgagcatggcctcatttgtctcaaatgtttgttgaatgaataaattaatgggttagttatggaatgaatggatgaaatgcctcatcttttagtctgctgtttctttattttatctttgtttttgtctctttcagtttctctgccttagtaagtactcaataaatgactaatatatgagtgggtgggtgagtggatgggcagttggatggatggatggatggatggatggatggatgggtgggtgggtggataggcagatggatggatagacgagtgatggatggatggatggatggatgggtgagtggatggatgggcagatgggtggatggatgagtgggtggatggatggatgagtagtggatggatgggtggacagatggaggagtgagtggatgggtagatgaatggatgagtgatggatggatggatggatggatgagtgggtggatggatggatggatcagtgagggatggatggatggatgagtgatggatggatgaatgggtggatggatgatgggtgggtaggtggatgggtggatgctgggtgggtggatgtatggatgagggatggatggatggatgggcgggtaggtgga

SEQ ID NO: 71402 - DNA, 1078 bp, Homo sapiens
tcttgctctgttgcccaggctggagtgcaatggcatgatctcggctcactgaaacctccacctcctgggttcaagcaattctccagtctcagcctcccgagtagcgggattacaggcacccgccaccacacccagctaattttttttgtatttttagtagagacaggttttcaccatcttggccaggctggtcttgaactcctgacctcgtgatccacctgccttggcctcccaaagtgctgggattataggtgtgagccaccgcatcccgcctcatctttttttattcacctacatatccacgtactcatctgtcccccattaatctacttgtctgtccatctcttcacctacacatccagccttccatttgtttatcttcttatttatacatctgttcatccatccatccatccatccatttatccatctatcatctactcattcatttacccatctttacacttttttgtccacctatccaatctatagatccattgtccactcattaaaatatctatctactcatctacccatctgtcagccatctgtccagccatacacccatataaccaaccttccattcatctaccattttctcatctgaatgtcatttcatcttctcacctacccactgtttctagtcatctagccattcagctatcaaactattcatcattcattcatttattcattcattcattccatttctcatgcttgattgctcacctgcctgctgtccttctttccttcctctccttctctcttctaaccaccaattcattcacccagatctctgtccatccatttgtccattcactcttttgtttgcttagtcactgactcatttattcatttgctcatcttttcttccatttttgcatctattcatccatccatctccctaccttctcttcctggcacacatccagctgcccctcctgggtcttcttcaatcatcacctccattcctggccatccagtggctttcctgaggcttagaaagagctggaaaccccaaggcattcaaccttctttcccataatgacagccttgctgaaagaaaagacagactgga

SEQ ID NO: 71403 - DNA, 1028 bp, Homo sapiens
aaaaatacaaaaaattagccgggcgtggtggcgggtgcctgtagtcccagctactcaggaggctgagcagaagaatggcgtgaacccgggaggcggagcttgcagtgagtggagatgcgccactgcactccagcctaggcgacagagggagactccgtctcaaaaaaaaaaaaaaaaaaaaaaaaatagggcagctgaagaaagtgaagatcagagaggttgggtaacttgctcatactcacccagcaagtgagctgtgggtctgggatctgaccctctggtctgcctgacgtcaaaatgtgccccaccggctcagggggccatgagagcagaaagccaggtttctggaaagcctggggtctctgtctagggcagaaaggaaggtctggggaccctggctcagccctgtatctcatcaccctactcaggactcctgcaccccttaacttgcccactcctgagcccttctggtctatgcagttcttaacaccatccgacatgactctgctgcttgatttgtctagtttattgtttccccaccagaaggtctgcccccaaagggattgatatctgttctgttcacatctgtgtccctagtctagcacagtgcctggcacatagtaggtgctcaataaatgtgtggaataaataggtagctggcttctactgctgccccttgggccctttccagaggaagatgcagattctttgtccatcctacacaactgccatctctgtgtggaccaccattcagtatatatattctaaagaagagtttgaatataaacctgcttttgaatatataggatttaaaaccaacatattcaaaaaccgctactttggctgggcgcagtggctcatgcctgtaattccagcactttgggaggccgaggcgggtagatcatttgaggtcaggagttcaagaccagcctggccaacatgtgaaaccccgtctgtactaaaaatacaaaaattagctgagtggtagtggcatgtttctgtaatcccagctacttgggaggctgagg

SEQ ID NO: 71404 - DNA, 1043 bp, Homo sapiens
gaggtcagagctctgccaacttgaggagggatttgggttattctggctgctgctcttgttctggcctgggctccttcaacctcgggtgcccttgcagcccatgagctggcaccccagtggccggacaggaatgaggaagggacagggcctcactttcaatgtgactctgacttccttcccacccctagccccttcctgagcattggtttcccctttctgccccgagccctggccactgccggctgtgtgaccccaaggaggttacatcacttctctgagcatgtttcctcatcggtgagggaggatcacacgagaccacaccaggcgcacaggaagcccttgccggtctccagatgaggtcagggcattggaaaggccacagaaggaggcgggggctcaggggacagacaggcgggccattgaccaaacgggaatatccttctatttctttggttagtgagtaacagcagcccctcttgtccacccaccctgccccttgcacaaagagctcctcagtctcaccaggcgcccgttttcccctgagggtggagtggcctgggttccacccggttgaccgagtgggctggccaccttctgggaccattccctgtgtgtgtgtttgtgtacgtgtgtatgtgtgtgtatattgatgtgcgtgtgtatgtgcgtatgtgtgtctgtgtgtgtatgtgtatgtgtgtatatgtatgtctatatgtgtatgtgtatatgtgtatatatgtgtatgtgtgtatatgtatgactatatgtttatgtgtatgtttgtgtatatatgtgtgtatgtgtgtatatgtatgtctgtgtgtatgtgtgtgcatatgtgtatgtatatacatgtgtatgtgtgtatgtgaatgtctatgtgtgcatgtgtgtatgtgtgtgtatgtttgcgtgtatatgtatgtatgtgtgtatattgtgtgtatgtatgtgtatatgtgtgtaatgtgtatatgtatttgtgtgtagtgtgtgtgtgtgtgtgtgtttatggagggtgggttccatgggctttgggc

SEQ ID NO: 71405 - DNA, 1048 bp, Homo sapiens
ccgtcccggaggtaagtggggcccgggcccgggaggggcggctcagccgaggtcccctcgcgcccctggggacatctccgtggcccgtccggctccggggggtcccgaggctccaaaatgcgggccaggggcgcgggagacggaaggcaccaggttccgcaggcgccagcctctcagctaagtgcccttgggccggacaccggctctttgggtctcggttttatcacctgtgaaatgggcaccaacgtggggcctggggtagcaggtctggggggagggcggttcggttccctgagaccccaagccagggaaccaaaggcccggagccttgcagcccaccttaggagacttggaagagggatttcgggggacctaaggtttgcccttggcccctgagcatgtcggagggaatttggagtctggagcttccaaaggcttcttcttggttactgagtcccggagagacggctgtttcctccaagaggcatgaaaatctttaacctctagttctgccctggactctcaggacgtcccgggggcgggtggctcctgggggtgggtagcgggggtgggggtgggggagagagagactcccacactccccgcttgcctggaaacaccaaccacagatgcattcatcgagccacccactgctccagcctgccccagctgttccctctgtctgtcctctctgttttgcagatggggaaactgaggcttaggtcggggatctagacaattgggatttaaacccagggactatccagccccaaagcccttcccaccacaccaggtggcctgtcctggggccagctctgcacacagggcctggtgcccccggggtgcttgggaagtggcagggcagaggtgggccctgtggctgttctggctcagcttctaaaacaagagcctctgctgggggcagaggggccgtgaacccctgaaatgttaggcagataccctgtgggagctttgttctgggatgctaagaaccgcttgaggatttaagctttgccactttggctccggagcaagggcagagggtaag

SEQ ID NO: 71406 - DNA, 1064 bp, Homo sapiens
gcaacaaaagcgaaactctgtctcaaaaaagaaaaaaaagaaaaaaaagcacgtgaccttatgaggctctcgctgtattgttattttaaggactataaagagtttgatttaaaattatgcagggcccctatgtgggattttttaaaaagcaaactggtgtgtattctcatgtggtttgcacagcccagcctcacagcactattgtaaaccctgctctttctgtctcgctagacagatttttttgtttgttttcttttttctggttgttttttgttgttgttgttgttgttttacagctgaaaccaaccagcaagcccttgatgaccaagaggcgtttctttcaaagctatagggcacaaacaattgaccatagatgactccgtttgcattcttctgcagaattatttccttcagggacagattttccaacctaagaaactacctaccgtgtgtattctcttgacggggagagatgaacccttcagctgctaagatccaagaaaacgcctcactgccttaaccttaactgttcttcctggcgctaaaaagagctgtattttttaaagtgctggggcaaacaaagcaaccccaaaagagttgatgtgtgttttaaaagaaaaaacccaatgaggaacaattggagatttttatgcagaaactaaataatccttaataaataaatctctattttggaatcacatctgtgcactgtattggttcttgatttttttttctttcctgcatcagaaattacaactggggacccttacaaatcctaccaagaatgtattttctggcgtccatggttttaaaattttatttatctattatttttaaatgtttttgtagagattggggtcttgctatgttgcccaggctggtctcaatctcctggcctcaagcaatcctcttgcctcagcctcccaaagggttgggattacaggcatgagccactgcaccaggcctggcctccgtggtcttaaaaaacagaactggttgctgcatggagaaacgggaatttcacataagaatcttgggtttcggcagggtgcagtggctcactt

SEQ ID NO: 71407 - DNA, 1092 bp, Homo sapiens
ggcctcccaaagtgctgggattacaggcgtgagccacggcaaatttaaaaggatgatttgcagcactagtggcagatcattttaaaaaatgctggtgcctgggccctactaagttttttgattgaattagtttggagtggggctcagacacggttttgtttgtttgtttgttttaaagttccaccagttgatttcactgtgcagccaaggggtggtgaccactcgttaaagggatgaggccaagctggtgagggttcctgggatttgcagtggctcactttcctcccattcctgttctcagatggcgctcccgacgctgccgtcctactggtgcagccagcagcgcctgaatcagcagctagcacgacagcgagagcaggaggcccggcttcggcagcagtgggagcagaacagccgttacttcaggatgtctgacatctgcagctccaaacaggcagaatggagctctaaaacctcctaccagcggaggtaattgtgcggtaactgccgattggatggaagtggggaccacttgctggtcaggggatgaggccttaaggatttagggagcgtaggatttgccaggcagtatgaattacctgcatggtgatgtttttccagctggaaatggaaaaaaagatcatcagtgcagccatacattggcattgaaaaagataaaatgatgcagaagcatatgatagaatttggaagcctggttgtaaccccatatccccagagacagccacagttaacagtctggcacatatccttccatgctgtttcccactggtatttgtgcttaaatatacacacacaaagctacttttatagaaatacgtgtaaaaacatggaggccaaaagcataggctttgaagtcagacctagatggaaatcctgaccgtgtctcttgctgaatgtatgagctttggtttcctcatcaatcaagtggggctacagcagacctatgctgtaggatttatgtgatggataatatatacattatttatacatttatacattttctttttgcaaaaaacaagattttctcttacacatactattctgtgacctgctgtctctgctttggctggg

SEQ ID NO: 71408 - DNA, 1032 bp, Homo sapiens
ggtgctcaggtctgatgagatgccagttaactccagagccagcaggaaaagagcttaggtccttgtgcagggactgggttttggatcagttagctgtagtctctttagccccttcaatcattacatctgagtgcttttcctttcttccagttctgtgggtccacagagatctgggactagtctgttttaccttccaaagtagttatgtgaaacagtgagccctaatctgtgcttttcagcctgctgtattattttgagaccccctagataggacctctgtgtagcatcagattttggcccccttttgtcatcattgcaagagtcacttggtagtgccatgtggttctcagagctgtgcatgtgaagcatgagggtttgaacagtggttgcagtgacggtgtgaagggaggcactcatagcctgagctgacttccactgtgtgtcatccaaaatgtgaatggatttgaaaaatgacatcaggctttccattttgtgttttcttgatagattgctgaacaacttttgtacgaacactggaaaaagaacaacccgaaacttcgagaggtgaaaatcagagatctccattgatttatctaagtagatgaaatcatgtttccagacacttttttttttgaacacgtatcttgtaccgggttgaaacagaggagggaaccttgagccacctgaaaagagcgccaggcagaagatctggcacaggctgcgctgagcggctcattcggttgttgaacaaatgttgattgaacctccgctgcctggtctgccaggtgcgggcatggagattagacatggtttctgctcattagcttgtgtccagcatgggagctcattacagggcaggatgcagggtgctgggccagcctgagaggatgagcatgggccagcgcactcaactctggaggggttggggaggcttcccagaggagttcctggggtggaagagtttgaagggatgtatgtgtgtagaggtgaggaaaggatgttctaggttgatgtgactgtgagaaccaggct

SEQ ID NO: 71409 - DNA, 1033 bp, Homo sapiens
caagaaaatgttttatgaaaaatttcatttatagtttcagccataggcagggagttttaagggatggaaaagttttcacaaactttagacaatgaaactatacttttggatgtatgtgatcaactcaacagttgttgacaacacaaccgaacatcagaaactaaaccagcaaataggcacaaaataaggcaagtgggttaaatagttgaaaattggttagaaaacatgcaaaaataatactgagttttcttttaaaaagttttaaaccgtcattaaatgtttctttttgtagaaatctgaagagttctgcgtctgaatttgaaattggactttataaagcctagaaaacagaggaggcggtgccctgcccttgtcagttgttgttctctttggtggtgatggtaaccagctgcttggcagccttggcgatgtcgtacgcacactggatgacctgctgcgtgaccagctgaacgtctgtgggtgagccggggtcccctgggagggtcttcttgcactctgactgcagtcggtaggcactggacgtcagtaaacgaagggaagtcctcaccatatcagacttgggtttctaaaaggaaaaagacagccgtttaccctgaactgcagggcagacatccaaaagcaggggacaaacattcttctaaagcaaaccaagctgctccccagagtgaaaggcggtttggtcctgccctttctcaaaggggtgcttcacacactccaagctttgcagcccacagcgtaagagatgctgaaatattctgattcaaaggtcaaagtgcatgcagggtaattttagtagtatgtggtattttgaagtagtttttgaaaaatattaatccatgtgggtaaaatattccagaaaatcctataaattttaaaatgtgccttttagcacgacttgtatatccttgtcttattaaatcaacattcatgcagaacaaaaatatttcaaagctctatacgactgcatattttattttattttacttttttttgagacttgagtttcactctt

SEQ ID NO: 71410 - DNA, 1014 bp, Homo sapiens
cacgtgggtccggctgccttgcctgtacccaccaggtgttatcagtaaggagtgacaggctttatgtagagttttgtggggtttttttttttttttctttttggttttgttttgttttgttttgttttgttttttgagttagggtctagctctgtcacccaggctggagtgcagtagtacgatctcatctcactgcaacctccgcctcctaggctcaagagatcatctcacctcagcctcccgagtagctgaactgcaggtgtgcactaccacacccagctaatttttgtacttttagtagcgatgacgtttcaccatgttgcctaggctggcctcaaattcctgacctcaagtgatctgcccacctctgcctcccaacatgctgggattatgggtgtgagccaccgcacctggccatgtagaccttcttaaaccaacttactcaaaagtagccactcttttggatgaagctacagggtttccatatgtttaaacaaagctcttagtttacatctgtgtccttagccacattttattgcagcatcaataaaactccttagtcccatgttttgattaacttggatgaaattcaaggagtaaagctagaaatagctcacacttatattttataaggtaagtggtttaggttttaaattagcctccactgatctctgttccagagaagttctcaagcattatgggtgaaataaatagggaaaataatgttcatgaaatactcagaacatagtccccttcgaaggaataaagtccccttcaaatttcgtcaccctagaagatcgtgtgtttagcagtgctgccatttgttcaaaacatttttaggattcctcttttgaatctgtatcccatttttgatcaccacagttgcaccaaatctttacattttaaggggtagatttgagcccaggcatgaaatattggaggtagcaggaggcaggagacctggtgcttggtcctgtttttctgcagactttgtggcctttggtgggccaccca

SEQ ID NO: 71411 - DNA, 1039 bp, Homo sapiens
acaactaaaggacagttagacagtgattaaatatctcattagaaattttgtaagtcaaacctcttttgtctactgtgaaatttttgttttttaatttgtatggtagccttaaaaatcattgcaaggactgcttgctgagacagagttttgtacaaaaatcatttaaactgatcaccctgattgttcctgacagcttcatcatgagtttagatttttatggcgtgtctttattcagagaaaactgcaaacctattaaatacattgaaccagcaccagctataaggtaaccttcctattaacagctttgagagagcagcactcttaaccaatagcttttggctctgcatgcttataatatttttgatacaattaaatgctggctacactgaaattctgtacatatgcttttgttgacaacgatggaaggacttaactaacgtgtaagtaactgatttcctgggtggttgctgctatatgttgttttccatacttgaaaaaacatttaccaaatgcatttattaggtatatgagtcactactcttctaaaatgtttaaatgaaacttggtacttttcatcattgagggtaatgcatttgatttgcgatttatcacattttcatcagggaaggcaaaaagattcattataaaggccagacatggtggctcacgcctctaatcctagcactttgggaagccgaggcaggtagattgcctgagctcggtagtttgagaccatcctgagcaacacagtgaaaccctgtctctattaaaatacaaaaaattagccaggtgtggcggtgggtgcctgtagtcccagctacttgggaggcttaggcaggagaatcacttgaacctgggaggccgaggcagaagttacagtgatccaggattgcaccactgcactccagcctgggcgacagagcaagactctgtctccagataaataaataaaaaagattcattataaaaatgtagaattttctgggtttaattctgtttctagtttgttttccactggagcagctctgggcaaattttt

SEQ ID NO: 71412 - DNA, 1023 bp, Homo sapiens
cactctgatgcccaggctggagtacagtggtgcagtcatggttcactgcagcctcaatctcctgggctcaagcaatcctcctgtcttagcctcctgagtagctagtagctgggactacaggcctgtgacaccaggcctggataatttttaaattattgtgtagggatggagtctcattgtgttgcctaggtaggtctcaaactcctggcctcaagcagttctcctccttggcctcctagaatgctgggattacaggcaagagcacagcattcagccctttaagtcctttaaatggctaaaccaaaaaatcctctccgtagttttttggaagaaaagcaatgttttaagcctgaagtaaagttgtttgcttttattgatagacaatgtggagctcatactgaaaaccatcaataaccagcacagcgttgagagtcaagacaacgatcagcccgactatgacagcgtggcatcagacgaagacacagatttggaaaccactgcaagcaaaacaaaccggcagaaggtgagaggccatgcgtcccatggaagggcaagcacgcatcagctgagggctagccctgccaaagctgctgtgcagtgaggttgggtttgttactagctcaggccaagcaaaggtgaaacaaggttaaatggttttaaaatagggatccttgtccctgcatcacagccctgctgcagttgagactttataaaacttgtgaggagtgattggtgtgttttattcattcaacaagtgtttactgagtgacttctctggatattactctcctgaatgaggcctcgtccctttcctgtgaggctctcattgcctaggagagagagaactgcggagaaggcacaaagtgatgtgtgtcatacgaagcacacacaggctgagggagtgagcagagagagaatctatggctgggagcatcaggtggggctgtgtcataggacagctcttaagatgcgcctcaagggacgcttgggattggggcatgtggaggagtcagaaagaaagtg

SEQ ID NO: 71413 - DNA, 1048 bp, Homo sapiens
agattcactggctgccatttggatccagccatattgtaaacctctttcccatcccatgccattcatcagtgctttttaaatttctgctgttaaaagctggtggtcttggcccatgtgcgtgctcagagtttgccggctctgtgccacaacctccctttagcctgtgtctttcttccagactgcccacctcagccttaggaaaggcctaagggcccaaggcctcaaggccctgggaaatctacttctctgggattgacttctctttgtctagttctctcacatgaagcctcaccggggcacttctctccactttaaccaccaaagtatactcctcagctgttcccattgctctttggatcagaaccaagattcttaacttctttttgtaacctgtaagggcatcattcagctctcacctttcagagattgccctgcttcccatctggttccgtgtgtgtgtgtgtgtgtgtgtgtgtgtgtgtgtgtgtgtgtgtgtgtgtgtgtgtctttagattaacaccctctgaggccatgagctgcacattcaagtcctcttccaggaatcctgctttgcctacagcgtttgcctttcccagcttccatctctctgattcaaggacctgaaatctgaccagtgtaggtagcggctttcccaaagcctgactctgacattgcagcttccctcatttatgactttctcctcatttctgttttcacagaagaccctttactaaaacttcatataatactcagtattaaatattacattaaatgaatttatccttactagtatttaactgtattatgaaataaatgtgttttatgcaatttgtttggtgtctctgtgttctgtatctacagttttgtgtgtctgtgtgttttattgccttaaggaagttgtaaactaagatgatcaagatgataagctttggagtcagatagcactaaatattgtgtgatttccttttaattactcacaatctgtaagtaaattttattataaataattcaaacctagataaaaacccacgttttcttagactatcct

SEQ ID NO: 71414 - DNA, 1109 bp, Homo sapiens
tcagcatcacctaggggaaggaccttcttcaacatattggcccctggccccatcctgtccccattgattcagaatttccaagggtggggcctgcacatggtatatttctagaaatgcgctagttaatttttgagaacttctaccgtaaaccattgattaatttcatttttttacctcattaaattaagtcattctgtatccttccctctcataagtctttgaatttcttattaaatattctattttggccttaataaaggaaaggcgatagttcagatggtgaaaacagtttataaaagtgggatgcaaagtagacttcagaaatctacctaccacaagaaggttgatgattctcaaaagtcttgtgtgataaactgctcaggtgtctcaggagacgtctttgtactccattttaaagtcagtgaatagtgagcaatataaatggtactttgttttctcttggtaggcaaggagggcaccatgagctggcagagcgcctcgtggaaatacagtatgagctaacggacagactagccttctatctctgtggcaggaaaccaggtgagtggatggagaatgaccgtttcacatctccagttgggaaggttctagaaaaacaagttgggacactatttgttattacctcctctgctgtaacatatcactgagaaagctatacatatggcttttaatttgaaaggataactacagaattgtcagttacatgtaaaagatataaagttggacaaaactccttagatttttcatttttaatagctctagagaaatgactatttcaagaatcagactgaataatcaaagcaaaattgaatgggtaccacagttcttgaacatggtgggactaggaatgtaggagcaaagcaataacctttgtagttatttgaaaaattcttcttaaggaatggaaaaaaagtccagaagtaaactttgccaaagccaacttggctatttgtgatagggaacaggggtcagcaaaccatggtttgtagcccaaatctagccagttacttgttttattaaacaaagttttgtatcgtgccactgcacttcagcctaggtgacagagtcagactctgtctcaaaataaa

SEQ ID NO: 71415 - DNA, 1100 bp, Homo sapiens
atgaatctggttcatttcaaatacatcacactctgagttcaattacttgaaaactccatggagattttcagtacagtagtagagtggtcacatgaaatgttcaatgttttaagtatttcccatcaaaaactttgtccagtgatcatgaatttcacgtctagaaaatatctgaatactgagaaaataatttagaaaagatataacaactaacattactactttactatgtgtgaggtacttcacttattctctatatccttactatcccgagatttgtcattgttctcatttgaaccatggtgaaaacactcaagtaacttgtctgagatcattgtgcaagaagtggcagagttggggttcaaaccctgaactccttgtctctagagccaaccctcttaaccaccatactcactggctcccaggattcgtctttgattgaaagcccataacttttcattatatggtttgaaagggtttgaataaactcttaaaaaatggtaaagatggtgtacatgcattttagagatttttgtggacattgaagaatttttaaatgtaaccctttgaccaggcagcttaagtggcacctattgtcaccccattgtgagtctgacgaagtatagctctttctttatttgaggtttctaggtattcagtttacttacccagatccatcctgcttgccaagtatgaaattattccttgtttcaaaggacagctaatgaagctctatgactttaaagggaaaaaagtattatacacacactaaaaatattattcatttttattttacatctttgcctctgtgaagctgctgttattgcaacttcttttttttttttcagatcagttgcaggattggacttggtagtttatgtaaaacaattaattggctgggcacagtggctcaagcctgtaatcccagcactttaggaggtcgaggtgagtggatcacctgaggtcaggagtttgagaccagtctggccaacatggtgaaacctcgtctgtactaaaaataacaaaaattagccgagctggtggcacacacatgtaattccagctactcgggaggctgaggcaggagaatcgcttgaaccctg

SEQ ID NO: 71416 - DNA, 1081 bp, Homo sapiens
tggggcagttaggtccgcagaagtctgtccgcgagctgtcagcgcgggcgggaacgccgcggggcgcggggtgggcgcggccgacctggtccctgagccggccggcgaccccggacctcccgcgcgccccgcacccgaccggctcagccggccggcagcgtaacacgccctacgctcgcttgctcgccggcctcagggcaggcaggcgggcgcgggagaccccgccggggccgagacttggggcgggcgacgaggaccaggttacggcctcctcgccatgtcctcggcctgcgacgcgggcgaccactaccccctgcacctcctagtctggaaaaacgactaccggcagctcgagaaggagctgcagggccaggtgaggggcggggcgggggtccgtctcccggtggggacttcggggaatcgggggtcgtttcgcctccctgagcccatttccagccctctgtccccgggatccccagaccccttccactttgcaggtgtgggacagtcctaataataggacacgtatcgagtgcttaccgtgcgacgggctttttaaatatcttctctcttcacctttccaataacgctggtgggtaggtactgttacttttccactggacagagaaggaaacaggtcctcagacgctacgtgccttgtgcgaggccgccccgctgataaatgccaagtcgggattttaactcgggccggctggctccggaatgcaccgtcttaaccatttttaggttctgctgcctcaaagacgtaagaatagcacactctccttgttgtaaggaagggcttggttggttttggagtccaggttctaactcgccctgtgaccttgggcaaggcattttccctctctggccgacgttaacttagctgtagaatgaggatgttggtgctggggcagaacccaacacttgactctattgataggtctggggtgaggtccaggtgccgcatttttaacaaactccccagggaggctgatacctagcaaagtttgagaatcacgggttctcaggctccttaaaatcccttcctgttctaaagtgctttgatgctttaatcttt

SEQ ID NO: 71417 - DNA, 1121 bp, Homo sapiens
gattacaggcatgagccactgttgccggccttttttcatttaaaaagaattccagatacgataaacttttgtgagagtcatcgttcttaattagatgacagaccaactatttaagagttaaggagatatgacacatgccctcagactaaatgattcaccattaggcattttagtatactgatcatttaattccttttctattactagacatggtacagaggtaaaaactgtaagactcagctaggacactttaaaaatgaccagttttggtttttaggaatctacttcttttggtgcccaggctggtcttgaactcttgtactcaagtgatctgcccgcctcagcctcccaaagtgctgggattacaggcatgagccactgtgccttgcccaaatcctgtattcttaacccctactatacttctttcagtaaaaatgacttcatttcaagattatggagaataaataaggaagataatggacctgaaagtgcaggcatatggtaattggaaacaatatttactagtagctgctgctattataatcatcatttgtaaacctggggattgagcttttttgctctatattccagtttttctgcaaggaagatgtattgattgcataattaaaaacaaaaaattcttaagtccgggcacggtggctcatgcctggaatctcagcactttgggaggctgaggcaggcagatcgcctgaggtcaggagttggagaccagcctgaccaacacggtgaaaccccgtctctactaaaaatacaaaaatagctggatgtggtggcacgtgcttgtaatcccagctactcaggaggttgaggcaggagaatcgcttgaatccaggaggctgaggttgcagtgagccaagatcgtgccactgcactccaggctgggagacagagcgaggctccgactcaaaaaacaaaaaaaacccaaaaaattcttatcaccccagcaataaagtggctgtttcccttaatgttttgtttgctggtgagtttctgctgtcagtttcctcattccgtctatcacctgattgagacttggagcatgtatactgatagctgtaagaatttttttccaggttttttgttcctgttccaggaacagc

SEQ ID NO: 71418 - DNA, 1002 bp, Homo sapiens
tgcatacataatttctgtgaattctgtaataatatattttataaaggacattgatggaatatattgctaataagaatgcagattattaagaaaaattccgcacctttggggaagatggctcagagcttcctatgtgttgtggaaagctggtcagataatccctgtgcaaataggtagtcgataatcagtacactgtaggttttaccagatagcacctgggaggacacacatgaaagatgatacattttaacatacgaagcttccttgtttttgcatcttccctactttgcacttagttatgcctttgtttccattaatagacaactgggcggagttaatggaagtcaaccatgatgacaaagtggtcaccaccgaacgcttcgacctttcccaagaaatggagcgcctcactctggacttgatgaagccaaaaagcagggaagttgagcggcggctcacaagccctgtcattaacaccagcctcgatactaaaaatattgcttttgaaaggtacaaatttagactctaaattttaatgtctaatccccatgctgccatcttgagtgacatgtatgtattaattgtaaattatggatggattgggctttttctaatatgacataataaacactagtgggttttaagattgatctctaaccagtagaaattgtagctgacactcgacaccatccatcatttttacagttaagtcttagaagacttaaccaacatgaagagtatgaagaaatgtcttccttttcttttatgtcttttatgtgccctttctagtggattttacttgaatcctatttttgtcttagtgtttatggatccacaatactcagtcccagaccacagagcgtggagtttctggaggttagaattgacccagtactgagttcagttgtactgatattggtcagtcagattcacacttactatatagttaaatgtttgtttgtttgtttgtttgtttgtttaacccacctgtgaggtttaata

SEQ ID NO: 71419 - DNA, 1076 bp, Homo sapiens
ttagaagaaaagcaaactatttggaaacaaaatgctaataaccgcatatgttctttgtaacgtggctaacctgctgctgttccctgagcttcctgcatgacatcccaaccactcagtggtcagagcagaagtcaggctgttgccgtagccagggccaagaggagctgggatgtgatgtcctagacaaagggtagggctggtcagggatcccctgtgagagggagcgtttcccagggcaagctgctttgaaaaagaatcagagcctcctggctgcttttggttcctaaatacattttttttcaggagtatgttgagttgaataactgagattttgggcatattaccaatgctgcatctgccactggaatgctgggctactttaaaaggagttccacagagatggaattaacagctgggctaaaaaaatctgtttttcacatcctttgccctgctgcaccaaacctgcccaaacatgtgactcagctattttgcagacctaatggcatctccaagcagctcaccacagtgatgagttcctggcccacctgctcttttgtaaggagcaggatggtctgtgcctcattgttctaagaattcctcgagtgagatgtggctacttgtggagatcccaccattgacatgcatgtccccagttaagatgacccagataaatgctctgacctggttaccaccttgtggcaagcccttggatgctggtcatcttcagtcacttctttgggactgctgtccaataaatgtcaccacctttgtcctcaatgctggcagttttgtaaagaagccaagattggaggctttctatgcctggggtgaggcaaattgattaataactgtgggaggagggtggagggtgcataagccatctgtcattgctaaccgcctcctgtggacaataggaccatgatttccaagtgtccttcactaacttaagctgggggggaaaaaaactataaaggctacagatataaatctgaatggcatattgtacatgtagaaatttgtggtgttcactttttatcagaactaaatccggattctggggctggaggacagataaa

SEQ ID NO: 71420 - DNA, 1116 bp, Homo sapiens
ttccctcttatccattataaacgaggggcctctttatagaaatggaacttaaaaaggattcaggactttatattgcaacagagcaccttaacaaatattttcttacttgatgctcacagtaactatatgaacttggtacagtggatgtccctgcgggtcagaaaaatgaaattacctttccactatcaaagctagacagggaaacagctagaacttcaactccaagtcttccaagtctcatgcactttcagatatttctttctttttttctttgttataatcaggagataaaaatgtaaaggagagtagagaaatattttaaaatgaagaaatccattacacttcctgtgtagtttggtgatatcctcatagattttcttgttccatgcaaaaaagttagtgaatagaacttcccggtctttagctggttaacacgtccacctcagacactgagtgccacaggccttcacttgtgaacatcatttggcatttctgactctcctgagttctggctcagcaggacctcaccacggaatgtgctactgcaaacaaccccacagccatcacgcctgatgagtacttcaatgaagagtttgatctgaaagacagggacattggaaggccgaaagagctgacgattagaacacagaagtaagagaggttcagctgccattttcaacctatgtatgtttcagaaattgtgctgttttatggtgttatgttggatcattccactgccctccccaccacccttatttttttttcagacggagtctcgctctgtcgcctaggctggagtgcagtggcacgaactcggctcactgcaacctctgcctcccaggttcaagcggttctcctgcctcagcctcctgagtagctgggactacaggcgcgtgccaccacgcccagctaatttttgtatttttagtagagatagggtttcaccatattggtcaggctggtctcgaactcctgaccttgtgatccgcccgcctgggcctcccaaactgctgggattacaggcatgagccactgcgcccagcctcctctgcccctttttataaaaaataattttaaaattactttgccatgaaagctaacagtagattgtccatg

SEQ ID NO: 71421 - DNA, 1003 bp, Homo sapiens
ttttttttttttgagatggagtctcgctctgttgcccaggctggaatgaagtggcatgatcttggctcactgcaacctctgcctcctgggttcaagcgattttcctgcctcagcctcctaagtagctgggattataggcatgcatcaccacgcccagctaatttttgtatttttagtagagatggggttttatcatgttggttaggctggtctcgaactcctgacctcaggtgatcagctcgccttggcctcccaaagtgctgggattacaggtgtaagccaccgcgcctgaccgaaaatacacaactctcaatctcagttttcccgtctgtgtattgggaagggttgttatgaggcttaaataaaattatacttatcaaagtacttggcatagtaagcacttagtaaatgataactattattgttattctcagtaaagtttacttataaaagtttttattttgtttgttagaaattcccttgtttcatgtcttaaatgcacggattacatttggaaatgttaatggctgtagcactgccgaagaatctgtatctcaaaatgtggaagggacccaggctgattcaggtaaaaaaataaataaatacaaagtttagttttgttatttaaaaaaaaatttatggccggacgtggtggcttatgcctgtaatcccagcactttgggaggccgaggtgggtggatcacctgaggtcgggagtttgagaccagcctgaccaacatggagaaaccctgtctctactaataatacaaaaattagccgggtgtggtggcgcatgcctgtaatcccagctactcgagaggctgaggcaggagaatcgcttgaactgggggagaggcggggggatggaggttgctgtgagccgagattgtaccattgcactccagcctgggcaacaagagcaaaactacatctcaaaaaaaaaaaattataattcagtcatcatattcataattcactctgaagctggaatatctgagggagt

SEQ ID NO: 71422 - DNA, 1036 bp, Homo sapiens
ctctgccaaagagctggaggaatgggagctccggctccaggaggaagaggctgagctccagcaagtcttacagctgtcactcactgacaaatagacctttcagcctgtgagcctctgcacaaagcagaggctgtgggctgtcacagatgctgtgtcaaccagggccctagggctaagggcctgcaccttgcgtgcatgcagcaggcaacaactgccccttctttatgcagaggtgcagaaccagggactcctgggcccatccaggctgctccctggggtggagaagggaccagggattgcaggccccatctccaggctaaggggaggagagcatcatcactttccattagctgtattggcttgcaggtcacatttttactaccagctttagacaaaaccccaatccccgcaggtttgtagataaatttttatcaaggagtgataacaagacaagttattgcagagtcagggtgcttttatatataagagcagcagccgcctttgtaaagtgtgatctatgagaattggagacacttctttactgttcaccaaagaaatgggtaatctgtgctgatctccttatttttacctttttacagggtttctaggacattgtcattattcttcctccatctatctgattccattccttccacacccagctaaagttagaggagatacatatagaatctattttagattattgttaactatttgcatcaaattaagatacacaaatggccatggatgttgccttagccttaaacattactaatagtttcacatcacctcactgcacgcatcgaaggatctgatttgaatttgtaaaggcaattcttttgagagcaggattctccaggctaaatcaaaggcagctaatcctgtccctgaaggagcagctaggggaacctgaggcttgttcttgaagtgggcaagctggccaaaatattggaacacacagaaccaaaccaggtgtgttctacacctgcatgagtgaaggatttccacgtagacacctaggaagagcccgcatgcc

SEQ ID NO: 71423 - DNA, 1468 bp, Homo sapiens
agacatgacatttagttcacgtaggttggagattttgtttgacaaagatcttaaaattacttctggcctttggagttatgacatgctgtctttgtcaccttctccttccttcttccccctcactcaccaaaaaaagatgaattttcttttcttttctttttttttattttgagacggagtttcgctcttgttgcccaggctggagtgcagtggcgtgatcttggctcaccgcaacctccgcctcccgggttcaagaaattctcctgcctcagcctcccaagtagctgggattacaggcatgcaccatcacgcccagctaattttgtattttcaatagagacagggtttctccatgttggtcaggctggtctcgaactcccgacttcaggtgatctgcttgccttggcctcccaaagtgctgggattacaggcgtgagccactgcacctggcctgatttttctgtatagtcggttttaaaataataaccggtttaagcgtggagggtgtgtgtggggtgggggggtcacagatactacaaagttactgatttaaataaaactatggtcaaatcttggtttttcttttgttttgttttcttttttttgacagagtccctgtcgcccaggctggagtgcaatggtgcgatctcggctcgctgcaacctccgcgtctggggttcaagcgattctcctgcctcagccccctgagtagctgggattacaggtgcccgccaccatgtccggctaatttttgtatttttagtagagatggggtttcaccatgttggccaggctggtctcaaactcctgacctcgtgatctgcctgccttggcctcccaaagtgctgggattataggcatgagcccccttgcctggctaaatcttggtttttcaaaggaacagtaatgagactgaagaacaaccatggttaggccctagctggaacctgggatgggcccacatccctacagacacacatcagtgtacatttgcttgttttgaatgcttcccaagatcgctgagatagttacagaaacaagattgcgtatcactgctgctgttgaagaaacctctgacaggttgctggttacgctagtttttttttttctttatttttttttttttgttatgtagtagtttaaagcccaggtccttatcctgtatcaccagggctcaacttgagtaatcagttgtagttcccatttctcacctgagcaccttgaaaatttcagatgtgaaatttagtcttaaaaacgtaacatttttttttttgtttttgtttttttttgagacagagtctccctctattgcccaggctggagtgcagtggtataagcttggctcactgcaacctctgcctcctgggttcaagcaattctcctgcctcagcctcctgagtagttgggactacaggcacacaccaccacacctggctaattttttttgtatttttagtagagacatggt

SEQ ID NO: 71424 - DNA, 1026 bp, Homo sapiens
actttaggaatctaacccccaaaagtggaaaggaatacattagtgttgttgaaagccactaagttagtggtaatttgttacagaaactaatataattgggatttaacttgccttgggggtgctggctctcccccattttcttctcagagcatctcttgggtcctcaacccttgctgagcccccaccatggcctagaggaccagggatggacttgattagattctcctcttgggattttaaaaaagagaagcagaggctgcatgctcagcttctccgtgccgcactgcaggcacagtgcccggcgccactgttctttaggggtccatgaagatgtctgttggccctgggttagtcatgaggtaagggatatgagggcagttcactttggaggctcagccctttggtgttacttttgctctggaaccttaggagctgtaagggggagaggaactttgctgaaaggcacatcctccctgcagagcttgaagaacaatctaaccatgctggcatggggcccatcctacctgcaatgccaaggtaagtctgcgaaagtcacttatattcagagcatgtggattgggactctgaagaacaactttatggtggacaccttcgtctccatctggtgagtccagcacaagcagcctgagggttccatgggctcaacctcaccctccatccttatttccctgccactccagggctcctcctcatccagacttgcctgtgagtgccccttgatggatgtatttgtctgttctcatgctgctaataaagacatattcgagactaggtaatttacaaagaaaagaggtttaatggactcacagttccacatggctgggaaggcctcacaatcatggtggaaagtgaaaagtacgtcttacgtggtggcaggcaacaagtgactaagagccaagcaaaaggggaaacctcttataaaaccatcagatctcataagacttagtcactatctcccaccaggtccctcctacaacatgtgggaattatgggagctacaattca

SEQ ID NO: 71425 - DNA, 1072 bp, Homo sapiens
caatatgtggtcctttgtggctggctttttttcacttagcatgttttcggtgctcatccatgttgtagctgttgtaacatgttgatacttcattactttttttttttttttagatttggggtctcactatgttgcccaggttggtctcaaactccagcactcatgcaatcctcccacctcagcctcctgaagtattaggattacaggcgtgagccaccatacctggctgacacttcattcctttttatggctgagtaatattccattgcatggatggaacacttttatgtatccattcatccattgatggacattttggttgtttctcttttttggctatcatgaataatgcttccataaacattgcgaacaaggttttatgtggatatatattctcatttcccttgaatatgtacctaagagtggaattgctgggtcatatgttaactatgtttcacccttggaggaactgtggagctgaatttcacagcagctgcacccttttacattcccaccagcagagtatgaggggtccagtttctccacatcctcaccaactcttgttattgtctgtctttttaattatagccatgcttgtgggtgtgcagtggtagttcattgtggttctgatttgcatttccctgggagtgactgcctcttattctctgtgatgatgatgatgatgttgatgatgatgatgatgatgacaacctatacttatagagggtggcagtgtagtttactaagagtcaaggcaacttattttataatactggctgtgtcttcttggccaagtcattaacttctctgagcctctgtttctgcatctgttcatagggttgtgacaattaaacaaaaaaaaaggcatgaggagcccttatcatgatgattgacatagaataagagctccataactggaatccattttttaaaataatctttttgaatgtattatatatatatatttgtatacaaaatacatgtatgtatttttatatacatcctctcctttgaccctcagagtaaccatgtccaagtttggaatttgagatctggaaatgtggattctaaa

SEQ ID NO: 71426 - DNA, 1049 bp, Homo sapiens
tcaaacaaacaaacaaacaaaagaaataaataaaccagcatagtaaactacttataagtttcttaattattcttgttctctgtagctttcaatcctttatacatagtgttccttttttttaaatactgtcttccccttgttcatcttccacctaactgttcttactaatccttcgtgattagcttagatatcaatttctccaggaaattgtccccactgatccccaagcctgggttaggttcccgggagtcctgtgtgccttctgtaacaccttgtgttttcctatcatagctctcagcagcctgtttacttgtctgaacattacttgagaggaagaatttttggctgttttattcactattgtctccccagctcctaacaaagaacctggcacacagctcaatacatggtagctattattattatcagcaccttcatctatcataattctcaaatgtctggttgttgcataaataactcttaagtatgccaagaagcttagagttaagttacaagactgacaagggcatgcattgtttcagagccatgtttgggacctttgtttttcacttattcaatcattttccctttttatactaggaactgacccaggagtgtgatgaaaagaaatcccagtatgatagctgtgcagcaggcctcgaaagcaatcggtccaaattagaacaggtaagaagagagtttttattttaacaatttagcaaaaactacctgtgtgtacacctgtagtcccagctactctggaggctgaagcaggaggattgcttgagcctaggagtttgaggctacagtgagctatgatcacaccactgcattctagcctgggccacagagcaagactctctctctaaaaaaaatgttttaaatactgcccgtgtacgcacattttcactacatcaatgtcaaaagattcccaaatctttatcatcatctcctaagctccagagatctttatttctttaatttgtacacacttaatttcccatctgtaccactcccagcaaagtacaaggctcattatctgctgcctg

SEQ ID NO: 71427 - DNA, 2849 bp, Homo sapiens
ggacgggaggcgaggccggccgggcccccgaagccatggagaacgcgcacaccaagacggtggaggaggtgctgggccacttcggcgtcaacgagagtacggggctgagcctggaacaggtcaagaagcttaaggagagatggggctccaacggtaggtgcagggcgctccgctgcaggggcccggcgcggccgggagagccagggaagatggctgaccgggctccacctcgtgggcttcggctccgcgcccgccgacagctgcgggcggagggtcgggccagcgcgccggccccgcgggagagaaaggggctgcggtcctcgcctcgccttccctggacctcttcgcttctcgggccctcgaccttttcggcgcgcaaggctcggaggcttctctccagcagcagccggccccggtggagggagggacgtggcttctgcagctaggttgagcccggcaagacgttttctcgtcccctgccgatttatgaggagtcgaggtcgttggaaggcctctgaccgttcttgtcctacccaaagttacacatctggcagaagtgatgacatcgctgaaaccactcctaggttcaggagcccgaagtgatttcacgcttagggctagacctcaggccattgattacaaagagtgcatgcttccttgagatatcttcgtggtatgccctctgctaaaaaaatcggatattcttatagctaggtctgtgttttaaagatattgatgcttagaattgtagcagttctttttagaaaaacgaagtgctaaaatgtctctctctttttttttttaacctccctcttgacacattgcttgacgaatttctacattctacagagttaccggctgaagaaggtaatcttaacatgctgtttctgttttttttcctctgttggtgtgctgatggtaagatgacagttaaaacacatgtgtttgtttcttacaggaaaaaccttgctggaacttgtgattgagcagtttgaagacttgctagttaggattttattactggcagcatgtatatcttttgtaagtataaaaaaatttattttctttccccccaaaagctgaaagtattccatagataaatcagaaaacaaatgatgtccattgggtgaaaacatatttggagttgcaagctgtgtctctatgtttaaaaacaatctgggcattttaaaattacaaaacaaaacacttgaagccattggtattcagaaaatagatgcctgacatttacagtgtggttaggagttgtcccagagtgtggcatggtcttagaaattcttgtggtttatcagcttttaatatcaaaaagttcttttctgggaagcctttaatgttttgggttcttccattgttatcgtgttgtaagatcatactaagatgatgttggactctttgtagtctgtaaatagaacttacaaaaggaatattccagttgctttcccttcctggtaatggcaaggtgacagttgttcctgacggtgacaagaatgatgacggctgtgatggcacccttgttgaccaaatttggtcactgacctttagggtggtatatttatctaaattggacccctgtcttaagtgattcttaggttgaaagaacaaggtttagtacagttggttctagatcttaaaggaaaaaaaccagcatggtgttttttcttgttctgtgtgtgcttacccacttgagtgctatatggttgctaagaaactagtgaaatgcaaagaactacagcagaaaaagggtgttggggtggcaagtatatttctaggtttttaacttttttttaaatgttcggtattaattttttgttgcattttttttcttgggcagtagattgcttgctagttttcctaaaaatggtcaggaataggacacagatgttcctaattctaatagcatgagatgccttttattcttgaattacgttattcttacaaaaaccacgataagtgaaattcacccagtgcagtacttctttctagttaaaacaaaattgacaaaacttcacggtttcagttcttgtacatatatgtatgcaggtcccagggatcagcctcagtctttgtgagaaccataccatagagggctattttgagaacgaaataaacaaagcagtgggcatttatttagttcagatgaggaaaagattaaatttatacccatcttttaagtagatagtggcagcagtaaataaatttgtggaataatttttacataaatcctgctatgatactttattatgccatattagccaagtattgtgtagccattaataattcagtccccaagaaccttttctgtggttttcattgattaaaatggggacttacatagcaaaccattcagcattctgagtcagtcacaatgtacctctgataaaatgtttcttcttgattgattaaaaaattttcccccagaaaatggctgctgttttaccaattaagggaaatgagtagacccgattaactatagtttatcaatacattgtcatggggcaaaataaatgatacatttggagctagtgtaagatttgtatttaactgggtacataatagcgttggcagttaaataatggggtccgataaggtcattgggaacttcttaaaaattaatcagctgactacaagccagaagcaaaatacatttttactgaattctctgtgttacaagttgaagcagtgtgggaaaccatgccactggtgttactattggggttgcactgggtctgttttttgagtggccagtttgagtgactttatattagcattttaaattaatgatgtgtgtgggttttgtttgttcattttttactttgaagtaattagaggct

SEQ ID NO: 71428 - DNA, 1394 bp, Homo sapiens
ttatagagctatattttggagttgaaatttgagctcctttttggtaactgtggagttactgctcaggaaatgaactgtgttacatttttattttatgagttggtaaatagcaaaagaataagtgtttagggagtacttctatagaattaatttgctttggtttgtttgatcaaggaattgcagatataagacctgttgtgttgattttcttcatgtggggttgggtactgctgctgcattgtctttagtgtttcattcctcctgtctgtatcttttaaaagaaagagcactgactctctttttgtgtcagtttattcctattgatgtaacagaaaaaacatggtagaatattcaggtttttttggagaagtgactaggcgattcttatatacatcatgcgtcatcaagtcatgcttaaattaaaaagaatattagtgacttacttcaaatatcaaactaagtagtaaactgttaactatagttaatattttgctgtggcatagaataggaagctatgcttgtgacctgtagggatctagtttaatttgtaatattggccaaagtgtttttttgaaacggtcacttggattgaaagaaataagcttcatcttccagtgcatatgaacattagaaattgcttaatttgacactgaagaccccccctctatcattcactttatcttttcattctcttcttgattaccaactttgttctaaatgtaacacatcgtatggttgcttaactgatgcctgccctttcttctcttttcctgctttgttaagatatttattgagcacctgtcacagacactggggatacagtagtgaataaaacagacagagacccttacctggaggataatactgctgagaaaaataaagcaagggggtttggatatcagagtatgtgaaagggggaacagttttcaaattgggtggtccggaaagttcttgaggaaggtgacatttgcgaaaagatctgaaggaggtgggcattagggccatgttggtctcccatctgtctaaatcataaagtcataattaatatggtaataatttgcataggtttctctaccttccaccgtcgtttcccatgtcagctacttagattgaccctaaaatgctaataaaactttctagactgtggtacttctcaacctttaggttacatttgaccatttgcatgtgtgtgtctcttttcttcctactagacccccttgagttagtgcttttttttttttttttttttaaatgtagatggagtctcactcttgttgcccgggctggagcgcagtggtgcaatctcggctcactgcaacctccacctcctgggttcaagtgattctcctgcctcagcctcctgagtagctgggattacagatgtccaccaccac

SEQ ID NO: 71429 - DNA, 1037 bp, Homo sapiens
ttatcacagtgtatagatatctgagtcacaatatcatgactgtctcccagtttacagcagaacgtgctttttaccttggattaaaatttgctttatttggccgggtgcagtgagtggctcatgcctgtaatcccagcactttgagaggccgaggtgggtggatcatttgaggtcaggagttcgagaccagcctggccaacatggtgaaaccccacctgtactaaaaatacaaaaattagccaggcgtggtggtgggtccctgtaatcccagctactcaggaggctgaggcaggagaatcgcttgaacccgggaggcggatgttgcagtgagccgagattgcgccactgcactccagcctgagtgacaaagtgagactccgtctcaaaaaaaaattttttttttgctttagtatacttatcagaagtataatgcagtacagagtgttgtacagtatttcagtgctgtacagagattaatcttgtggataataattgggagatactctatccctactctatttttaacagtttaatgtagttgagtgttcattagcaagtggttactttgaataatactggcacatttgaagcattgaacttgtttgataatgtatgtcccagaagacaggtattattgtatttagcacaaagcaaagggaagaagaaacactgtttatgtccaaaactatggggcagtggtcttctcttttacttttctttgctgctgttcatgaagcttgttaccttttcgctgtcttttttttgagacggagtcctgctctgtcgcccagattggagtgcagtggtgcgatcttggctcactgcaacctccacctcccagcttcaagtgattctcctgcctcagcctcccgagtagctgggattacaggcatgcaccaccacgcccgggtaattttttgtatttttagtagagacggggtttctccatgttgaccaggctggtctccagctcctggccttaggtgatccgcctgcctcagcttcccaaagtgctgggattacagacatgagccacc

SEQ ID NO: 71430 - DNA, 1007 bp, Homo sapiens
tcattattgccataaatcatttggaggagtgttttcatgatttactaagtagatcttttaaagaagattttattatgaaatatgcaaacattttaagcaattttttaattaaaaaaaattcgacctccaagattaaatcattagatgtggttaacactgtttctggattggtaagtttccacaaaaagaggtttttaaatttttaaccacatagaccactctttaccatattcattattcttagtattcattgtggtgagttctctctttttaccacgtttatagttgttggattgggaagtgcagtgtgactcttactttgtagtttttaaatcttaacaagtttatagttgtatgagctaaaagtttaaacctctgccccattttcttggggcagtgttctgtgaccagttacatttttggacttaggttatctctgaagtgctgtgttgctgtataaatgtcatatggaggataacctacaaaatacacttcggatctcccaacagctttgcggttctgaaacagccttcagtagtaccactgaaaagaaacggggaattaactggttttttgtttcttttatagagatgagggtctcgctatgttgcccaggctggtctcaagctcctggcatgaaatgatcctcctgccttggcctcccaaagtgccgggattataggcatgagccactgttcccggcctagaattaaacagtttatatatgctctaaaatttaagtcagtgatcaagttgtttatactgtggatttatgtcacatggatattacttgatatgaataataactaaatgaacatgactgttagatgatcaccttttactttaatcaagaattgaagttttattttttctaaatagatacatataaaatgaatggaatttattccctctccccagattttatttggattctaaaatggaattattacatcaaaagataaggtatttttaagaagtatagttgtttttttgagactgagtcttgc

SEQ ID NO: 71431 - DNA, 1029 bp, Homo sapiens
gaaagaaaatagattttgtctatcataatccctttagtgctagccacttttttttttttttttttttgagttttcgctcttgctgcccaggctggagtgcaatggcatgcagtacactcacggctcactgcaacctttgcctccccaggttcaagtgattctcttgcctcagcctcctgagtagctgggattacaggcacctaccaccatgtccagctaattttttgtatttttagtagagatggggtttcgccatgttgggcaggttggtctggaactcttgacctcaggtgatcgcctgccttggcctcccaaagtgctgggattacaggcctgagccaccatgctcggccagtgctagccactttttaaaaaagtgacattaagcctaaaaagacacattctaacgtgccatttctcttctaggttttggcttggtttgaagaaggtgaagaaacaattacagcctttgtagaaccttttgtaattttactcatattagtagccaatgcaattgtgggtgtatggcaggtaagcaaaaattcctgtactgcaaaatttcaataagttatgtaagtgattagggctgtattaatctttctgttatctgtttttcctgatgtgttgagtaaaaatatgtttgcgggaagtttacatgtattttccctttattccataaattaattgttttctgacacagtctcactctgttgcccaggctggagtgcaatggtgttgtctcggctcactgcaacctcttcctcccaggttcaagtggttctcgtgcctcagcctcccaagtagctgggactacaggcacgcaccaccacgcccagctcatttttgtattttttggtaagagacagggtttcaccatgttggccaggctggtcttgagctcctgacctcaagtgatccgccctcctcagcctcccaaagtgctgggattacagacgtgagccaccatgcccggcctattaatttaattaattgcaaatttttgaccttaatgcatataaactttgcagt

SEQ ID NO: 71432 - DNA, 1159 bp, Homo sapiens
tggggttttttttgttttgttttgttttgtttttttgacatagtctctttctgttgcccaggctggagtgcagtggcaggatctcgtctcactgcagcctccgcctctcgggttcaagcgattcttctgcctcagcctcctgagcccagactattaagctgtactgcctctcatgagacagaattgattttaaatggcagggggatttggctaaaggtgaaagctgtgttttacagtcttagggacagcagagtctgtaattgcttttcctcattgttttatccccttagcttaattgagggtacttaacgtttcgtttttaatacaaattaataaatgtccttgtgtctgttgccttagatgtgaattgtttagtacaaatgttactggtgggcttcctttctttttaaagattagacctctaacattttattccttgggttagaaataattgcagtgtcaggcaggtctttactactcttctgttttcttttatacaggaaagaaatgctgaaaatgccatcgaagcccttaaggaatatgagcctgaaatgggcaaagtgtatcgacaggacagaaagagtgtgcagcggattaaagctaaagacatagttcctggtgatattgtagaaattgctggtgagttgagtttgtcatttttcttttattctagatagtatttctgaatgtagtccttttctcaaggctcataattatatttaaaataattgttttcatgtatcaattaacacattttattgccattcatacaaatcctacattctctaaaattattttgaaatgttttagcacctcccttcctgtcattgataaggcttttggtttttgtttttaaacaaggtattttgaattctacttgtttaaatacattgtagaacacaagtgctagagaggtaaaacctaatgttgatttgacagttagttatagtgaacaatttgttagaatactggctaatgacgacacagtttttcctgttttgtttcttggcaccaaagttcatggtcaagggtaatttcttgactctgaaagctatgcttggccaggcttggtagctcacgcctgtaatcccagcactttgggatgccgaggcaggcagatcacgaggtcaagagattgagaccaccctggccaacatga

SEQ ID NO: 71433 - DNA, 1004 bp, Homo sapiens
gaagctttgattattaccctgacctatctcgctttctcacactgaaatttcattttctatattgtaatatagttttgttgttgcatttgatagtttagaaaggacaaataatgtttgatctatagtgtatgtgacttaagattttcagtctaatgggattttccttatttatattgtggtaaagtatacatattataaacttacccattttaaccatttttaagcgtgcagttctgtggcattaagtacattcacattgttttgggactgtcaccatccagaacttttatcttccctaactgaaatgtacaccttaaacactgacttccagttcccctcttccctggcccctggcaaccattccctttatttgaatattcaaaagacaatgaatttaatattcaaaaaaaacctgagtttaaatcccttaggtgaatatactactactataaagtggagtacaaatttaaatccattttcctttcacctgtttctgaatccttcatagatagtgctgattctggtagttatttaccactttttttccccagctcttcccccacagtatggtaattgctaaaaagcgtatatattgctttgacgttgggctctgtttttctttaatttttatttttattactattattattattattattattattactattttgagacagggtctcactctgctgtgcaggctggaatgcagtagcgtgatctcggttcactgcaacctctgcctgcctgttcaagtgattcttgtgcctcagcctcccaattagctgggctcaccagcatgcaccaccacacccagctgatttttgtagttgtagtagagatggggttttgccatattggccaggctggtctcaaactcctggcctcgtgacccactcacctcggcctcccaaagtgctgggattacaggcgtgagccaccgtgcctggcctattattattttagttaagcccagctgtgtgagacattgggctcttaagtgc

SEQ ID NO: 71434 - DNA, 1010 bp, Homo sapiens
tgaacttttcaaagactaagctggaataggtggttttttgagggagatatggagagagagtttaaggaaactaatttttttttttttttttttttttttttttttttttgagatggaatctcactctgtcgcccaggcaggagtgcaagggcgtgatctcagctcactgcaacctccgcctcctgggttcaagcgattctcctgcctcagcctccctagtagcagggattacaagtgcccgccaccacacccggctaatttttgtatttttagtagagacagggtttcaccatgttggccaggctggtctcgaactcctggcctcaagtgatccgcccgcctcagcctcccaaagtgctggaattacaggtgtgagccaccatgcccagccaggaaactaaattttatatgttgctataccagctaatcattccaaagagaaactgggtaagcatacatagcaaatgctaatgtgagtcttaagtatctagaacacaagagccaaatgaaattgatatggcaaataaaaacatggagaaaataacccgcacataggctgtgctcagtggctcatgcctgtaatctcagcacttttgggggaggccaaggcatgcagatcacttgagtccaggagtttgagaccagcctgggcaacatagtaaaaccccatccctacaaaaaatacaaaaattagctaggcgtggtggtgcgtacctgtagtcccaacgacttgaaaagctgaggtgggaggatcacctgagcccaggaggtcgaggctgtggcagtgagctgaaattaagccactgcactccagcgtgggcaacagagtgagaccctgactcaaaaaaaaaaaaaagagaaagtgacccacatgttcacctcttaagaagccacagtaattctacattatcttaaggccaagaaaatatttctccggatggatggaaaccaaaagtagtgaagttgtacataatcttataagaaatgaacgtcattgtttttaagctttc

SEQ ID NO: 71435 - DNA, 1032 bp, Homo sapiens
cacagttaaatctgcccatctaggtggtttggtgttaatgcttaggaaaggtggttcccatggccagcagcggtggctcacacctgtaatcccagcactttgggaggccaaggcagatgaagcacttgaggtcaggagtttgagaccagcctggctaacatggtgaaaccccatctctactaaaatatacaaaaaattagccggacattgtggtgggtgcctgtagtcacagctaacggggaggctgaggcaggagaatggcgtgaacccaggaggcggagcttgcagtgagccgagatcattccactgcactccagcctgggcgacagagcgactccgtatcaaaaaaaaaaaaaaaaaaaaaaggaaaggtggttcccaaaccacatggtttcttctcctttttccaaaatcttcatctcagtagcaagaatgaaaaggttggcacttcctggtactgtgactaccactgaatcatggggagtagagaggaggtgattacaggaaatcaggaaggaaatgccagccccatgaaatcaggtcaggcttcaagatcaactggcctatcatggtctgatggttgaggagaactctcatttctcacagttcttaatgtcttagctattctgacagtgctcaggggctctcaaactcaaaaactctctatgctgatttttgttttagactattttgctcttctgcttatccgttttctagagtaataatttataccttggctttggaaacagaggtatagcttccaggatttacagaacaactaaagcaatttttcttttttgttttgttttcttttttttttttttttgcaacagagtctcgctctgtccctcagggtggaatgcagttgtgcaatctaggctcattgcagcttccatctcctgggtttaggcgattctcgtgcctcagccacccaagtagctaggattacaggcatccaccaccacacccgggtaatttttgtatttttagtgaagatgggatttcacagtgttggccaggctggtctcgaac

SEQ ID NO: 71436 - DNA, 1124 bp, Homo sapiens
agtatactgtgaggattttgttctgattggaaatctttattgtaatagcaaattaaagagctgtggattttcaagagctgaatttgaaaggtgtcagatgttaaatggaaggtaattcagagtttattcttttattgtacctgcctccacccaaagagtcagagaaaaacatttggaagaaaaaattgcagagcatccctttggcaagagtaagaattttccactaccacttgccctaagagcattgacatgcctcaccagggaaatgttacaggatgtgatcatcggaacagcctagcctgctcttcatgcacaaaatcctttgtctgaaattcacagaagcctctccagacaaagggaaattgttgtgtcttcacttgaaaagtattcggtggacctttactttcatgaaccttttaactctaagaacctgttttcctaatagagtcaaccctaaattgactctgatatcaacaaaaggaatgtaacagtcacacagcaagttaaacaaaggttttcattaattgagcttccttagagaaggctacttttacttcctagcctgagttcctgtgcataaaatgaagaggacattggttggtcaagatgatgtgatggtccctctagctaagaaaatactagaatatggcaggttcgttggtttgtttttgagatggagtctcgccctttcacccaggctggagtggcgcaacttcggctcactgcaacctccgcctccaaggctcaagcgatagtcttgctttagcctcccaagtagctgggattgcaggcacccaccaccacacccggctaatttttgtatttttagtagagatggggtttcatcatcttggccaggctggtcttgaactcctgacctcaggtgatctgcctgtctcagcttcccaaagttctgggattacaggcataagccaccgtgcccagtctatggcaggttttttggatttatgtttcttcaatatctttctacaaagatcagtttctaatagaagccaattaaacatagaaactctaaggtagcatatttcccaagtgttgggaggctttggagctttttagcttcgagttggtgtgcctgatagatgagaaacagcacaacagaa

SEQ ID NO: 71437 - DNA, 1019 bp, Homo sapiens
atattgaattgtttaagtctgttcagcagttacaatgcagaagtaaaatagtgcttatagattgacgaccgctatctcacattggacagaagtcttctactccataggatcatgacattgacgtaaatcaaatcctcagacaccaaaggaacatttggaaataaattttccatttagggtcataatattcatcattgaacttgtcctctttttgaaatgttcgagggcatgtaggatcaggttaatcatgacaggcagaaatagtgcagtatagggcatgttagctgttaaagaccactaaagtttagaatatagttactttgttgtcttaaatcatctgttagatgtactctcttcaatgtagttagagcagaattatattaaaatgaaaggttctcgttgattcagtctgaatattgctgttcattgcacaagcatttccagcaggaatttcaccttagcttgtgtgtccctgcagtcaaatgcaagggtgatctttgcctgttgagattatatattgacaaactgtgccgccttgtgaccacattgcttacttaggctatagcattgtttttatgcactcaaattaaaaaagtaaaccatattctccctgaacttaagctccgaagtagagaaaaatcagaactaatttgaaggtttaagaagttcagtgttggctgggtgcagtggctcacgcctgtaatctcagcattttgggaggcaaggcaggtggatgcctgaggtcaggagtttgagatcagtctggctaacatagtgaaacgctatctctactaaaaatacaaaaatgaggctggttgtggtggcgcacgcctgtagtcccggttgatcaggaggctgaggcaggggaatcgcttgaacccgggaggtggaggttgcagtgagctgagatcatgccactgcactccagtctgggtgatagagcaagactctgtctctgaaaagaaaataaaaaataagaaattcaatgtttacttcttggacaggagtgctattttgcc

SEQ ID NO: 71438 - DNA, 1047 bp, Homo sapiens
tgtagttttattttgcatttgccatgtgtttcgttaattgaatatctttttaaagggggccatttgcttcctgttcacaataatttagcttttttgatggaatgaatcatggcatatacaactttattctctttgctgtgccttgtgtatatgtagtaagacttttacttactgctaagtaggaaagtattctttaaagtgaaagcttgaaggcctgtctgaagatacagagcaaaatttcttagaataatgtagttaggtttccttaagcctcattctcttccttcctaattcaaatcttgaatccatctaaagttttttatgactccaagataggttgatcactttgcttgttttaactgaattttatgtatttgtgttatatgcagatcatttattttctttaaaaattgatttggagacaaattcatctttagataacatagttttaaaagttgctcatttcagccgccttttttttctcctaattagttggtgacaaagttcctgctgatataaggttaacttccatcaaatctaccacactaagagttgaccagtcaattctcacaggtaaatatgatatattaagtcattgaatttctgaagaccttcgcatattccatgccaatagagttggctcttgcctcactgtccctttatggtatcccatcttaatcctctctaagatacttatttcttagtgctttagtctcgctccattgcccaggctggagtgcagtggcgtgattgcggctcactgcagcctccgcctctcaggttcaggcagttctcctgtctcagcctcccaagtagctgggactacaggctcctgccaccatgcccagctaatttttgtatttttattagagatggggttttaccttgttggtcaggctggtcttgaactcctgacctcaggtaatccacctgcctcggcctcccaaagtgctgggattacaggcgtgaaccactgcacctggctgccgatacggttttaaaggcatgatttaaaaacaaaacaaaatggctgggcacggtggctca

SEQ ID NO: 71439 - DNA, 1314 bp, Homo sapiens
tttatttaccatgcgatctttccagtacacttgctaattgctactccagagcatagccagatgtggcccacacctgtaattccagcactttgaggaggacaagatgagcaaattgtttgagtccacgagttggagaccaccctgggcaacatggtaaaacctcatctctacaaaaaaataccaaaaaaattaacccggcgtggtattgggtgcctgtaatcccagctattcaggaagccaagttgggaagattgcttgagcccaggaagttgaggctgtagtgagttgtgatggtgccattgcaccagcccgggtgatagagcaagacctctgtctcgaaaaaaaaaaaaagtatcagtatatatgttaaagtatttattaaagtatacaacaaatatatgtaaataatacagtcacagtatcagagtataaaatgattactgaaaaataaattaatttgaatagttactccagaaaataatcaatggggattctacttgaaaattcacttttttattttggaattgtgttgatttttatcctgacaccctttgttctggtattaatttccattactaagttttcccagcttacctcctttgaatgaattgggccttttgccaaccttttctcacactaacagtatcccaagagtggtaatgggtgggcatgaatgagaggttctaggttcttggtgtgggtcgcagagatctgttttttctgtctcacaacccgcttaggtgaatctgtctctgtcatcaagcacactgatcccgtccctgacccacgagctgtcaaccaagataaaaagaacatgctgttttctgtaagtactttatgaaatgtgtttttatttacagacatttccaaagcctaatcaaatgttatgtttttcactgccaaccatcactggctatcattctaaaggataatcacacttttcatggtcagtcttaggtgtcagaatatggcagtaacataacgtgtgacttagatgtcttttaattggcaagttttgggggaccaaaaaataatgactagcttatacatcttcaaactcttacctgcaaacatagttgaaaagtagatttgtttggaaaagccttagccaataaagggtattttcaaaatgatgtagatgacagctgctatttgtatgtggttcacaataaaaaggtgcgtgtttagagagagagagaaagcaaacatggcaaaccattaataatggtgagtctaggtgcaaagtatatgaatgttcattttactatttcactttttctattgatgtgaaaaattctttgaatagtgaggaaa

SEQ ID NO: 71440 - DNA, 1347 bp, Homo sapiens
aagtggcatgggagagactgctcacatttgatttctttggtttttggaccctgtcacatgagtaggggttgtcaagatagcccatggggctagttgccgtttctattacagtgagaaaagtaggggccttgagttgttggagccagaagtggagaatgcttagagttgaactatatgagtttgaaaaattgggaacacagaggggttaagagcactgcttgaagatggtctgcaagccgggctcaaatagaaatctaggtgggtcagtacagagctgcctgacataagtaagtagcacatggagcattgcttgttgtcacagttgtatggctggttgcttgaacagtagccagtggaagacctagtagaatgtgtagagaatctgggtgccctagtcaaaaaccagcgtcggtatttaagttgggatgtggtattcatcttgtgaccagttctctacttctgtcctagggtacaaacattgctgctgggaaagctatgggagtggtggtagcaactggagttaacaccgaaattggcaagatccgggatgaaatggtggcaacagaacaggagagaacaccccttcagcaaaaactagatgaatttggggaacagctttccaaagtcatctcccttatttgcattgcagtctggatcataaatattgggcacttcaatgacccggttcatggagggtcctggatcagaggtgctatttactactttaaaattgcagtggccctggctgtagcagccattcctgaaggtctgcctgcagtcatcaccacctgcctggctcttggaactcgcagaatggcaaagaaaaatgccattgttcgaagcctcccgtctgtggaaacccttggttgtacttctgttatctgctcagacaagactggtacacttacaacaaaccagatgtcagtctgcagggtaagaggagtaatttagaatattccgtgtcgtggttctttgttcatcctaccaatatgccttcatgccatcaaaacttttgatttgtaatttcatacatttctgtgggctgtatgtatagcctgagcttaatttctaatatttgagaggatctaatcatttaattcctaaaactttcacaaaatacaggatatctgtatggctgatatacttgtattagatgtaagagaattagagaaattatattttcctttaattaaaaaaaaaaaaagcctgggcgcagtggctcacgcctgtaatcccagcactttgagaggccgaggcgggtggatcacctgaggtccgaagtttgagaccaacctgaccaaaatggtgaaaccctgtctctaccgaaaagacaaaaattagctgagt

SEQ ID NO: 71441 - DNA, 2152 bp, Homo sapiens
gtgcccagctcaacgtggcctgtttaacttgagttttacattttttaaattccccttagagaatgatttgatcagattattaattgctcatatttcagagaaagcacgagaaaatatagttttgacatcactttctgtaattttttctttttagaggaggttttacaagttttcatttgcaatgaaaacacaagcctaaatcttacttttccaaactgggcttctgaattataatttgtgaatgcaaatcaagcagtggaaaaattatctttaagaaaatagcttatgtcgctttaaaaaataaaattaatcctttcctaagcatgcttccatctgtattgtctagggaacatcaattcattcagctctgcgggctccttactgtatacatatagttatgcagcttcatagaacatgagctattgccacaataaaaataagtgggaaggagcagagaagcagtttgtcttattttactcgggaaatgtttatgcaactctgaaatgtgagtttattcttcccaagcttttgtgcttagctctaaggcaggactacctaataccactctcacagccagccatttgaaatttgggattctgagcaatctaaagagtaacttgtctctggaactgaccttttgctgaccgggagtcctcataacttggattttgtgtgggttgttgtgtctttggtgccactgctgctcattcattcagcacctcagtgatgctgtttttcatactgttcgattggtcgggggtgtgatgggcgaagcagtctaatataattaagctagttagggtaagggacagtactgctgatgctgagtgagcctcagtgagttttattaaagttgttttcgtaaatgaaagaggttgtttgcctttgtcctaagctaacaaaggtagtttatttgtgtagcattttttaaaaatcccttttaaatactctgatgcgctctccccctacagatgttcattctggacagagtggaaggtgatacttgttcccttaatgagtttaccataactggatcaacttatgcacctattggagaagtgtgagtaaccctcctcctcatttaaaggatctggtgtggcagtttagtatttgtattgatttgcagcatgtctacaaagttaagacagctttctgaatgtggctcaagtcaacacttattactaaagtagtaaatgtttttaaaacaaaaactttgaaagatgaaccaaaggttataatccagtcatctttttgcatcttctgggctccaaactttcaagagggatttgtgtttgttattcactgtagccagtggtggaagaattgaattaagaatttctggtctttttactgattgatttctgataccagagatgcattctctcttttgtttttgtctaatattggctctggcatcaaattgtttggaattttttccagtatgttgtcccagaaattctgttttcattattaaacaattgcgggggggcagggggcgggaggaatcaatagtggcgaccataccctgctctaagagtgttttctctttgggcaggcataaagatgataaaccagtgaattgtcaccagtatgatggtctggtagaattagcaacaatttgtgctctttgtaatgactctgctttggattacaatgaggtaagtctcttcataaattagaaggaatggctgttcctagttcaagggtggggtgggtggaatgaaagtctagcctgccttcctcccttttgaaagtcaagggtgcctgattttgtttcccccttccattcagaacctgatggtggggccagcatgacctcaccaaagaaagctgagagcctttcacatatcctctgtgactgagcattgcagttagttaacttaaagttgtagtatatgtgatgttctttctgttgatagcatacttactataaatgaataaaacccaggatagaaaatgctttcctgaaagcaaaggatatagtttctgtctcaaaggtaagctagtccctgtcagagacagaatgtgaactcttcagaatgataagcagtgacatggaattacattattatgtgaaggcactctttgaattaatagtgtgatcagtggcttcttatatttgggtgaaataataaatactgtgtttgatgtc

SEQ ID NO: 71442 - DNA, 1187 bp, Homo sapiens
ttatgtaacagttcatatgtatgtatgcaaattttctatcccccttccctttttctctatagcacttgtgttacttttgcatcttagtctgtctctcccaaaataggggacaagtttcatgagggcaaaaacctgtctgttttgtttattgctatattcctagcatctgtcatgtaataggtgtgcttactgcttgttaggtaaaaaagttcagaaattgccacccagtagtatccatatttgttccctttgtaggtcattaaacagctgatgaaaaaggaattcactctagagttttcacgtgacagaaagtcaatgtcggtttactgtacaccaaataaaccaagcaggacatcaatgagcaagatgtttgtgaaggcaagtatggcagattgcaattgagatgttcttgccagggttaagatcccggtgaaccaataaaacaaaattgtttatctaaatctgtaacatttccagggtgctcctgaaggtgtcattgacaggtgcacccacattcgagttggaagtactaaggttcctatgacctctggagtcaaacagaagatcatgtctgtcattcgagagtggggtagtggcagcgacacactgcgatgcctggccctggccactcatgacaacccactgagaagagaagaaatgcaccttgaggactctgccaactttattaaatatgaggttagctaatgaaaagtttctttgtccacaccctgcacgattcattgtgtttaaacagtactccttcaagcaaaaggtcaaacagttctcacttttgccaagaaagaggtgtggttatttgtttttctgcctgccagctgtgtcacccttaaaatttgctgcttcaaacatacatagttaataatttcataaaagtgttattttcaaagtagaatattttcaaagtagaataatcaagatgagcttaagcttgtaaaccccattttgcctctcatctaaatcatgattttttttaaattggtgacatttctagaatattcattagttactgaaggtcaaaagatccaagttggagattacttccacttttctactcagagtagaattcttttatatcaaggatgtgacatcctaaagctatgaacaaaatgaagaagctttggtactgtgggctcagaatagcacaagagttaaagaatggtttgataacg

SEQ ID NO: 71443 - DNA, 1156 bp, Homo sapiens
gaccagcctgaccaacatggagaaaccacatctctactaaaaatacaaaattagccaggtgtggtggcgcatacctgtagtcccagctaccctggaggctgaggcagaagagtctcttgaacctgggaggcggaggtcgcagtgagctgagattgcgccatggcactccagcctgggcaacaagagcgaaactccgcctcaaaaaaaaaaaaagaaaaaaaatgcagaaacctgtctcaatgtttaactgggcatttttcaaactaggggacaaaaactagaacttgccacttttatttaaagtgatgctcttattttagaccaatctgaccttcgttggctgcgtgggcatgctggatcctccgagaatcgaggtggcctcctccgtgaagctgtgccggcaagcaggcatccgggtcatcatgatcactggggacaacaagggcactgctgtggccatctgtcgccgcatcggcatcttcgggcaggatgaggacgtgacgtcaaaagctttcacaggccgggagtttgatgaactcaacccctccgcccagcgagacgcctgcctgaacgcccgctgttttgctcgagttgaaccctcccacaagtctaaaatcgtagaatttcttcagtcttttgatgagattacagctatggtgagcatgtttgaacatgtacaggtgactcaggctacacaagcacatagtagcctctaattttgaccactgaatttttttgtcatagctccctaatttggaatttgtcatgatttgggtcttttctctagaattcggtgaatcagtggttagcatgttgtgtgctacttgcagggaagatcctagagtcgtttaaaacccagaagggccttccagatcagtcccagaggaacaatctggtgatctagtctcttttttaaatgagacgtgtttttattgtaagttttctgaaaattgaggatgtaatcagtcagttgtttggatcaccctgcttttaagttctttaagagctggctattgatgaagcatttccagtattcttcccctcacctgattttcacccagatacattatgttaaatttactttcttctcttttaaaaaaaaatcttagttttgaaacatactataagtgtactctcctctcccccagaggtaact

SEQ ID NO: 71444 - DNA, 2173 bp, Homo sapiens
aaaattgctgggtgtggtggtgggcgcctgtaatcccagctactcgggagattgaggcaggagaatcgcttgaacccaggaggcgtgcagtgagccgagactgcgccactgcactacagcctgggcgacagagcgggactccatctcagaaaaataaaaatttgcatatttttgcaatctgcatctttctacttgaaatttatccatgtggatacaagtgcttcctcttgactgccacataggttgtgtttttgtttttagtaagataatacagataaatttgaagtcccctttgtcccacttcggtaaacttatttggtaattttacatttcctaggtaaaatgtgttttgtgacaccaacttatgaaacaaaaattctaaaactctttgccaagagacctacggctctattcattttcctcctgcttcccattcagtgggcttttgcctaggggtatgaatgtggcatgccagttggctgacccaaccattgctttccctttcagactggcgatggcgtgaacgatgctcctgctctgaagaaagccgagattggcattgctatgggctctggcactgcggtggctaaaaccgcctctgagatggtcctggcggatgacaacttctccaccattgtggctgccgttgaggaggggcgggcaatctacaacaacatgaaacagttcatccgctacctcatctcgtccaacgtcggggaagttgtctggtaggtctctgtgacagcatcacttactgtacgcctttatctaaatgggtcatggagcccagttctcgcagtttgctctccagattgcagcagctttggtctttgtgcctgagttggaagaggggagtgggcaagacagaaatgccttatggaagcagtggtgctttggccctcgggagggttgtctgcagctgccccaatgtgcaaagaatcctctttaacgtgagactgagctaacattaaccaggtagtcacatgaaattcttgccctccaaaagttggctttatctcagtcagcttaataatttttttatttttatttatttttttgagacagtctcgctgtcgcccaggcttcgggcagtggcacgatctcagctcactgtcccctccacctcctgggttcaagcctcccgaacagctgggattacaggcatgcgccaccactccctgccatttttttgtgttttagtagaaatgaggtttcaccatgttgcccaggctggtctcttaactgctgagctcagccagtctgcccaccttggcttcccaaagtgctgggattacaggcataagccaccgcacctggcctcagtcatctgaatttaagtaataaactaagtaaaattgagctttaattcaaaattgggtataagtattttacagattacctgaagttgttgtcatttatttttctggaggagggcgggttgatgatgctctttaaatagtggccagaagtcatttgggctctctttgtcttcttttcttgattggaaacagtattttcctgacagcagcccttggatttcccgaggctttgattcctgttcagctgctctgggtcaatctggtgacagatggcctgcctgccactgcactggggttcaaccctcctgatctggacatcatgaataaacctccccggaacccaaaggaaccattgatcagcgggtggctctttttccgttacttggctattggctgtgagtacaatttttttatattactgatttttaaacaaaatgtttgtgagctgaaattttgtaaattcatcccttaaaagcgtgttttttcttctatccccgtatagggtagcaaaagacagagatgccctcttacagttcgatgaactatacatccaatttaccagagtcctttcacagttagttccagttttagcatcctgcccttacttgggcttttctgaatgagcaattaaacatcagggttttcagattgagccctctgtgcaaagggataagaatgattcacgctaggttctgccttccaagagttcataggtgggatttaaatagataattgtcaccaagttataaaatttagtccctgtttccataagagaagggttgcgcagtggctggtcccttttatatataaatcatctctttagccctcatcttcctcaccccgggttcttcccc

SEQ ID NO: 71445 - DNA, 3932 bp, Homo sapiens
tgacagcatttccctagaaaactgctgctgggcctctaatggagcaaataaatctgtgtacaactaggcagcaatagtttgtccaaaagtcctggtgtaatctagtccctcaaactgtgcagccttacatggagtacacacacacttgcagccttgaagtactacccactgaggggagaaggcacggcaaggggaaaggttggcacaggatggagcaagtgctttttctcacacattctggaggaaaagttatccagttcttctgttctagaaacacccctgtccttcagaaaccagggtctagttgctctggctaccaggcgtgagcaggtggtggtagcaccacaggccccggttaccatcactgtcccatgtctttgatcttcgtccttgtggggactggcctgcatggcctcggtggcagcgagccctgcagaggcaagtgcatcagcatcactgtgtttgttcccaggttacgtcggcgctgctaccgtgggtgctgctgcatggtggttcattgctgctgacggtggtccaagagtgtccttctaccagctggtactcagtcacctttctttctgtaccttacatgagaagtgttgtgaggccttgacctttctgtggtttcggtatctatcaaatcatcttaagactcagacaataaacagttacatctaagatgattctgaaggaccagggcttctccgagaaattggggtaaacctcttggctggctctgcattcaggctggtctgtgctaggcttggtatggggttggagcctggacttgggaaatatactgggctgataggaatttgattggattttcttgcagagtcatttcctacagtgtaaagaggacaacccggactttgaaggcgtggattgtgcaatctttgaatccccatacccgatgacaatggcgctctctgttctagtaactatagaaatgtgtaacgccctcaacaggttagtgcaccttcacggcaggctgaggcgagcatggtgactgccagggcaccggggaattgtgtgtagtcacggttgattgaggatcacaggacagttcttcccttcccaaaagaaaggagaacaggcaataccagttttaaaagcatgagctgtcgtcacctccaggaagtagtgggagtgcttagccctgtgtttcttaggagctcttccttaaaagaaaccgtgggggccaaaaataggaactttggtacccctgtatgccagcacccacagggaaggaacctcaccctttcacacagacaaatggtaccatccagttaagcccgtgacaaaaatggaaatttctaaatagcccaagtctccagggcaattgggaacagctttgaacccactaagatggggtctgctatgccaaaacatagatacagaattcacagtttgtcctgcattaggacattctcttcaactttgccactgtagaaagtggaggtaggtcagcggatggtgccacattaacagccgccttactgaagtgtagtccaacagggtcttactgccactgtgacacgtgccttgccttgggggtgcgtttccccacctctccttgctctgcagcttgtccgaaaaccagtccttgctgaggatgcccccctgggagaacatctggctcgtgggctccatctgcctgtccatgtcactccacttcctgatcctctatgtcgaacccttgccagtaagtggttgggtggggcttgggaccagccacctccttccaggggaggctggaggcgtgacacgtcttccctgtgtgtcagctcatcttccagatcacaccgctgaacgtgacccagtggctgatggtgctgaaaatctccttgcccgtgattctcatggatgagacgctcaagtttgtggcccgcaactacctggaacctggtaaagagtgtgtgcagcctgccaccaaatcctgctcgttctcggcatgcaccgatgggatttcctggccgtttgtgctgctcataatgcccctggtgatctgggtctatagcacagacactaactttagcgatatgttctggtcttgactgacagttttccataaagaagatgtttaacttaatcaattaatttttttattgtttaaagcaactgtctatttctgctgaattttcacatgaacatactggctggtgatggaggtttcatactctagattttgttttgctttttctgactccagtggggcaagattttccttttttatacacataattaaagtgtccattgacatgtacagagaactaacactattttatgcaaatatttttttgtagatgaaaaagcatgtacagtgttctgtttaatactcatccttgtataaaaaaaatagttgagccagcagacattgtcagcaaattaattggcagcagattttaggaaatgaatgtgtgtggttttttttctaaaactaaatagcatgtattgtgtcttttgcatgatgatccggatttaatttgatatcacagtctaatttttattcataagccaatttttctgcactgagcagagtcttgctacctcagtcagtattgttttggtttgctacttccctcacccactttggcctccgttcaccccaccccaccccacctctccccaccttacccccgccccgcttggcttcttctttaggattgtgatggttcgttctgtttacatcagttttaacgagaggtatgcctgtactcgcttgtgcagaaaacattgttccagattcaatcgactgggtttatgtcccttcacatagtttttaaggttatttatttaaatgtctaatgtattttattgtaacagacattgttttgccaacattgcctatttcagtggcacgtcatctagttttaaaaaaataaaacattttaaatggacagagaaaaataactgtcttgtctttaactcgtaagtggcttacctgggactaacagacatgtccaactttctctccagttcttagctcagaactttagttgtactctgcttgaggggaagaaggctcctgctctgctgtgtaggtagtcataggaattgtattcttaatgtacaggcactaattgtcatctgtgatgtacattttatgcaagtttctgctggcctggtatagagaacataagggcaagtgtgtatgtgtgtgtatgtgtgtgttttgtaaaatctgtaaatagcacatgaccaaatgaacatattgtatagaactatttttatttgaatgtggcactaaccaccaccaccgttactacgatcaatgtttgcgcatgttcgagatgagtctcaccaacagtgtgtaagtcattaacagtcctaactgtggtgttttcctccaatgccttccaacatccatcaactaacgtgagtattttcttcctgggatttggatgctttagcctaaaggtgactgccaccaagtgagataactgtatgtcactaacttataagccgcctccatggcagatgctgctgtgctccctgatgccctgtgagcaccggggttgcctgtggcgcctgccatgtgactcgggcgcagcatcagctggctggaggtgtggctttcatagacctccacaggctgcctaggacaagatgaccaggagggcccaagccagacaaaagccggagtggggagagaggcatttcagccagaccaacaggctgaaggagctgtgcagactattgctaaaatgagggttcgcagctgccaggagtcatcccagaacattgctacttatttattaaaaagctaaaaactagtgaaagcaagtaactgaaccagtgaactctgggtatcgataggttcgtcttaaataggccacttccccactcccccacccccccttgcttggtcttgtccttggtggctaagacttagctctgcaggggatgttaaagcacagttagtaggacgt

SEQ ID NO: 71446 - DNA, 1049 bp, Homo sapiens
agacttgggctatttagaaatttccatttttgtcacgggcttaactggatggtaccatttgtctgtgtgaaagggtgaggttccttccctgtgggtgctggcatacaggggtaccaaagttcctatttttggcccccacggtttcttttaaggaagagctcctaagaaacacagggctaagcactcccactacttcctggaggtgacgacagctcatgcttttaaaactggtattgcctgttctcctttcttttgggaagggaagaactgtcctgtgatcctcaatcaaccgtgactacacacaattccccggtgccctggcagtcaccatgctcgcctcagcctgccgtgaaggtgcactaacctgttgagggcgttacacatttctatagttactagaacagagagcgccattgtcatcgggtatggggattcaaagattgcacaatccacgccttcaaagtccgggttgtcctctttacactgtaggaaatgactctgcaagaaaatccaatcaaattcctatcagcccagtatatttcccaagtccaggctccaaccccataccaagcctagcacagaccagcctgaatgcagagccagccaagaggtttaccccaatttctcggagaagccctggtccttcagaatcatcttagatgtaactgtttattgtctgagtcttaagatgatttgatagataccgaaaccacagaaaggtcaaggcctcacaacacttctcatgtaaggtacagaaagaaaggtgactgagtaccagctggtagaaggacactcttggaccaccgtcagcagcaatgaaccaccatgcagcagcacccacggtagcagcgccgacgtaacctgggaacaaacacagtgatgctgatgcacttgcctctgcagggctcgctgccaccgaggccatgcaggccagtccccacaaggacgaagatcaaagacatgggacagtgatggtaaccggggcctgtggtgctaccaccacctgctcacgcctggtagccagagcaactagaccctggtttctgaag

SEQ ID NO: 71447 - DNA, 1952 bp, Homo sapiens
ggtgggcagacctaagacctgagaccacaagattagctcagtgtctaccaagcatctagccactgtccagggccagagcataccacgtctgcagtgcctgtgagcagagccagcagttgccctgtgactgtaaccaccaaattgtccaaacacccgctgcagttagcaagaagggtaggcttcaccctcctttactgaggagaatgatgcggaggagtttcctctccagggctaggcaaggcaggcgagcagccagaagccgggtgcccacagggcagggacaggaaggctgtgctgctactggctgctcacttctccatcaacctcaccctctgcaccactaaccaagaccttgtcctcttgcctgtctcgctgctttcacagctgcaacgattgtgtctgcctcatggggttttcctccagagcctttattctgtagccagacgacacgaggagtctgtgtcactgagccagtgcttctagatgctaccctgtgtgggcggcacctcagggacagtaaatcagaaatgctggtcttgaaaccttgaaaagatcaagctgaatgttccttttcatctgtcgctgttgatcttcatctatttaaataggtattctaacgtttcctctctgtatttcatgaagctgatttcctctctctttccttttcagcaatactggagtaaccgcttcctaaaccattttgcagaaatgtaagggtgttcggttgcgtgcatgtgcgtttttagcaacacatctaccaaccctgtgcatgactgatgttggggaaaaagaaaagtaaaaaacttcccaactcactttgtgttatgtggaggaaatgtgtattaccaatggggttgttagcttttaaatcaaaatactgattacagatgtacaatttagcttaatcagaaagcctctccagagaagtttggtttctttgctgcaagaggaatgaggctctgtaaccttatctaagaacttggaagccgtcagccaagtcgccacatttctctgcaaaatgtcatagcttatataaatgtacagtattcaattgtaatgcatgccttcggttgtaagtagccagatccctctccagtgacattggaacatgctactttttaattggccctgtacagtttgcttatttataaattcattaaaaacactacaggtgttgaatggttaaaatgtaggcctccagttcattttcagttattttctgagtgtgcagacagctatttcgcactgtattaaatgtaacttatttaatgaaatcagaagcagtagacagatgttggtgcaatacaaatattgtgatgcatttatcttaataaaatgctaaatgtcaatttatcactgcgcatgtttgactttagactgtaaatagagatcagtttgtttctttctgtgctggtaacaatgagcgtcgcacagacatggtttcaggtaaataaatctattctatgataaattctcagtgtggtggtgactgttctgtgggagggggactgatgggcaccaagggcctccactccgcacccgggcctgcccctctacagggaagcaggggaggctcagtctgggcagggtggccatgtgactagaggggacaggaacctcttggactcgacttcacagtagacaggctgactggcagcaggtccgcccatgtgaagcccaccctggctccctaccctttaaggatgggggaagctgagtgtgtgttaccagtggggtcttaaacacacaaggcctcactcgtcagtgtggtgaagaaagccaagactccgcgctctccattgttagcagcctggaaagatctggagactagcaatggagagatgtttcttaggctgttcagatccaaaacttccacattccccgttgttgataggtatgggatggagaggtgaacagaactgaagcagctgttggaattcatttgctggtta

SEQ ID NO: 71448 - DNA, 1002 bp, Homo sapiens
gctcctgaaatgctgctatgtttaattacatcataagaacatgggacacctatactcagagaaattcctattttttgtaaccctgtagctctaaaacccaactttctgggaattccatttgaatttacctggtaatgtttgtttgccactttttcatttgtgttatctggtagccgcctctagcagaatgctaggggtaataggtatgaaaaagtttaagaaatttgtggagaaaaactcaaattgagaactctaaaaattaggaagagactcctttttgcacttctggtggtggactccctcaacccagccttggaagcctgagttgtttggagaggccaggctttagcacattttttgggactgtgtggtcatttcactgccgggccagggagatgacgaatcagccagcaagagcaaggcagagattcaggcctctcctttgttttgttgtcccctagtttggaccccaatgaccagaagtctctagaggggatgcagaagatggagaaggaggagagtcccacggatgccactcaggaggaggatgtggacgacatggaagggagtggggaagaaggggacctggagggcagcgacagtgaggcggcccagtgggctgaccaggagcagtggttcggcatgcagtgagggggcggcagctccatggccgcagtggcctgccctgctctgagcacttccgtggactgaaggaaccgtaggagcctgctctcagaaggacaatgattcagcatgtgattgcagcaggggtctctgccccctcgctcccaattcctagtcgtgacttcatttctaaaacagagcctgaccaaccttccatgtatctccatcctcccctgctccagccagggaggactgagggagtgccccgagacccacgcacatgttggggcttctgggccaagagtactttttatataactaatttctaaatccaaaagctcaaggaatagacagtgttctgtgacatggattggtttg

SEQ ID NO: 71449 - DNA, 1021 bp, Homo sapiens
aaagttaagagcccatttaaaacattataattcaaactgcaaatttcttttttttttttttttttgagatggagtctcgctctgttgcccagactggagtgtagtggcacaatcacggctcactgcaagctccgcctcctgggttcaggccattcacctgcctcagcctcccgagtagctgggactacaggcacctgccaccaagcccggctaattttttgtatttttagtagagacggggtttcactgtgttagccaggatggaaaatttcttaactgaatagggcttcaggtgtgcttgccctcgctttgtgttgcaccagtgttctcttgaggatgtctgcaaagagatggtcagaatggtagttgtggtttttttgtacatgacttaagtgagggtcttttttattcccccaggcagagaacagaaatatgaagatggaattgctttgctgaggaacgcactggctaatcagagtgactgtgtcctgcatcggatcctaggagatttccttgtagctgtcaatgagtatcaggaggcaatggaccagtatagtatagcactaaggtaggcactagcctcccttgggggaaggccactgaggagggtagaggaggcagtgagctgtgtcacaggagttatggaaacacacacacactttgtgtccatggttgaaagcagaataataatagtaatggtagaagagttatttgtgaattcatgacttctaaaaattttttcttaaaatatattaacaacattagagaactgtttcactcataaccatcccacaccactataacatctgtgttcatttgtatagctcatcttctgtccttgcccacacacacatatttttatagggctgtacctagtatatattttatattcttctttttcaaatcaaagtattgtaagtactttcccatgtttctatctactgtagtcattaagaacttgaggtctgaagttttgaatactaccttcaccacctgtgatcttgggcaagttactaacaca

SEQ ID NO: 71450 - DNA, 1034 bp, Homo sapiens
caatctcagctcactgcaacctccacttgccgggtttaagtgattctcctgcttcagcctcctgagtagctgggattacaggcatacaccaccacacccagctcatttttgtatttttagtagagatggggtttcgccatgttagccaggctggtcccgaactcctgggcttaagtgatctgcccaattcagcctcctaaagtgctgggattacagacgtgaaccactgtacatggcctgttaggcctattctttttcgtggccatcttaccttgggccagagttagtactcgtgggataactccacatccatatgatagtgttggctgtgggaatgggtctgttcattgtgacctccagagtgggcacaatcagggtccaactttgttttgttatgtaatattttaagttcatgtgaattgaccctgggagttcaaaggagctgtgccagtttcagcaacgtttggtgactcagtcacagacattaaaatagatcttacaagatgcagttcctccaaaacatatttttataagcatttaaaaataaacctaggagtctaggagtgatttgctcttaacaggaagatgagttcaaatttgagaaataaaatttggatgttgggaaagagaacaaatctgcttatatagccagagagctatgcctctggatttgttgagggggaaagagtattgtctttgttctgaaagaagctctagcaaaccaaccattgatttcagattaacttcttgatcctgaaactgtaacttccctgtcttcccagctgctgttaatcatgttaattccattatactgcatgcctatttcaccagagctcagggatgcggttgaatagtccgtcctataatatttggacagcggatgtttcccagttggccagtgaggcttcttaagctgccatttggagatttaggtcagggcaactctgactacaccctttgatatttcttacagtttccagttggagcttccttcttttgctggtagagatttaggttaggcaagtgcattctgt

SEQ ID NO: 71451 - DNA, 1129 bp, Homo sapiens
ttggccgggcatggtggcttacacctgtaattctagcaccttgggaggctgaggtgggtggattgcctgagctcagcaggtcgagaccagcctgggcaacatggcacaaccccgtctctactaaaaatacaaaaattagccaggcatggtggcgcgtgcctgtagtcccagcttctcggaaggctggggcatgagtatcgcttgaacccaggaggcagaggttgcagtgagctgagattgtgccactgcattccagcccagggggacagaacaagacactgtctcaaaaagaaaagaaatactaaattatggtttttctctcatgcatcgctcagaatagggaagcagttgccttttagccaagggaagatgtagcccgttgctccttgcatgtggaagagagatatcgtgccttactttctttcttctgctttctgttggtttaggcttgttgtccctttctgtaaaaggggcagaggtggcatccatgacaatgaatgtgatccaaaccgtgcctaacttggactggctctctgtgtggatcaaagcgtatgcttttgtgcacactggtgacaactcaagagcaatcagtaccatctggtgagagccacaaagttaattcagtgttcttgaggccctttgcttgtctggaagtctgatgtatctgaagtagcaaaaagaaaaatgagatgctttgctgttggtgctgcagccagtctctgggatgtgttagtcttttatactgaatggtcccaaatgtaatcatgtaatcatctctgttggagacctgtaaaaatagaaatctgactgagtttagctctgtgcctgcacaggtagtaacccttgcaaagcaaagcaggctaccttggtgtgtcatttttttttttttttttgagacaaggtcggtctctctctctctctctctctctctctctctctctctctctctctctctgtctctctctctctctgtctctctctctctgtctctctctctctctgcctctctctctctctctgtctctctgtctctctctctctctctctctctgtctctctctctctctctctctctctctctctgtctctctgtctctctgtctctctctctctctctctctctcccagg

SEQ ID NO: 71452 - DNA, 1054 bp, Homo sapiens
cagaacgagactctgtctcaaaaaaaaaaaaagaagatgaggccaggcacagtggctcacacctgtaatccaagcacttccagaggcggaggtaggaggacttgaggtcaggagtttgagactagccttggcaacatagtgagacccctgtctttacaaaacggcatggtggcacatacctgtagtactcagaaggccaaggtgggaggatcgcttgagactaggagtctaagactgcagtaaatcatgtttgcaccactgcattgcagcctgggcaacagagcgagaccctgtctcaaaaaaaaaaaaaagaattgctgggtcatatgataactctatgtttaacgttttgaagaactgtcatattgttggaataacgtttcaaagaaatatttccattgtcttttagtgtcttccatctgaaattgaagtgaaatacaaaatggctgaatgttatacaatgctaaaacaagataaagatgccattgctatacttgatgggatcccttcaagacaaagaactcccaaagtaagttgaatgtttatgtgtttttctcctcagctctcctaaccctgctccctctctccatgttttctcatgcattaaggagtccgtgtgaacattttacccatgattctaattctcattttcttcctcttcatggagtgggggtgggggaccctgaaaatccagctgatgaaaatgatagctggagaatactacacatgcttattctttgttttttcttttttattttttatgtttaacttaatttaatattttttgagacagagtctcactgtcacccaggctacagtacagtgttgtgatcctggctcactgcagcttcaacctcccaggcttaagcaatcctcccacctcagcctcccaaatagctgggattacagttgcatgctgccacacccagctaatttttttttttttttttttttttttttgaggtggaatttcactcttgttgcccaggctggagtgcaatagcatgggggctcactgcaaagttgcccaggctggagtgcaatagcatggggg

SEQ ID NO: 71453 - DNA, 1716 bp, Homo sapiens
atccacccgcctcggcctcctgaagtgctgggattacaggtgtgaaccaccgcgcccggcctttttttttttttttttttttttttaaataaagatggggtctcaccatgttgcccacactgatctcgaactcctgggctcaagtgatcctcctgcttcagcctctcagagtgctaggactacaggcgtgagccactgctcccagcctccagattttattatttttgatcaagcaactcaacttcatattgttgaatgctgggaacacacacacacacacacacacacacacacacacgcacacactgaaaatagttcagccgtcctctaattgggactccgagccagggctatttctcgcgctggcgcggttccaagaagcatcccagccatcactctttcacctgctccttagagaagggaagatgagcgagtcgagctcgaagtccagccagcccttggcctccaagcaggaaaaggagggcactgagaagcggggccggggcaggccgcgcaagcagcctccgatgagtcctgggacagcgcttgtagggagtcagaaggagcccagcgaagtgccaacacctaagagacctcggggccaaccaaagggaagcaaaaacaagggtgccgccaagacccggaaaaccaccataactccaggaaggaaaccaaggggcagacccaaaaaactggagaagtaggaagaggagggcatctcgcaagagtcctcggaggaggagcagtgaaccgtgcgtgccgcctgctcctcactggaggagcagctgccttctgggactggacagctttgctccgctcccaccgccctcgccccttccgcaggcccaccatcaccaccgcctctggccgccacccccatcttccacctgtgcccacaccaccacactacgcagcacaccagccactgcagggctcccatgggctgagtggggagcagttttcccctggcctcagttcccagctccccccgcccacccacgcatacacacatgccctcctggacaaggctagcatctcacttagccgcaccctgcacctgctgcgtccccactccgttggtggtggggacattgctctctgggcttttggtttgggggcgccctctctgcttcactgttccctctggcctcccatagtggggcctgggagggttcccctggccttaaaaggggcccaagccccatctcatcctggcacgccctactccactgccctggcagcagcaggtgtggccaatggaggggggtgctggcccccaggattcccccagccaaactgtctttgtcaccacgtggggctcacacttttcatccttccccaccttccctagtccctgcactaggttggacagcccccttcggctacaggaaggcaggaggggtgagtcccctactccctcttcactgtggccgcagcccccttgccctccgcctgggatcgagtacatattgtggtgatggagatgcagtcacttattgtccaggtgaggcccacgagccctgtgtccgccgcctgaggtgggctggggctgctcccctaaccctactttgcttccgccactcagccatttccccctcctcagatggggcaccaatagcaaggagctcaccctgcccgctcccaaccccgctcctgctcttccctgcccctcaaggttctggttccatttttcctctgtccacaaactacctctga

SEQ ID NO: 71454 - DNA, 1043 bp, Homo sapiens
cactgcagccttcgcctcctgggttcaagtgattctccagcttagcctcccacatggctgggactacaggcgcacgccgccacgcctggctaattttttatattttagtagagatggggtttcactgtgttgcccaggctggttgcaaactcctgagctcaggcaatctgcctgcctcagcctcccaaagtgctgggattacaggcatgagccaccacgtccagccaacatcatttacttaattgtaagtttatataatttgatttttgagaagagctgtgtttaacaaccagcttgaaaaatgcctcaaaatttaacaattggttttcttgagccagaaagaaccagccctcgcacctcaatgctgctatcccttctccctcccctaattaatcttgggtggtttactctttttttcctttaagggaaggttgtttgccacagtgacatttgctctttttctgcttctgtgttcttcctgggcttgccattacaggcttaccactcttctctcatggatcctgataccaaactcatcggaaacatggcactgttgcctatcagaagtcaattcaaaggacctgcccccagagagagtaagtctaaacccattattttcaaattttggtacgaaatgcctaacaatcttctgaaatgatcaaatcagaaaaattcttagctcagtcttctctctcaaattgcccttgtactttgcttggtagatactgtggtctagacctttcaagatagtggttatatgttgcatttaataggaaattgtattatttcttctgacttctccaggaaactcttttgagaaaatggaggaaatgtgcttaattctggacactgtttatcagttctttcaaacaaatctaatgctgttacgtctagaatgccacatgcccatcctttctgtcatcaacctggaaaagaacaacaacaaatattttaacctcttcctcgtctaaatctacttcctttattcattcttcaagatcttcatttttagcaatacctcaatcttaaatctgaagtgtact

SEQ ID NO: 71455 - DNA, 1041 bp, Homo sapiens
aagcactatcacaggaaattagccaagaatcgtcttgaatgtaaattcaaatgagaaatgcttctgggatagaagcacattaatttactacataactggaaaaaaatctgtcaatcatgccttttcttactattaacagttacctataagcagcacctggagctggtgctgggtaattagttccacatagggtattacctgaaaaatatataaacacatactagttctgactgaggggaaatgaatatattttctattttgtgtttccattgtgtcaggaacgtgaagatgagtcttcctctatgtttgacgaatattttcaagaatgccaggatgaatgaagagtttactaaaagtaaccatctaaagagcttgtggccaaaccagcagaacattcttctcttcaaaggatgcaatagtagaaagctacttattttaatgaaaaaaagtaaaacttcgttctttatcagcctcatgcctgaatcaaatttttaattattctgaaactgctgctgtttaaagtggaatcttttagtattataacagcatcactttagattttgtaagtcaaaattgaaatgaatgcacatagatttatatataaattagcacctgagctaaggttaaggctggtctaaacttattttcactttttgtattatttttgagatgcaggaattactgtaacaaaatatgtatgtccgaagggaaaaagctgcaaggatatatataagaccactgcttatctgtatcttcccattttcctatattgaaaatgtatattatttatataacttaaaaagtaaaaataactatgttttgagatatgtatgtgtatatataaaagaaacaaaggtttttaatgattcttggacctagataacaagtacactgcagtgtctaatttgattcattttaattaagcaaaatgtggccaagcgtggtggctcacacctacaatgccagcactttaggaggccgaggcaggtggatcacctgaggtcaggagttcaagaccaacctggccaacatggtgaaagc

SEQ ID NO: 71456 - DNA, 1048 bp, Homo sapiens
tggaatgctcttccccttaggttggcaaactccttctcatatactcatatctcccctactcagagacatcatccctgaccatcctacctaaagctttgtttgcactgtacaagtcctggtagagacactgtgttaggtgttacactatgtaaccagaactcttccctttaaataccgcttgtcacatttagaacagtaaggagccttagtgattatggaggacatcccagttagagacacgaaaattgaagggcagagtggagaagtaaattccccagaggtacccatgagtctaagtcaggtttgaatctgcagcccagtcaggtatctttttcccttgttgtcagtcagcctcttggttgatgaaggcatagttttgaccttagtggatagtattccagagtatggaaggtagcactacactacctgttgctttaacctctcatgccttgtgacattacagagcacctactgtgccaccatggtccagcactgtgaagccctcaaccggtctgtccaagttgtaaacctggatccagcagcagaacacttcaactactccgtgatggctggtaagtcctgagcaaaggctccccccaccttcaggaacagtaagggctggggaggcagtgagtactagctgcttagcactgatacttattatagtctggatccctggtgttatggtaaatagcatgagcttgtcatttggtcacatctgttcatggtgatatgtgtgacagtatcctttcttggtctttgatgtaagatttaaaagtaaatggggccgggcgcggaggctcatgcctgtaattccagcactttgggaggccgaggcgggtggatcacgaggtcaggaatttgagaccagcctgaccaacatggtgaaaccctgtctctactaaaaacacaaaaaaatcagctgggtgtggtggcatgtgactgtaatcccagctactcaggaggctgagaaaggagaatcgcttgaacccaggagacagaggttgcagtgagccgagattgcgccactgcactccagcctgggcaa

SEQ ID NO: 71457 - DNA, 1106 bp, Homo sapiens
ccgcagatcctcaccttcccgctgcccgcggggcccatgaccagctgcgcataccgaggcatgttggctcccggagccgcccgccacactcccttagccttcgcgcgacgcccactgagctccgggaaagtgaagtgcgaaccaatcgcaatccacattctttctacgcctccagttctaccacacctcctactacggggcagcccgcgggccaaatcccgtgagaaacgcgtcctgagaaaaaaggggaggggcgagggagaggatttgcgcgtgcgcaaaagtagttgatggaaatcggccgttgggatgctgtctaagcttggatacctgagtaataacggacaacagataaagctccgcatccttgcgccacgtgcttcggtccgtggtttgcgtgcagacgtttgacctgtatggtgaccctcgcgatttgcaaatgtgctgaggatctggaatactgaagtggaaggcacctcttgttttggggagcatgtatatttccctcctgtgacgcactgcttccacagagaggtgcaaacgtgcaaacgctcagcgaccgcagcgctcctgcccctcccccaccgtaactccggggtcgcggatctgcccgccccgctctcccgaagctgttcgggcagtgtccgaacggcttcggaggggcgagaagccagcatccgagccgcctctccggaataccagcagcctgacgcacgcgtgctgtcgggggagggatgctgggacagctgctcccgcacacggctcgcggtctcggcgccgcggagatgcccggccagggtccggggtccgactggacggagcgtagctcttctgcagagccgcccgctgtggccgggaccgagggtggcggcggcgggtgaggttgggggccccggggtaagggtggcagcatggggcccccgggtcgtgaggcccccgggtcgtgagccccgtggaggagggctgcggccgacctctcgtctcgggggctggccccggtgccctcaagtgagaggcggggagcagttttgttgtggacagagggcagaggggaggactgcctcgcggttgagggagggtctctgagggaagcttcggaggagcgt

SEQ ID NO: 71458 - DNA, 1073 bp, Homo sapiens
tgctatttccatttttcaaggtttaataaaagttttaaaaatacaagtttaggggccgggcacagtggctcacaccctaatcccaacactttgggaggctgaggcaggtggatcacctgaggtcaggagttcaagaccagcctggccaacatggtgaaaccctgtctgtactaaaaatacaaaattagccagcatggtgctacatgcctgtattcccagctactcgggaggctgaggcagtagaatcacttgaatcctggagttggaggttgcagtgagccgagatcacaccattgcactccagcctggtcaacaagagcataactccgtctcaaaaaaaaacaaaacaaaacaaaaaaaaaacaaatttagcaaggaagcatactagagtaatatataacgtaaagaatcctcttgttagtgtaactactcccaacctaatctagtccgagagtcccaagttatttatgtggtaatttcataagatagggaaaatgtgtatttacattttaaagttgtattcaaatagcaaatatttattgatcacctactttgcaagtcagagcatcatctctgtcaaatgctattctgtatctggatatttccaagcttcccttagcccaatcaaaaaaatacttgtaggatattcttttttttttgagacggagtctcgctctgttgccaggctggagtgcagtggtgtgatctcggttcactgcaacctccgcctcccaggttcaagcaattctaattctcctgcctcaatctcccaagtagctgggactataggcacacaccaacatgcccagctaatttttgtattttcagtagagacgggggtttcaccatgttggtcaggctggtctcgaactcgtgacctcatgatccacccgcctcggcctcccaaagtgctgggattacaggcatgagccactgcgcctggcccttgtaggatattctaatattgctgttttaggacttactatgaacacagaaagaagaaatacgatgcatttgtcagatttaaagaaaagtaattcaatattgaatgcaagaaaagttttaattgtatc

SEQ ID NO: 71459 - DNA, 1016 bp, Homo sapiens
gagtgtagtgttgcaatcttggctcactgcaacctctgtctcccgggttcaagtgattcttgtgcctcagtctcccaagtagccgggattataggtacccgccaccacgcctggctaattcttgtatttttagtagagatggggtttcaccatgttagccaggctggtattgaactcctgacctcaggtgatccacccacctcagcctcccaaagtgctgggattacaggcgtaagccactgtgcccagccacatgtgaccatttaaataaatctagccattttggcaatcttttggtaactgttcatgtgatatgtaacagatttctctgaatccaaatagtcatcttaaattgaaatttatagtgctgctgctttgtgctacaaaacactgacattatttattttttcttctagaaacattattccatcatttgtgttgatggatatccaggcttctacagtggtcacctatgtgtatcagctaattggagatgatgtgaaagtagaacgaatcgaatacaaaaaaccttaaagccaggcctgtcttgatgatttttggttttttttcattgtcctgttgaaatcaagtaattaaacatttaagagccacaaaattgtatcacttttataatattttgcagtaaaatataataccatcttctctgttaatacataattgctccaagcttcctgtaaactataagaatatatttagtttacagtatatggattctatgaaaaaatgtccacaacacagtaattggtcacttgttaagaaaaatttatccttgtaagtatcttcaaagttgatatttggaactttattccaaaagtagtgcatgtggagaaagaatctagactttcttgtatacatttttctcttctccagtaataaacaattacctttcatttatactttgataacctgtatttaatttaaaaaaaaacataaaaatgaggaaccaagtgaaactacggatataaatattaaagtggacgagatgacctttcaga

SEQ ID NO: 71460 - DNA, 1024 bp, Homo sapiens
taaaatatttataaatgtggggtgggcacagtggctcaggcctgtaatcctagcgctttgggaggccaaggcaggtggatcatttgaggttaggagtttgaaaccagcctggccaacatggtgagactccgtctctactaaaaatacaaaaaaattaggcgggcgtggtggcgggtgcctgtaatcccagctacttgggaggctgagacaggagaattgcttgaacctggcaggcggaggttacagtgagccaagatggtaccactgcactccagcctgggcaacatagcaacactctgtctcaaaaaaaaaaaaaaatgtataaatgtgtgtgttgtggggtactacatcaaaacatccataggagattgaatatttaaggaaactgatttttttaaacatcagtatctctaaaatacatattttcttacgtctttttcttatgttagaatctgaattatccagaacagaaagttgtgactgttggacagttcaaaattggtctgatccatggacatcaagttattccatggggagatatggccagcttagccctgttgcagaggcaatttgatgtggacattcttatctcgggacacacacacaaatttgaagcatttgagcatgaaaataaattctacattaatccaggttctgccactggggcatataatgccttggaaacgtgagtagtatagaatttgggaatttgggggctttagtaaaataattgcatgtgtgacatttcgtaaaagaaatgtggctgggcacagtggctcatgcctgtaataccagcacttcgggagaccagggcaggttgcttgagcccaggagtttgagaccagcctagacaatatggtgagaccctgtctctacaaaaaaattttaaaaattagctgggtgtggtggtgcatgcctgtgatcccagctacacaggaggctgaggtgggatgatcacttgagcctaggaggttgagactgcagtgagccacgtttgaggctctgtactccagccagggtgaca

SEQ ID NO: 71461 - DNA, 1504 bp, Homo sapiens
atatgacagtgaggacttctaataatgaaggaaagtgaagatatcaaagattataattcaaaagcacacatttacctgatgaaactgaaggctgttgtatatctctgtaacgtacacctaatagtttgaagtaacaaaaatatcaaattttggctattatgcttgcacatagttgtcagtctagtacagataaattacataattaacttttttgtctattaacaatttccttaaatatttctgggattaatatatcatttcatgttacaactgcagaaatatgaattaccatatcagtctttaaaaatgccaaattctatagggcccagtagtatactttacattttgtaatttttaaaattcagtgtatttacaggtctctaaatgaatcactttagaatgcttgatttcactcttggtaaatagaatgattacctgtattttatatatgcaactgtttacaaccaaaataagattgatttagaacaaagtacattaccataagtatgtctgtttaaattgtcatgatacaatcaatgatgaaacctatcccaaagctgatgacctgaagaaaaatacgtacagattcagcttctgagattaaataaatagtcatgataggaaccctatgaataatttctgggattcgggatctcttatgagacttaaaagggggcttacaagaggagactattttgttttgatattgtgtttaacattatgctttatctcaccttgacactttaaagttggtgttggtattaggagatctgcacatcccacaccggtgcaacagtttgccagctaaattcaaaaaactcctggtgccaggaaaaattcagcacattctctgcacaggaaacctttgcaccaaagagagttatgactatctcaagactctggctggtgatgttcatattgtgagaggagacttcgatgaggtgatgtatttccctttcccttctcaaatatctccctttcttgattattacttacataagctttatctttagaccagggtttctcaactggtaaggtttttttttttttccctttttcttttccaaatgtaaaattactatacatcatgcccctcccttactatttgaaaatcactgatttagatcacctagtaaacattaaatacttattctaactaaatagatactgaataaaagtggctttgttactgttttatgctgtcgtttaatttataaagttttttttgtttgtttttgttttttttgagatggagtcttgctctgtcgcccaggctggaatgcagtggcacgatcttggctccctgaaacctctgcctctcaggttcaaccgattctcctgcctaacctcccaagtagctgagactacaggcacacaccatcacatccagctatttttttttttagtagagatggcgttttgccgtgttggcaaggctggtctcgaactcgtgacctcaggtgatcctcccgcctcagcctcctaaagtgctgggattacaggc

SEQ ID NO: 71462 - DNA, 1090 bp, Homo sapiens
aaccaatgagagcagagggagacagaaattgccgtacggaggcccgcacggacccttctccgccgtaaagccgtttgggaacttgtggaggcggggtggtagagtgcagagacgagatcgcgaagctttgaaaagcgcgggcaacatccgggcacctgggccgtcgagctgaggcgcgccttccgagcctgctttttagggcggatggcagccatgctgaagtgcgtgatgagcggcagtcaggtgaaaggtggagcggcctttgttgtcttcccatttagcagagagaaaagcagacgttaataggtcgtccctaccattgtctaatttttcctctttgcctttttgcgcaatgactgaggacgcacgccctggccacagccccacccactcaagtccctgttaacttctgaggggaggatgaggacccatctcgtgtgacttagaggcagatgtaatatgggtggtatccgggaaatagagttgtaccatcgggccacaaactcgggatgctgaggactgcatggggaagagttgagagaaaaaaataatgcttggacagtaaaagtatttttgtgccaagagaacagcattaacctggttttttttttccccagattctaccatttttaaaaatgtatgaacttggaaaagtcactaaatctctttggggctcagtttctaaaacggaaacaggggtaatgacagcaccttcgtcacagagtttgtttggaggcaatgaaatggaaatgcgtgtaaagagcccagtaatagatggaatgtacaagaactattagtgttgtaaacggcgctttcaaaatggaagttaggccgggtgcagtggctcacgcctgtaatcctagcactttgggaggccaaggcgggtggatcaccttaggtcgggagttcgagaccaccctgaccaacatgatgaaaccccgtctctactaaacatacaaaaattagccgggcttagtggtgggcgcctgtaatcccaagctacttggaaggctgaggcgagaggatcgattgagcccgggaggttgaggctgcagtgagttgagctcgtgccactgcactccagcctgag

SEQ ID NO: 71463 - DNA, 1281 bp, Homo sapiens
cccaggctgtagtgcagtggcacgatctcggctcactgcaagctccgcctcccgggttcacgccattctcctgcctcagcctcccgagtagctaggactacaggtgtccgccaccacacccagctaatttttttttgtatttttagtagagacggggtttcaccatgttagtcaggatggtctcgatctcctgacctcgtgatccgcccaccttggcctctcaaagtactgagattacaggcgtgagccaccatgcgcggccaaggtttggttttaggacgtgttggaccaataatgaaggttctgggtgttctgtgaaccatcaccagcaaagacagggatataatactggtcaggtttctgaggagggctgtcacctggagcatttaatgagcaaactttctctttggaatcaacaatgcagttccttttttccctccagttttcttgcatgttctttggagcagtttcttctgaccagcaagaacacttcaaccaccctttcgacagtctggcaagagcaagtgacagtgaagaggacatgaataatggcagtttctctatattctaatgcttaatgatggctgagctgggccccagcccagtgactggctcatttgcccctcaagcacgagtttgcatgtttagtgtctaaaagaggttgtccaggacttccttttaatggaggatgggcttttaaaccacatcatcttgtacaacaaccatatctagaaatagctgtttgtcaagtgtatgtaacttgctttaaatccattatgctacttgtgaggcagaagagttttctgtgaaggaaaaaagcccattagagttcttcaattcaatgcacgttcaccctagagcttttaacatctttgctagttttataaaggtatttaaactttattcaacagccatttagagtgccatcaagatggcttgaaatggaattttgtgatttgtagtcaggtatcttttgtatttgattgcaaacatttggattttagttttctcatgtaataccatggccttttttgtgcattgttttttatattttaagactttaagtagaataaaccctggaaaaaagatcaagagtaaaaatatatagtcactttcacttggcttttttagacggagtctcactttgtcactcaggctcaagtgcagtggtgcaatctctgctcactgcaacatctgcctcccaggtccaagcgattctcctgcctcagcctcccgtgcagctgggattgcaggtgcgtgccaccatgcctggctaatttc

SEQ ID NO: 71464 - DNA, 1179 bp, Homo sapiens
tgtctgggggttgggctgtgtctagattagaaactgggtttcaagctttgcatgatgggagagcgtcctctcctctatcagctgcgtgtgttctggataggacagtagcccggagatggaaaccaccttcagtaccattagcccaccataccaagtaacaagttaggcaggaatcgtgggaatttattgagtcagctttgagtgtttgagagaatgtaaacaagattggctcgaattgtaaacgtttgtactttggatgagttcatggttctttaggtcaccttaataccagctatctttggtagaagctacagcattcagtttctctggaaactgtatcacatttttgcattttaaaaattttacagtatcaaaaaaccaaaatctgcttatgaaacaaaacatgaagcaggacatatttggattctatttatttaaaattaaattctttgcaaaattgaacttctcaactaaaacgtgtccatgtcagaattttaactgttagcaggtagtttgtggcaaagatggctaaataatgaagcaaattagaatctgtgtgtatactaatgagctgctttttttctgttgagactatcattatttgtcttattacccaagaggcaattacctgaatttggatgtctgaattataacttatgcaggaatagttctgtaaatacatttaaataaactgtaaagatatttaataaatatagtatttatactaatctgtgtgcttcttttggtttgaatagtaactaaatgagacaccagcccttgacattgagtttgttggtcactatcaggtcctcatttccaagcctcctagtcattctagcactgattatatgctgctactttaactggctccagctgcttcactacatcagtttagcttcctcagaaattcatcaaaatggacggacaattaaatgtaaattatagaactttttcccagctgaggctttgcaccttccgtatagtatagagggaagctacaaaaaaaatctgctgtacagtcagtcgtgttgtttaacagagatgttctgacagatgcatccttagcaatttcatcattgtgtactgacacaagcctagatggtctagcctactacacatctgggctatatgaatagcctgttgctcctaggcgacaaacctgtataacatgttactgta

SEQ ID NO: 71465 - DNA, 2535 bp, Homo sapiens
atgccatagctgtttggcagattagaatacaaggctattcctagtttcaaaacattggatatgtctgtctaaattaggattgtgggtatagaagcatgtaactttctcgtcagattcactgtgattgatgtgaacagagggtgtggtggctgtttgaatagagctcctgttgtaaaggagcagggaagatttttttttttaagcttcagtttcatgtaatttcttggagttttgtttaactgtttttttttaatcaaatatttttttctttattctactagggtatactgacaaaccaaaactgcctggaatgcaagcatttgtctcctagtacttaatttaagtacacattttttattgacttttccttttaaaatatactgataggttctcattttcattgtaggtggaaagccagatgacatcaccgtccttctttcaatagtggctgagtatacagactagctgaggtgtcaagtcctgcctttcctttcatcatcccaaatttcccctgccatgtgtgctgatcctgctggcaggaccacatttctttgccactgatctcaatggccagtgatgtaagtcttttgcctgtcttcttgagactcgttgagatctttgttgagaaccactactatcattcactagctcatatctgccggcagcaattgaagagatccaatatttgaagattggccttcatttctcgatgttctttccatgatggggatggaggtgttcagtgccaccgtggctgttacttttcaaagtagttgaagtattgaaaatgagtaatgttggtaaagtgaattcaaaatcctagtatgctaaagggatggtacaagtctaacacaaattgtacgtaatgatacatctactagaaacatacattattcatcaaaagaaatgttacatgtgtactccacaggcatagtctttgttatgatgattggtgtggctttatgtctttgttataaactcctatttttcaggggcttatgattctgctctaaaacattgctctgggttatacagttttgatcccaaaagcttttttgttacaaatcgggagaaaaatccattttagttctatggatggaaatatttcatgcttttaaaaagatgtttgtgttcctgtggttaaagttttggcagtttattgattagtccaaatcacaggctaaggcctgatctccaggaggggtaggggagacactttaccagtatttttttatggaaataatactcaaggttgtaaaacccctcaaagcctagaaatttaattgttatggctgaaattcctcctagttgtctgatagaatgcccctgaatgggaactctaggtcccaaggcctgaagggttgagaacagacagctgtaactttgaattttgttggctttcagtggtcatgctacctacccatactcgtactctcagaccttttattagtagccttgctttctatagagcatgcaccaaatccagtgagtccatgtggagagagcactgtgtgcgcagcggcagcagcacagacgtccatgaggaaaactcccagtgatgatctgacatttacaattaccccacatggaaatttaggggtttctgaatcaagcttaatgtttacagtttccaaatagccattttgcagtgtatagtttccttacaaaactaccccgcattcagttttcacattatctgcaagctgaaacttatttttaagttttgtgtacaagttgactgctgtaaagatatatatttttgggtcagtttttttccttcattaacttggtggtagaaaaaaatatatacttagaaatccttaaattaaagccatgttttatatataagtcaggtaacattggtgtatagatgagaatgcaattaaacctgatgagaatctacttgagaatatagaaagtctttctctaaaggagatactgactccctggtttattgcattaaaatttatgtttgaggttacctcaacttgttttaaaagattttgttttgtgaatttgtactgtatatttgagtaactgtcaggcttttatttaaaattgtttaacatgtaccatgtacatgtcattactatatttcaatgcatcatgcttgtaacaggcatttcatttataataagaatgagttattcatttgtaagccgttcagtaatttatctactattcctaaattggcataatgttagataatctattttgaatcacctttaattacatgtcagaatgccttaactaccctaacttgacaaaacagaattctttggtagacgcggtgggggcggggtggggggtctggacggagtctctatttaaggagaaatcatcatgctatgataaaacacagaagcatgagtggcaagtggcggggtatttattttgcacaaactatttgcagtctctgtgtatttaaaaagtaaagaaagttgcatccagaagggttttgttagaatgaatacatttatattaggactgacaacttcagctcttttgtttaggttttcaattatttttggtaag

SEQ ID NO: 71466 - DNA, 1006 bp, Homo sapiens
tgggtggctggtgattacagtggctcatgcctgtaatcccagcactttgggaggccggggcaggcggatcacctgaggtcaggagttcaagaccagcctggccaacgtggcaaaaccctgtctctactaaaaatgtaaaaacaaattaggcgtggtggtgcatgactgtggtcctacaggcactattttacatgcctgtagtcccagctacttgggaggctgagacaggagaatcgcttgaacccaagaggcagaggttgcagtgagcctatatcgtgccactgcattccagcctcgacaacagagcgagacttgtctccaaaaaaaaaaaaaaaaaaggcggggggggatggaattcggctgtaaagaattaggaataaagactcatttccactaggattttagaggtgtgttagatctgactcagaagaggacccttcctccctccttctcagccacttgtgactaatcatcagacttggttttactcggtagtttcagttaaaaatttgaaacatttatattagaattttcgattaacttttttcagagttgggaatttcagaatgactttttttaaaaattgactccattatgataaatcagtttttcttgcagaaagcttattacattgtaaaatagtgcctgtaggacattttcaactcatctgtaaagggccttcttaactttgtccctcccctgtccttgccacagtccggatgctgctgatagcacgtctttcgatgtccagctaggagacattatcctgacggcaacagatggactctttgacaacatgcctgattatatgattcttcaggagctaaaaaagttaaaggtaattaactcaaaggttagctcttgggaaaagtggccctctctggatagctgagttttatggattcagttgcattatctctttgtagttttggaaagaactattttgtgaatttcaggaaaataataatagctctggtctttcaaataattagagcacttggaaaaa

SEQ ID NO: 71467 - DNA, 1018 bp, Homo sapiens
cttccatctgttttttttttcaagagttgtacacaaaaaagtttagtgagacatctgcctcctgttcctgcccttagccacatattctgtcctcaaaggtttctttatgagcagtttctttagtttctttttcttttttttttttttttttttttttttgagacagagtctcgctctgctgcccaggctgctggagtgcagtggcgcaatctcggctcactgctactgctgcctccctggctctagcaattctcctgcttcagcctcccgagtagctggaattacaggtgtgcaccaccatgatctaactttttgtattttttagtagagacagggtttcaccatgttgggcaggctggtcttgaactcctgacctcaagtgatctgcccaccttggcctcccaaagtgctgggattacaggtgtgagccaccacccacagcccgctatgagcagtttctttgattctctccagatctattccctgcatatagaagcatccatgtctgtgtgtctttctgcctttttttttttacggaaatggttgcacatacgacacaccgtcttcaccttgctttcttcaacagtatattgaagagttttttcccccaatttggagagtcaaatattttgctgcttcattcagttatgcaacagatatttcttctattttttttttttcttgagatggagtcttgctctgttgcccaggctagagtgcagtggcgccatctcagctcactgcaaccttcagctttggggttgaagcaagtgattctcctgtgtcggcctcccaagtagctgggattataggcgcacgccaccatgcttggctaacgtttgtatttttagcagagatggggtttcaccatgatggccaggctggtcttgaactcctgacctcaaataatctgcttgcctcggcttcccaaagtgctgggattacaggggtgagccaccacgcctggtcaagatatcaagatatttcttgaagacgtgttacatgaggcacactaata

SEQ ID NO: 71468 - DNA, 1029 bp, Homo sapiens
actgtggttctcagcaccgcttttcttactcatctttgcctgcttgtgcctctccaaacacgtgagaatgattagctcttctcccaatattaggctgctggggcctgagccacgtgcacacatcaggaatttgaggaggcaaaagaggagggtacactccaagcccagatggttctgtaaggctgggcttatacttgttggtgctgctttggatactgaagctcagtcactcaccaggactgttttgattccaactcagcgagttactgtcgcagggtagcaaaggatagcctggcttcgtcagtgagtatataaggagtcacatgagtccttcttgcagcagaattttcaaggatgtgctactcgggttgtttttctttctcagaatataatcccatgagttttcagaagatgttttgggtggtgatctattaatgataaaaggttagagttgatgtgcactgagttaggaaggaaaggtaatgggcaatctttgtcctactgtaagctatggagcgggttatctgacagcactaccagtgagttacagtacccgtgctttgcttttcgttgacacttaatggctagcatagtatgagttagtactaacgcatatactgtagataacaaggaaatggaatttctgggcattagcatgagaaagacatgtatatttttaagtgtttttaaattactttgttaggacaaaattaataataaaaattacccatgatcccactaaaacaactattaatatttgagtgattatgctttcagattttttttctgtgtgtatgtgtgcatagaataatggtaacttgaattgagtctactatgtgcccacaacagccccatgaggtaaatacataggtacttaattttattcccctccaccttttttttttttttgagacagagtcttgcactgttgcccatgctagagtgcagtggtgcaatctcagctcactgaaacctctgccccccgggttcaaacaattcttgtgccccagcctccgaagtagctgggat

SEQ ID NO: 71469 - DNA, 1015 bp, Homo sapiens
gttgccgcttttgatgttctttgtgatctccagctctgactgaattgtatcgtcactagcatcagcactttgcttaaaaatcaattttcattcttataaaagacaaagtattaatgacacaaatatgtctatacacagatgctaatcctgctgaaattgaactcttggctggtaggcaatgccaccctgtggtagctcaaaagtttattcatcaatatatgaaaggccaaattctaagtagtgaatgtggcttaggagtgttagtgtagaatacattaaacgtgagtgctttttattctgaattttggagtgaatgtatgtagtagcatgtagtgaaattaactgttaggagaaaacagaggtaagaattcctgagaagttggtaagattgttcttttactgtaatttttgttttttcttcaggggttgcagatggtgtaggaggctggagagactatggagttgatccatctcaattctcagggactttaatgcggacgtgtgaacgtttagtaaaagaaggacggttcgtacctagtaatcccattggaattctcaccacaagctactgtgagttgctgcaaaataaagtccctttgctcggtaagtgggtatcttatgtgttttcctctaaagaagccccctagatagttaaaaacaaaaccaagaaaatcatttatcggaccagcttttttctgaggctcttcctactaagcagagtgtgatagagaaactataggctaaccgctgggcgcagtggctcacgcctgtaatcccagcactttgggaggctgaggtgggcagatcacctgaggtcgggaattcgagaccagcctgaccaacatagagaaaccccatctctactaaaaatacaaaaattagccaggcatggtggcgcatgcctgtaatcccagctacttgggaggctgaggcaggagaatcacttgaaccccgggaggtggatgttgcggtgtgccgagatggcgccattgcaccccagcctgggccacaagag

SEQ ID NO: 71470 - DNA, 1055 bp, Homo sapiens
ccagaaacattgctaacagcatttggcatttgaggaagatactgttgcaggccagaaaggagtgaagtgaccttttcagtaacttaaccttcaactctgcagtttgtggaaggcagaccagtgattcataccaagtttgtaatttgcacaagttcccaagccacagttgagccagaatagataattccacattaagtattggtatttaaacagaattattgaagttaaaggaagaacatttttatttttaaaaggatgactttaagtttctttgccttcacacaattgtttcctaatcctcatgtcagcacttttcactgctttttaagacaaggcaactgcccagaatagtctggaaattatcttctctagttaatgaagtattctagacataggtgtaagtgtatgtggaggctcattaatttgattaattcttaagttgtctcataattactaagctagcaaggaatagctaactattttgtttggaattctcaaacacaaaatgaaccgcttactacagctttgattttgttgtttgagttttgcctatagtttccattttcacacttttttttttttttgagacagattttcgctcttgttgcccaggctggcgtgcagtggcgcagtctcggctcaccacaacctctgcctcccaggttcaagggattctactgcctcagtctcctgagtagctgggattacaggcatgtgctaccacgcctggctaattttgatttttaatagaaatggggtttcaccatgttggccaggctggtcttgaactcctgacctcaggtgatccacctgccttggcctcccaaagtgctgggattacaggcgtaagccacctcatgcggccattttcacatgttttattacagggttgaacttttcagtccatcctttgagcttcattaccttcacttttgaattaacttctgcttagagatcttgttcttgacgtagtcttgatctctggagaatcaaaagacacagatttcattgtgattaatgtggaatggaaacttcttttttcttcttcttctttt

SEQ ID NO: 71471 - DNA, 1062 bp, Homo sapiens
gttcctcacaccggccctgtgaaatcgaggatacgactccattcacaggtgaagctactgaagctcagagagctgcccaaggccatgcttagcacatcttgttctggggctggagtttgaacccagatctgcctccagagcctgtgtccttgctcagtatcccacactgcctttccagttagaaaagatcattttagattttcttttagggaggtgattttggctgattgtgacttctacttagttattagctattgcttttgttttaattaaggggttttgcttaactgttaactattagttaaaacaaaaacttaacaagccttgttgagtttggtagcctcaggccagcctttccttccagggactcctaaatgccgtaagctctgcactgcattgtttgcgctgattaatggtgagaggttcctggcatgaatgtaatagacatttacctggaggtcaagtttccctgctcttggaaccctcacctgctatgacttgtactttattcatgtaagtcagaatcctagggaattgctcaaaatgcctgtcttgtcagcctcctctcctacaactcattttctttcatccttcaaggctcatttcagacacttcttcattaatccttttgattccttcagctatgcataatctgaccttctttgcttttgtttttattggtgcatattttactttattatagtcatatatcttgaatctccctaaactgtcctccccaaccaaaatcatcacttcattttaagttcccatatgcaggaaatattttattacatataaatctttagctccctttcaccatagtgtcttgcatacagtaaatgtccaatagaatgttttgaatagttttaatattaaatgtgagtatagaatgtggtttttacctgatttacataaatagttcttgtcatccttcccatgaaagtaacattactcattgctaaaaaattggaaagtatgggccaggcacggtggctcacgcctgtaatcccagcactttgggaggccaaggcgggatggatcacaaggtcaggagttcaagac

SEQ ID NO: 71472 - DNA, 1045 bp, Homo sapiens
tgggtgtgtgtgtgtgtgtgtttataacttctttattcactctgactcataactgatgtgcaacaaaaactcctctgcatgctaaaccacagtttagagaaaccacttattttaaaaatggcagcctggtctgtgccatataaattttgacctctgaatattgagttgtaaagtatttattatgaaactgtgggatgtttatttaagcttaaacttgaaacctaaaagtgaaattaaaataatttcatatcccagcctttggatctgattttgatcgtggtcaggattttgaagtgtttttgtgagtaatgtcagtcttaaaagtagttgtcttgaggtgtaaagatcatatgaacaaaattaagatctaaattatatttaggaagtgaatggatgaggtagaatttggtgttttcaaacagtcatgatcattttaatgtacttatagaacctctattctgaaagtgagttgtccttttaaaaaagtagtcaccttcagagtgtgtgtgtgcacccactgacttcagtctttcaagaagtccttgttggaattttcctcagctagatttcaagccatgtcaggacaccactctcattatattaccataatttttttttctttttttttttaattttactttttttaaattccaggatacatgtgcaggacatgccataattttcttaaagtcagattccagcatcatctacctgttgatagcaaatatgaccctgagtgaattttttttttttttttttttttgagacagagtctcgcccttgtgcccaggctggagagcagtggcgcgatcttggctcactgcaacctctgcctcctgggttcaaacagttcttctgcctcagcctcccaagtagctgggattacaggcacccaccattacacctggccaatttttatatttttagtagagacggggtttcaccatgttggccaggctagtctcgaactcctgacctcaggtgatccacctgccttggcctcccaaagtgctgggattacaggcgtgaaccacgtgcccagccc

SEQ ID NO: 71473 - DNA, 1040 bp, Homo sapiens
attatgtgactccattctggtttcttgcaggtttttgtttaaaggaatggtggcgttatttatttaaaacaggctttaaaagatacggttaaaacagggtagaaaaccctcacgtggcccacctgcaattcctactaacttaacataggtcccgcgtctgaggaatccccctaggtcctaaatctttggcagccaagtcaaaagtgactacgactccgggactataattcccaagagacactgcgtccgcaccctctgcgcatgttcaaccttggtgactgcataaggcagcgagcccaaggggctgggcttgggcctgagcggtgaatcggggcggggctaggggcagggccagggagggggcggtgctgccggcaccgcccggaacacgctagtggagcggaagatggcggcggcggcggcggccgctgcagccgggacttcagttgggctgaggcggaggagccgccgcttctgacctcgctctggctccggtgcgcgcggctgagcgcgtgcgaggccccgcgcgtcgggcaggggcggcggcggccactgcgcgccgccctgaggagcgccccagcggcggcgcgactgcggctgaggagagagccggctccgggcctccgcgtcctcctgctcccccggccccccgcctcctcgggggggcggcggcggcgatgttctcggtcctctcgtacgggcggctggtggcccgcgccgtgctcggcggcctctcgcagaccgaccccagggccggcggcggcggcggcggcgactacggactggtgacggccggctgcggcttcgggaaggacttccgtaagggcctcctcaagaagggcgcgtgctacggggacgacgcgtgcttcgtggcccggcaccgttccgcggacgtgctcggtgagtccccgacccggttcccttgccccagcctcggatccgcctcccggggactccccgcgcggggcttccccagttcctcccggcggcgaaaggagccagagcgctcacatggagggagcgcttactatgcgccaggc

SEQ ID NO: 71474 - DNA, 1117 bp, Homo sapiens
tgaaaccttgtctctactaaaaaaacaaaacaaacaacaacaaaattgtatatctgtgttgtaacttattttacagttttacctagattaaaactttttagttgccattggaaaattgaaaaatttcttctcttttgtatttttttttccttgggaatgttaatgatttctagcgtttctggtgaaccaggctgttaagtgcaccagaaaaataaatttagaacagtgtgaagaaattgaagccctcagcatggctttttacagcagcccggaaattctgagggtaagaattattttgaagtggaacttactcattaggtatgtttctgttctttctgcgcttttaaaatatgacaagtacagaataatttcagtacatgattgacactcgagtttaaatttctccagtacttttatatcagtgattattgaaataatcctttaaataatttttatttttttatagttagctcatattttgcttttgttgatttttttctttcattcattttgatggtaaccaatatctgtctcctgaataaaaacaaatctttacgaataactaaaaactttagaaatcataaaaacatcttcatgtctgtgacagaaataatcttattagccccaaaaagggctccctctcagaaacaggccagaaaagaagaggaaatccactttctggttggcagatgacacaggcagtcaggaaagaacaggaaatgggagaagtgggcacaatggtgaaggggccccttctctctggttacagtgactgaaccctaaactgaagaaatgatgaggccactggcccacatgacagatgagatggagggtggcaagggaagaagacctttttcaatgattaaaaaccatatgataggctgaggcaggaggatcacttgaggctaagagttcaagaaccagcctgggcaacataatgagaccctgtccctacaaaaaataataaaaaaaaaccttttgtgtcatggttgtgcacacctgtggtcccagctactcaggaggctaagacaggaggatcacttgatcctaagaggctgaggttgcagtgagctgaggttgcagtgagctaaggttgcagtgagctatgatcgcactc

SEQ ID NO: 71475 - DNA, 1051 bp, Homo sapiens
acaaaacttctgttaatgtaccatgacatcatttggccttcagttggcacaaaagcattatttagaatctgcctcagcctttttctcatttgcttattatgatacttgtacaacttcaagccagcctagtcataaacataaatacagccaccaaatcatgtggcactcatcagttaaatgaattaaaatagttttttaccaattatcagagagaacttgcagctttcaaaattccaaagattgtgcaaggatcccctacaggttggagaaacacttttgtaaagaactttttcccctgtatcagaaggagtagctaaagatactaccaggtgtagacttcagaagattgtcattatactcagaggcaaaataatttgtccagataatagattttatctgttcgtcatagcgttaattaccaaatgtttacattcaacatagcttgtgttaatatgctaggggggcttttacagttgttggggcagttgtgaacaccatctgaacagaagatctgaatgaaatttaaggactcttaagatttggggttgagtatatttcctaaattaactgtcttttgaatctccagattttaaagcctgcagagaaaaagaagccaaatgccacgagacctgtaacgcctccaaggggtatgatcacaaagcaagcaaagaaatagatgtcgttttgacactgcctagtcgggacttgtaacatagagtatataaccttcatttttaagactgtaatgtgtactggtcagcttgctcagatagatctgtgtttgtgggggcccttccttccatttttgatttagtgaatggcatttgctggttataacagcaaatgaaagactcttcactccaaaaagaaaagtgttttgttttttaattctctgttccttttgcaaacaattttaatgatggtgttaaagctgtacaccccaggacagtttatcctgtctgaggagtaagtgtacaattgatcttttttaattcagtacaacccataatcatgtaaatgctcattttctttaggacataaagagagccct

SEQ ID NO: 71476 - DNA, 3057 bp, Homo sapiens
cttaatcattatcaaatctggaattctggtttcatgcttctgtggaatttaaaaagatttcatgtgaaaatgtaagtcattgcttttagatcagatatgtgtctctcctaaaccccttccctctaggagagtctttctttaaagagatggggtctcactatgttgcccaagatggtcttgaactcctgggctcaagccatcctcctacctcagcctcccgaagtgctgggattacaggtctgacccaccacgcccagctcttattttaaaagagccttaaaataagatggttttattaagattcttaataaaaacatagtttcatttgcttaaaaggcacccagaatcttgctttgggggaagttaatcctgagagaatgagcctacggaacagtaatactctctttttaatgtaatactctctttttaatcacaggtaaaagaagatacaacattaaactatggaaaactttcacagactgttttaactgtttaccgatagcagccatcgtggatgagaagatattctgctgtcatggaggtaggtgggctgatttttgttccaaataggttttgatcccttccaaagggtgaacactttaacatttgtgagttatcattgggatgactttctctgacagaacactctcctttgttgatgtgttgcattgcactttcactctgatacagccaggatcatttggataaaaatcttaaggaattgatttattacagggaattctagactctgtaagctaggtttgaaaatagagcagaaaatttttatttttattttattttttgtaaggatgagttctcaccacgttgcccagtctggtcacaaattcctgggctcaagcagtcctcctgcctcggacttccaaagtgctgggttacaggtgtaagccactgtgcccggcttagaaaagtttttggttttttttgtttttgtttttgttttttgagacagagtctcgctctctcacccaggctggagcgcagtggcaccatctcggctcactgcaagctctgcctcccaggttcacgccattctcctgcctcagcctcctgagtagctgggactgcagccacccgccaccacgcttggctaattttttgtatttttagtagagacggggcttcaccgtgttagccaggatggtctcaatctcctgacctcgtgatctgcccgcctcggcctcccaaagtgctgggattacagacttgagccaccacgcccggcagaagagtgtttttaactataaaatgaacaatgtgtaatttgttgtgccagagatcctctagaacactcaagatgtgagtagattttcccttgattgttttttatcctctcagaactttctctgacttggattttaaaagttattttggccaggcatagtggctcgcatctgtaattccagcactttggagaggccaagccaggaggattgcttgatgccatgaatatgagaacagcctataacatatcgagacccctgtcattagaaaaagttgtaaaagttagccaggtgtaatggtgcacacctgtagccgtagctatttgggaggctgaggcgggaggatcgcttgaacccaggggtttaaggctgcagtgagctatgatcgcaccactgcactccagcctaggcaacagagcaagaccctatctctgaaaatatatacatatatatgttataagctgttttgctttgctcagtggttgtgctttctataatgtaattaaaatagtaattgcaaagagaatttcttttcctgtatggtctgaaattaatcagccatcaaaaagcctgcataatgtcttttatctctgtgcttctgtacttaggttttggtagagttggatacatggtttttaactcttacaatatgcatcccatattgtaactcgatacaataagctcttgtagattttagccatcaaaaagcctgcataatgtcttttatctctgtgcttctgtacttaggttttggtagagttggatacatggtttttaactcttacaatatgcatcccatattgtaactcgatacaataagctcttgtagattttaatggtctgtgaacagtgcaggtttcctagagaactacctcacactgagcatccttatcttctcagctcagtcattataagccatcaatcataacatcgctcattattgtcatcaactgggggaagcccatagaagagttttttaaatcactggattttattttacagtgttctgtataatataattgtttccatgtactgtttaaacctactgcaccccatgcattactgcatgtaattctagtgtgtatccagttgtcctttttctgtgtttttttcttttaaccaaaagtaaataaaatataatcatagatttcagtttttatgtcaggattattgaatttctctgtagacaaatggaacttttgaaggggtagtatccttttaaaagttctgctttcttcattttttttttttcctcattgaataggtttatcaccagatcttcaatctatggagcagattcggcgaattatgcgaccaactgatgtaccagatcaaggtcttctttgtgatcttttgtggtctgaccccgataaagatgtcttaggctggggtgaaaatgacagaggagtgtccttcacatttggtgcagaagtggttgcaaaatttctccataagcatgatttggatcttatatgtagagcccatcaggtattgattttgaattttacatgtacacttaagagcatgtgtgtgagcacagattctccttgttgattttggtgggtaggtattgcttatttatacaaagtgtttctggaacacaagatatcaggctcaatgggaaactgaaacatggttttactcacctaatatttgcacctatttatattgaaaaaattttctcttcaaggtggttgaagatggatatgaattttttgcaaagaggcagttggtcactctgttttctgcgcccaattattgcggagagtttgacaatgcaggtgccatgatgagtgtggatgaaacactaatgtgt

SEQ ID NO: 71477 - DNA, 1005 bp, Homo sapiens
tcctttgagcatcatgtgagtgctcaaaaagttccaaattttggagcatcttggattaaggatactcatcctgtggtggtagtagtagtagtattgctgttggaaatgggagttggtggtttttggagattgcccttcagcctttcgtaagaaggagtttgcttttttttgagacggagtttcactcttgttgcccatgctggagtgcaatggtgcgatcttggcttactgcaacctctgcctcccaggttcaagcaattttccttcctcagcctggcgggagaagtttgttaaactttccgaaccccctagtgaaggacctctaaagaaatatgcaacagggtgaaccatagtcagtgttagacccagtcattgagaaaccagaaattattaggagaaaagataacactcctctgcagagagaaggcaaacatttgttgaatttacatttcatttcaagccctgtggtaaactccctaagctgcttgatttgcattacagggtgggaggtgtggttcaggtcagttgcttgggctggctctaactctcaaaggagaggtataggtttaaacctttagatgtccctgtattccccaggaaaagagactaaggacaaactcttggtttgttttgtttgttttgttttgttttttgagacggagtttcgctcttgttgcccaagccggagtgcaatggcacaatcaaggctcaccgcaacctccgcctcccaggttcaagtgactcttctgccttagcctcccaagtagctgggattacaggcatgcgccaccacgcccagctaatttttatatttttagtagagacgggatttcttcatgttggtcaggctggtctcaaactcccaacctcagatggtctgcccgcctcggcctcccaaagtgctgggattacaggtgtgagccaccgcgcctggccaaactcctggtttttaaagattgtgcttagtatagtaagtacaggaaacaaaggcatctggacaattgg

SEQ ID NO: 71478 - DNA, 1106 bp, Homo sapiens
gacgcagccaggtagtcgcagaatcaggattcaaagccagtagctcctgcaccaccccctgccacattgaaagttgacccctctattgctggcatcatcgggcagtcattttccattgacttttaactaaagtgtggggtgcacactttcccttgcagaatctctcttttctaatagcttcttgtctgggccgccatctgtccctctgccccatggcgttgcttcagcagtggggcgaggccccaccagccaggtttcccccaaccttcacactacttagcaacatctagcagatgcaagttttctgacacgggctcccaggattagcagatgctctttcatgagcatcatttccatcatgtttattacttccctgagattatcttaattccatagtccccaggagacacatgatgcttatgtggccatgtggcccctggagattggaaggaagtgtaggcctgctggggcttcttgtggtggaggacttgccctctaaaacagacttcagctcctagagaagcttctagacctgggggaggctgggaggtccaagcagttatgacagctcggtgggagtaggaaaagggagaaatccagagggctctggagttagcctgtctggattttaattcactgtctagctccatgaccctggacaagttacttcccctctgtgccttcagtgtcctcatctgtaaaatggggataataataaaagtgctggctgggtgtggtagctcctacgtgtaatcctagcactttgagaggcccaggtgggaggatcgcttgagccagggagtttgagaccagcctgggcaacatagtgagactccatctcttaaaaaaaaaaaaattagctggatatggtggcacacatacctatagtcttggctgctcaggaggctgagacgggaggatcgcttgagcccaggagttcgaggctgcagtgagctgtgattgtaccagtgcactctagcctaggcaacagagtgagacctgtctcaaaaatagtaataaaagtgcctacctgtggggtcgttatgaagttatatgaattaattcttggtgcttagatcagtgcctagcacatagtgattaattat

SEQ ID NO: 71479 - DNA, 1048 bp, Homo sapiens
agtcatcgattagctgccgcgaccatggagaagcgctagtgagccctcggtcggcggagcggccgagcggccaggcggccgggcgaggagcggggaaggcaggggctacggcctcgggcagggggctgctggcgggaacccccggcggtcccccctgagccgcactttgcgcgcctcccaacttcgcggcgcccggggaggccgcggagcgcgccgcttgccagtccgcacccggctggggctccggcgagggagggagggagctggcgggcagggaggaggaggaggagaggaggaggaggaggagagaggaggagggagccggggttggcgaggaggcggctccgcgccccgccgctcgccggcacctcagccttcgccgcccgcctggctgcgcagcccggacgcgccgccacccgggggccgccgccgccgccgccagagccgccgccgccggactggccgcaagcgccggcagacctcttctcctcgggccggggtcttggggttcgtcttgcttcttgcctttacccccccgccccttccatccccttcccaagtctagatgcagacgggcggtggaggtgggcccgggcgctcgcaagtttgcgctcctgcctccagggcggtggagagccgggagcggcgcagagcaggtgactcccagccctcgggcccaagggaacttttaaatgagagatttccttgcttgttctgcctcctgcgtttctccccgctgctcccctcgtctcctctctcccgtctctgcttttcttctgtttctttcctctcttccctgctctttctctctccttccctagggcgactcttcgaaaccccatcactttctccccatcctccctttgtgggagtctgtgtgcctcccctagatttggaggtgttctctgcggaccccgtaggagccggggctgggaggtggaatctcagagaacgcaccgtggaggcgcggctccggcctctgttctttcccggagtgccccggacgcgcctggcaaggccccccagccttggagtctcgcaaagtctc

SEQ ID NO: 71480 - DNA, 1069 bp, Homo sapiens
ctttctatagatgacagcagtaaataagctatcagccctgttggcggaatcctaactttggaaacttcaccataatagaattgctgccgaggtccaattgcagccgaggtggggagcgtgagcccgcagagcttggcatggctcagccccctgagaggggttggcattaggtgaagacagctctgagaataagacaaacccttggactctcttctaactccagccagtgggtgaccccattccctctgcctctccaagtccgtagaacccacaccctgtggcccttttctgcagaaagagctagaaacaggtgttgagaatttatttaaagaacccagcagccttttctgggtctcccaaaattgtagtttctcaacttgacagagattgcttctcaaaaacgggctctctctttgaatgctagaagaaaaaacaagcaacatctcatccctcactggttttactgttgggggtcttgaaatttcttttattaatacttgaattcactgtagaaaatggagaaaccacggaccagctaaaagaagcaaataagtgtctcggtgggttatttcagatgagcacggtgctattttgaccagagggaacagcttttctgatggtggtggtggtttttctttcttttacttttttccttatttttttttttaaactctcctgttaaaaagaggattctatcttcgaacttgacattctgtcatggtaacctttcttccggcagatgggatttcaaacgtgagcaccttggctagtgctaaatatatggtcctggatgatggtagacaaggctgcccagaaactgtggttttctgtgctgcttctgaaagggctgaatttccggtggcttcctggctatctaattcaaaggccgggcctggcagaggtgaagcattggaaggggactcaggtggtgacctgcctttgttcctggccttgggattcagggtcccatcttctgtttgatatttttcctctgggggtgctcattatttatgatggtgtcatatactggagggtgtcagggatggtagaggttggcaggggggaagga

SEQ ID NO: 71481 - DNA, 2694 bp, Homo sapiens
cctactagctgtgtgaccttggatgagtcacttaacctctccaagccttactttctttgtctttaaatgggactaataatagtctccgccttctaggttgttcaggaagatcaaaccactttgaacatgaaagtgtttagcacagtgtggggcacacagttgctgccctgtgaatctgagtgacttcctattgtcattggtatttttagagtatgagaggagaaaaccaaataaacagcagcggctggaacttgctggccttgcaggctgttttagagatttctgagcaagttttctcttctctcttactcctttggggttactatattagtattgtactaatattatatgtagtatattttgggagttctgaccacagaaattgcagacggggagctatgtctggcccatggatgtgtctgtctagattagtgagatatttaaaaacacttttgtgtaagttgtcagcatttaaaacacaagagatttacctaagaaatctaggtgaccagtgtcccctgaaaatcaggagctctggccactgtgggcaggtccaatggagaaggggagtggagacctgggagggacatttccaggcagagggaacacccagtgccagggccctgtgccaggggtcctcagtgggtcaggccagctgtcggagtcctgaggagggtcttctctgtagttcaaggccacaggccgcaccttcccagtgcctagttccagaagaggctgcatttccagaacaaatgaaaggctcctgaccaatgcatgaagatacccggttagtagggttcagagcctgctgtctctgcttcttcccaggagcccacacccccaaaagtgggcctgtggctgtcccccgaaacccctccggagcacaccccagcctctgccagtcttcagttcagcccaatgaaacagcagttccaggatatgcatttgccattaaaaacaaagaaagaaagaaagaaatcaatccttcggcctctttggcctgagctggtcgtctgcccagagacgctggggggcccaacggtgcttaagactctgtgagccgccgtcgctcaagctggacggggtaaatggctcccggggaaccattatggtcgattgacttgcccagccgccggtgtggactgtgggtgttgcggatccggagaccacaggggtcacaggggccgccagtccagggcagatttccctgagtggggccatcactcctaggccttgctgctacagatgcctgtgagtgtctgtcatctgctacgagtgtctatgggtgcgggtgtcccaggggatgtggtgtgagctgcggaatcaagccctacaccctccacccccaaagactacctggactctggagccagcaggcctcggttcaaatcccagctctgccacttaccagctgtgtgaccttggatgagtcaattaacctttctgagcctcacttttctcatatataaaatggggataatagtagtagccacctccttaagaattgttgtgaggacttttattattatttttttgagacgaggtctcagtctgtcacccaggctggagtgcaacggtgccatcagggctcactgcagcctcaaccttctaggctcagatgatcctcccatctcagcctcccaagtagctgggattataggtgcaccgccaccacgcctggcttttttttttttttttaacgtagaagtggaggtctcaccatgctacccaggctagtctcgaactcctaagctcaagtgattctcccaactcaacctctcaaagtgctgggattacaggtgtgagccaccgtgcccagcctgttttgaggattaagtgagttaatgcatatgaagcgctgagatccatgcccagcacattgaaacatgatataatgttaaagtgaataataattgctgttatccttcactccagaactgtacattcaccacttacggtataaataattatatataaaaaacaaatacaataactaataattacatattaaagatgatatagtaagcaaggaaggcaaggtgccagctctctcagagcccacaggccatgggacgagtggatgcacatgccatttcacagacgggcaaggggagtagattccgagacagtatatggcaaaggaattgcctgggtctggacctcaggggatgcttcctggaagaaatgacccttctgttgagatctcaaggacaaggttagggaaaagcatctcagaagagggaacagcatttgcagagaccccgagaagggtggaagaattgtgcctccaaggaactgaagaaagcagtatggccgggagaagattctgagcaggttactgggcctgtctcattctcacttttgccacctgccaatgaggagtagggatggaggatataatacgacactgcatggtggccgggtgcggtggctcatgcctgtaatcccagcactttgggaggatgaggcgggcagataatttgaggtcaggcatttgagaccagcctggccaacatggtgaaaccccttccctactaaaaatacaagaattagccaggcgcggtggctcacgcctgtaatcccagcactccgggaggtaccattgctatacccatcttccagatgagaagactatgcctctgaaaggggaaataagttgcccaaggacacatatctaggaagaaagaagtagag

SEQ ID NO: 71482 - DNA, 1566 bp, Homo sapiens
ctgtcgcccaggctggagtgcagtggcgcaatctcggcttactgcaacctctgcctcccaggttcaagcaattcgcctgcctcagcctcctaagtagctgggattacaagcgtgtgccactacgcctggctgatttttgtattttcagtagagacggggtttcaccacgtcggccaggctggtcttgaattcgtgacctcatgtgatctgcctgcctcggcctcccacagtgctgggattgcaggcgtgagccaccacgcccggccccttgctgttctttttaaaaacctctgaagataccttgccactgtcaactcatggaaatggatttgggccccaaagcctgagaagcatgggtcaggggaaggtgagagaaagctcccggttcccagcgtgtctcccagcctggagaatgagcaccacccggccatccatccccggcccccgctgggtcccggagccgcgtggcgcgccctgtcgtccggcctgcattccgcgagatggaattctcggctggggctgataataagcaggtattgattgctgccgtggtcattatcaagatttatttagtcaatatggcctccccggtcaataaatcgtgtcgttgataaagaaggaaggagatagacttgtagcctttattaaaaaagttttttagattttttttttaaagccaagtccagccctcctttctgtggctgtaccagccacactctacagttcgcgtttttaccttataagctctttctttccatggcagaccttatactcattgctctgactccaagaagcaaggacttggggctggggctagggctggagaatggtccctgacctttgttctttcattgaatcctcccagcatcccttggggcaggctctggtgtcaccctattttgcagctgaggctactgaggcccagggaggttcatttactagcccaaggtcacacaagactcgaacccagacagtctggccagagtctttgctctgaatctgacattcatccatcaaatagcaggtatttcttgagcacgtgctataggccccgcacaatgccagctgctgggtgtggaagggcaagctaaacaaataaatgtgtaatgacagaaatagaaagaatggaggaaagagcgctgaaatcacatggaggggccgcctgtttatttagggtgatgatggaggcccacactgggtaggtgacatttaggctgagacctgaaccatgaagaggagctgtgcaggcacagttcaggcaggggagctcacagctccaggaggagcctgtgcaaaggccctgaggtgggactcagcttgtaaagtcctggaaccaaagggaggccagtgaggctagagaggggagaagaggggagggagagaagtcacagggggaggtggttactgctcacgcaggcccttttagaccacggtagtggctggattcctttgaattctattatcatggaagtgggaagatactgagggtctaaaacgggagaaacgagatccaatttatgtttggctcccgctgggttcagcctgataggaaacattgaagggagg

SEQ ID NO: 71483 - DNA, 1117 bp, Homo sapiens
ggcctcataaaggtctaatgtgatgatgggtggctcttggtggaccatgttgtctggcaggagtcggggcctgggcccaaattactgggacaagcatcagggatgtcagagtcccagaggccaccgtcagagctggtcaccatagcagcatacactgggggactaggccaatttcctgtccttcctatcctggggtagctggaccctgggaccctcgggccagcagcctggaagtcgcaatgaggcggccccggccctcggaggatatcctcttcagcctctgcaagcaagggggttggtcccacggcccttggcctactttgtgaaattcatctctggaaaaaaattattctctgagcagagcagagcatcttggcatatcacagtgggtgaggcctgctgaggccgtctgcctccctggagggggcgaggagagaaaccaaggcccagctcctgcctcccgcctggcccccaaggtggggcacctgaggaaggcagccccccttcccccagcccccggagcttgcccgactgccccagcggtcccatcggcgcacgtttcctgtcccctgcccaggatggcacccctagaaggttggggctggcccagcctccctacaggtaagtaggcttgagccagaggataatttgtttctgtgggatgtattgatgagctgccctaattaggcaccttgctaatgagaatcaaaccacttcgctgggagtcgggctgatcgcagcctagctctgccgtgaagcagccatggtcctgagcaggccacttagctgcgtggctctcagtgttatcttctgtaacatggggcttcctgcgttctttcccctccatagctagattgtttgctatgcccctggagacctcgggggctgttgagatccgaggcaaaaggcggaggccaattgtggctttctttgggtgttcttgtcactggtggacagatccatggatgcgtttctcatgccggcctcttggatggatctgtcagggaaggaggatgctagagacgaggactgttcttaacatgtgtgactgcatgtgtctctgtaaacgcagcagtcatttgttgctgggtagcaagccaccccaaacttagtggac

SEQ ID NO: 71484 - DNA, 1048 bp, Homo sapiens
tgccatgtattatttacctaggggcttgtgaaaaagagaaggatccaaaaaaaacaacagcaagcaaacaccccctccccccaccaccctgcagtccaacattgctccaggcgtgcagcctgagggaatgagtattttttttcctccagtatctgtacgtgtgtgagcatgtgagacgctgtgctagagctccaggtcccaaccagcataggtggctctggggcctttgggacatcgcgaggcggcaccatcgcctcccacagccccggcaaaggttggcctcatggggcctgcactttgagatacggtgggcttccgttttagatcagtctggtgctccagtaactccagcagggcctgccttgggggctgggggttctcaggcaggctggctcctggaagggtaaaattcccagaggaagggaggtagcgagtccgggggatttggcggccgcccctgcatagcattattctgtgcctcacacattcttattagcatcgtaatcgctccaaaatactgattcattattgcactccgagctgcagacggaggcaatggggtttaatagttccatatgagccattctgggctgttgagtaaatattgctcattgtgaaaaattgggtaaatgtgtgtttacgctgtcgaggagcgaggcaccagccaagtaggtagctggtgtctggacatgcacccggcaaggtggtggggacaggggaatgaatgttctctgggaaatatttgcttcctgtctggctggccttggaaatgttctttggacatggacgttgggatcaagaaaggggctttacctcaaaatcaaggtagaaggagccttgtgtttcttgtgcgtgtgcaaatggcttaggagtgggcaggaaagaccctgggccttccaagcttgtagagacaaatgattggattcagaatcagagagctggttaccaccagcagcaggaggcgatgtggcaggtgagaagtgtgcaggtgagagggtttgactctgggttccctgttcaaccacctgctaattgtgggatttcaggc

SEQ ID NO: 71485 - DNA, 1067 bp, Homo sapiens
caggtctctgttgtccctatagctgagacgtgggaaggaagaaaggaaggaagcctgaaggaaggaagtctagagccgcctggaggcagggtttcagacaatttcatggggacagagtgaaaccagcctgcagggagaggctaagagacagagtcctgatttgaatcatcctgagggcattctctctctttatcgtttgattacaggagcccaacccatgtttttatttgtgtatttggttgtttaagcttgttcagaccgagtttctgccacctacaatcagaaacacccccaaaacatgtctccccatggaaggttccgggaactcttggccactccattctgtgtgaccaaaattctccaaaggtgaatcagacacaagtcatgtctgccaacctggcctggtgttgataggcgggtctggtgcaggatgtaccctgttgtttgaagaacatcatgtggagaacaaggggacagagggaggccatagggtgtgccaggacacaggcctgggcagaactccaccacccttgggatttgagtatcccagaagaaggaacatttgggcagtgacatggccatgttcgtgtcactgaaccaccctgagaaataaggtcccgcgcagagcttcagcagatgtggaatagttccaccccctgcctcagattcttttcagggcagcccatcacgacccctctagcaagagttacctgccctccccaccgatcataccctagtccagcagggaatggcttttgcccacttttaaaaagtggcctgcagagcctggcgaagtccctcccgtgtccccaagcccaccacacctgcttcgttctgcatagttctccccgctttatctttgatctcaaaaaaagatcatcttggaaaagattgttttgtgtgcagtttacccaaatgccactttttctaattttgccggagttgccctccccactttccctcttccttttctttctttcttggatttgctctggggttggcttcctcgaaccaaaataactctcacaatgcacagggaaaagtgcttcctgtggatgaatgacatc

SEQ ID NO: 71486 - DNA, 1628 bp, Homo sapiens
tcagcccagagcctgccctgacttcacaggaagcagcagctgaactttggcagcaggagggaagtggggggttgtgggcaccagaaccaactgcattgatttctggctgcagttcttggaaggcctgtcatgaggaaaacaggcagcgggtaaacagcagacggcggcagggcccagcagctgggaggacctggctggacctaggaacctgtcttagctcgtggtaccggccaggtctggccaccactgttggggacaccgtgcccctcgggcccaggcctgagcctctcgagaccccaccatctagccaggtaaggtttgcccagacctggtcccccagaactgtctcccttgctctgcccctgcctgttcagagccttagggattctgggttcattcatccagtcccccacaggccttctctggaccaggcctggccgagtcacacctgagggctgcagaggatggaggagacagccaccacccccaccccccaccacccagccgcaccctgagccctgctcacaggagcagccgctctccctggctctggagggcagatctgatttctgttccatcccagctgctgccaggcacccctggagccgtcagaccgcagccaactaggcgggccgaccctgtctgcgcagagccaccgcaaaattacagctcagacaggatcaataggatcaggtcgaggggcctttggaggatgattttgctttgaggagaggtcagaggggcttcagacttataaatttattatttaagggaggattcctggtggtccgtaagagtttgttggacagggagttggcctctctctggtctcctggatgttctctggggtggagtcaaagcgtctaggctgtttgcgatgggataagctgggtgccttccccggcaatgggtagaggggatgatcagggtttgggggcagcgttcggatgcggagagggagctgctcaccttccatgtccatttgctgctgttgttttttggggagagctcagttgacaaatatatttgtgtgtcatgctgtctttttacttatttgggcgcttattgtaggcctggcattattctaggctgagggaatcaggtcatgaccaagccagatggagcttataagtctcattatttgtccttactggggaggaatccaaggcccagggtgtccgagtgatttgcccagggtcactcagcaagaggcccctgccaggttccactctgcctaggaaatgagcaaaatagtctccatcagaccaagtgggaaactgagtctgaataataatgatgatgataataaccagccttcagtaagggcttagcaggtggccgggaactgtgctaagtgaaccctatgaggttggtactattgtcttcccattataaaggtgagaaaactaaggttcagagaggtgaattcacattcttgaagtcacacagctagtcagtggcaaagctagaatttgaactcaggactttggctttcaagcttaaccacacatcatgtggatactttctgaagttcccactaaagccttgtgcactggagaggcaagtcagcatcatcatttttataaagatcaggtcctcaggctgggatgtgcagttgaggaggatgc

SEQ ID NO: 71487 - DNA, 1084 bp, Homo sapiens
tgccacaaatcagggcttactccttagagagcccattgttaaccatttaccagcatgcatctgagcaggtcatgcggagatctgggggagggttgggaagggtgttccaggcattccctgatgtgggaatgtgttcagaagggttgaggaacatcctggaagccagtggggatgggatgagtgaatgaaggggagaatggaaggagataaggccaaaggaattctgtaaatacttttggtctctgaaatcctctaatcagtttacttgtgcctccagaactttgtgcatgctgtacctctgcccagaatgctcttcccctggctgattcctttggttcctgtctcccctagagaagtgttccgggaccatttttgccacagcacatctttcgcctttattcttatatcagcactacttggttcccttcccagcatttgtttccagttgtaattgggtattgggttgtttctttgagtttggaatctgtctccctcattggactgtaagttcagaaagatctcgtcccctgccatctccccaccttccagcaagggcttacacagggcagatgcttgaagcattattgtcacatcagtgaatgctggtggagagacttttctgcacttattattggtttgggaaatgccctgaatggtgtgagatcagggatcaggagcagatgtagctgatggagaagctagaggctcctaccttgtgccaggcctgatccaggagcataattcctaggtcccttctagttaactttgaagcaacacagtggcagattgaggccactctgatgatggtcatagtaattacccccaccagctaccaacctgtcagtgagaaagagcattctctctgctcctgctaaagacattggccacttcagtggttaaatatttctattatatcatggtagtatcacagagcaatggatgtgagttcagaacttaagatgaagattgtgtcactgatggagaaagtacttagttcacaggcaactggaactgtgtagcctggggtgcatcaaagaaggaaacattttcatcaaaagaatcaggtttggctgacctgattatt

SEQ ID NO: 71488 - DNA, 1048 bp, Homo sapiens
tgcagagcagaacctgcgtcagctcagagtcctgtgggaagggaacggctttatcgcagcctttcgcttttatttttgcacattcgctttttatttgccggtggtgctgctgacgggccctcggagcggggctgtgtctggacacttctgggagccttggacggctctggagaggaggcaggagctgcccagggtgagtgcaaggacccgccgagggttgagaggacttgggggatgtgagagcaggagcctgtgactgtgtgtgtgtgtgtgtgtgtatgtgtgtgtgtgcttgtgtctgtgtgtgtccttgtgcctgtgtgtgtccttgtgcccctttgtgtgtccagctcgatgtatgcgtggcctgtgtggctctccgtgtgtctttctctgcgtgtgtggtggccgcgagagccgtccatgcatgagattgagtgtggatctctgcctatctctgtgtgtgcactcatgagttgtgtgtgtgtctgtgtgtctttggaggtggccatgggtgtggctgggtgtgggtcttggccctctgtgtctttctgtttgtgcggatgtgtgtgtgtatcttaaggagacacatgggtgcgtgactggtgggtctgtgtgggtgcagacacccatgtgtgcaagtcagaggggtatgcatgcgtgtgtgtaagcatgagtgtacacccacaagtgtgtgaattgtatacatttgaacatgtgagcttgcatggaggagggtgtcacgtggcagagtgagttgtgtgcatgtattttgcatgtgtgtgctacatatgagagcgtgtggactgagcacacgttgcacaggagggtgtgagcagtgctcatgtgctggagcacctgtgtgagtatgtatgtgagcacatgttgcatgtgttgcatatgagcacatgtgtggggcacttccatcttgcatgggggagcccccagtagagccctccctgggcagctcagcttgccaccaaggaggtcactgtagactcccagcctcttgcctcagccccagctccagtcagagcctggaaaaccc

SEQ ID NO: 71489 - DNA, 1012 bp, Homo sapiens
ctttatctgagcaggctgcattctacatttgaggttaaaactcacatttcatttttatatgctgtgcttaatccaataatgatttcttgttacaaacagaaataatatctttcagcatagttaatcagaatagacttaatgctgtcactatttattaacctttgttgaaaagcaagaagtttctctctaatctgtgattgctggtcttgtcaggctctatcaagtgaaaaaacagttttggcattcattaaaacagtgcgaatcctgaaatgacaattggagctggatggtatttggtgcatgaaatcttcgttgtgttcaccaggataactgagaaggctggggaggcgtgaagggggaacccacacgttcaaaggactgagtgtttcatccccaagtccctcttggataaagaaactgttcttacgaattgggaaagtggggcagaggatggggtgcaggggaggggaagggtgaggcctgctggtgcctcttgccagagaaacatcattagttcaagacaatggcttttggccaggcacagtggctgacgcctgtaatcccagcactttgggaggccgaggtgggcagatcacctgaggtcaggagttcgagaccaccgtggccaacatggtgaaaccccatctctactaaaaatacaaaaattatctgggcatggtggcgtgcacctgtaaacccagctgctcaggaggctgaggcaggagaatcgcttgaacccaggaggcggaggttgcagtgagccgagattgcatcactgcactccagtctgggtgacagaatgagactctgtctcaaaagaaaaaaaaaagagagacaatggctttgaacttggatctcagatgcctcatctctttcccaaccctatccagcgctaatgatctactgggagtcatttattcacttttactcctccccacaacttctttttcatttagtaaacaaggttgggtctccccgatctccaaggcccacattcagttggagtccagtt

SEQ ID NO: 71490 - DNA, 1090 bp, Homo sapiens
tagagtcttgctctgtcgcccaggctagagtgcagtggcgtgatcttggctcactgcaagctccacctcccaggttcacgccattctccttcctcaggctccggagtagctgggactataggtgcctgccaccatgcccggctaattttctgtgtttttagtagagatggggtttcaccatgttagccaggatggtctcaatctcctgacctcgtcatctgcccaccttggccttccaaaatgctggataaaatttcttaataatattgaatcttccaatctatgaacatggtatatctccattttctaccccatgctcttcccctgcttactcttactcctctatcaggtgccagtttaagtgttatcttctcaaggaggtctttgttatctcctgactcgatgatccagctcctgttataccctctggtgccccctctttttcttcttggaactaatcacagtggtattaataattattaatgtgagtatctgttttgcatttgtctcccccactagaccataagttccatacaggcaaagatcaggtctgccttgttcacagactagcacacagtaagttgtcaatgaagatttataaatgaatgaatgaatgaatgaacgaatcccctcctattctttgacatagatctgagaacactggctgttgtcattcacagtttgatgaataccttggtctctgtttgctgatggagaacccaagccctaatccctcacccctttcttggccttctgcctaaggcttagttcctgctgatatgcattatatgttgagaactcctattcatttgacaggtagatgtgtgtaattatgatttttaaaaatgaaattatacatctacagagaatttttaggtaatgattataatacagaagtttaatttatctgggggaacgaaagatgttgctttcacagcatcagtcagagcattggaaaaaccagtggtggaatcttgattgaattaggctgtgcttataattaggaaatgccaaggcctgcagaatattgagaagtggtgaggacaaagtgatgcaattaagagtctcttttcccccctttcagcagttt

SEQ ID NO: 71491 - DNA, 1025 bp, Homo sapiens
gtgcccgacctttgggtctcatgtaacaacaaaaaaatggttgcatgaatacactgaaaaaataaataacgtttactattgttaaaaaacattatgaactgggcacagtggcttgcgcctgtaatcccaacactttggggggccaaggcgggaggatcacctgaggtcaggagttcgagaccagcctggccaacatggcaaaaccctgtctctactaaaaatacaaaaattagccaggcatggtggcacgcgcctgtaatcccagctactcaggaggctgaggcaggagaatagtttgcacctgggaggtgaagtttgcagtgagtcaagatcgcggcactgcactccagcctgggcgacagagtgagactccatctcaaaaaaaaaaattttttttaaacatggagaattgcaaaagggaatagcctggagaatccccacatccccatggccttgctccatcatgatattgaagtcactcttttggttgtgtttctctaaattctatgaggacagcaactctcttcattatcctctatatcattgctatgccctggtgttgtgcccggggtacaacacgtagtaggtgttcgataaacttgggttggataaatggaagaatgaatgaatgatgagctggtgcacttagatgtgatttataagacttctagggggatcaccggctattacttagaactatattgtgggtcaaatcacgtctccttccccttaaaaccacaaatagccgggcttcagcatctgccgtggacatcagaattcctgagaaccttctgaaccgtgttggctcccaggccccactcctgggagttgttgggctgttgagtagactgacatattgggaagcctggtagaatctcacaggtgtaggaaaatctagctgcctagggttataaaggatgccctttgtcctcaactcctttgacaccttctctctggagacctgctgaataaggaagggagtaaccacaaggaaaaaaaaaaaaaaggcaacaaaaaccaactgg

SEQ ID NO: 71492 - DNA, 1128 bp, Homo sapiens
ctacactgatttttttgcacactgcttcattcccaaatagtcagagatgggtagaatcgcccagtatcagaacagactttgagggaggctgcattttgcatgctaaccctgagaattcactggcagcttcctggagctctgcgttgacaaggattcttagactgcattctagatcagcaaaagagagcctcattcaatctataaacattttggagcacttactatgtgccaggcactagttgggagaggctggtaatagatactaaaagaccagctcatgcaaaactcaagcacaggatagagttggcatcttattctgaatgcattgagaagctatgggaggattttccttggggaagtgctaggatctggtttatgtttcaaagattacagctttaaaaaaaaaatcactctaggttgtgtatagagaatcaatggaaaggaggaaggaagagatgccaaaaggccaggttcaaggttattgcaggtgaggatgggtgatggataagaatttatttgatttgggctttacatgaaaagtccagttgaccaaattcatcgatggtttggattgcagcataggagttggtgatccattagtaatgtctaccatggacacgggaggtggcagtgagcatgcacatgctacatatttgttatctctgcctcataagtcattcttaggttgatgagagggagtggggaagatgaagaatcacttagggatagtagtgtatagctttagcaacagctacagatattccaggagatgtatttgaagaggaatgttcactggccattcctgcagacattaagcaaagacatggattagcacaacatccatgagaccacatgaatgccatgttgtctccacctgaaattgtttaggaatcagtaaagcaactgggaccctcagaagatgtaaaaattaaaccaaatccctggagagatgtgcaaaggaccaatgtgattccacagagacgcaatcaggaaggttcaaagaaaagaggcaaggcaggaggccaacgatggaacggataatagaaaaacagttttcaattatgtcaggtgaaaacggaggatcagggatagtccccttccccctctcttcctcacctcacaaacagg

SEQ ID NO: 71493 - DNA, 1376 bp, Homo sapiens
ttcttatttcacaccagaatcactcacaggcccacagtttgttacatagactaagcagtggccctgccatctcactgatggtctgaccctcactcttctgggaggaggagacagcccccctaccccaccaggctccggagactgagcccaacatgcagatcctgccacagatgccttcttgcctccccaggcagcatcaccccgagaatccgcacgcctgagacaggctcagacgacgccatcaagagcattctagagcaggccaagaaggagatcgagtcgcagaagggcggtgagtgtgacccctgcaggcaaagcctgaggcccccggggccagctgcgaacaggagatgaggcttcgtctacctttgtccaccccagagggaatccaaggtggatcagaaccaccagaggccagagggacctgtctagagcgcatgggtagctgtggcactgctcagaaccctgccatggttccacacagctctcaacataaaatctcaacccttggccaggcgcagtggctcatgcctgtaatcccagcactttgggaagccaaggcaggctgatcacctgagatcaggagttcgagaccagcctggccaacatggtaaaaccccatctctactaaaaatacaaaattacctgggcatggtgatatgtgcctgtaatcccagctacttagaaggctgaggcaggagaattgcttgaacccgggaggcggaggttgcagtgagccgagatcacaccactgcactccagcctaggtgacaaagcaagactctgtcagaaaaaaaaaaagaaaaatatcccaagactcgacaaggcctacaggccctacagtcttcaggcccctccatgcctgtcacatgaactgttcatagtcatgcccagctgccgtgcactccaccctgcgcctctgatgctgtccttaccccagacacctttcacctggccaactcctactcatacctatgactcaactcagaagtcacctcctgcaagaagatgggttggacactgcacccgcttccctccacccccaccacagtgacctgtttgcttggtgtagtggagctggactggccacaaattctggctctgctgtttattggctatgtgaccttgggcaagttacttagcctctttgtgccttcatcgtctttgtttgagacagattctcactctgtcacccaggctggagtgcagtggcgcagtctcagctcactgcaacctccacctccttggttcaagcaattctcctgcctcagcctcctgagtagctgggattacacgcacgcgccaccacacctggctaattttttttttttttgtatttttagtagagatggggtttcaccatgttggtcaggctg

SEQ ID NO: 71494 - DNA, 1014 bp, Homo sapiens
gactatgggggcgtacccacaggcgggtggcagaatccaggtgggaccccttccccatcccagggcctggagggagccccacatggcctctgggagatggaagaccccatcacataggcacttagatatagaacacaggcccaagtgcagtggttcatgcctgtaatcccagcactttgggaggccaaggtgggaggatcacttgagcccaggagtttgagaccagccctggcaacatagggagacctcgtctctacaaaaaaaactacaaaaattagttgtgtgcggtggcatacacctgtagtcccagctacttgggaggccgaagtgagagggtcacttaagcccaggaggcggaggctgcagtgagccaaaatcataccactgcactccagccggggcgacagagactccatctcaaaaaaaaaaaaaatttaaaacacaggcaaatgtggaagaaatcccagctccatcactttcagctgtggagccttcttcacttccctgagcctcagtcttctaacctgtaaaatggggtggacagtagcaggatctacttcatagagttgcacagaggatttgatagactaacatagttacataaaatacctagcgtgtaggccaggcgcggtggctcacacctgtaatcccaacactttgggaggccgaggtgggcagatcacctgaggtcaggagttcaagatcagcctgggaaacataatgaaaccccatttctttgaaacatacaaaaattagctggacgtggtggtgcatgcctatagtgtcaactacttgggaggctgaggcgggagactcatttgaacccaggaggcagaggttgcagtgagccgagattgtgccactgtactccagcctgggcaacagagtgagactatctcaaaaaaaaaaaaaaaaaaaaaaaatccagcacatagtatgtggtgggtattgatatgattattgtcattatttttattattatttcaccctgtttgccttgcgtctgcctcaaag

SEQ ID NO: 71495 - DNA, 1053 bp, Homo sapiens
gggtccctgctggggcggtgacggccaggctgctctttagtgttcttggcacacatgtttttcagcctgtgcctgccacaccctcttccccacgcccgctgctgggggacactgagggcagctggattcaaccccaggacctgcggtactggcttcttttcgttgatgtgagtgccaaaatgccatgcttcagtctcccaggagacctgggttccggggccagctgtgcccctggagatcttggatgaattatttgcctttttgacagctctttccctgaaagctcactacccaccaagtattttgcaaaatgactcttcaggagtcaattcactcagcccttagagggatggaagttaacgtcaccattttgcagatgaggctgagaaaaaactccgactcacagcagctaatatttgcaatccatttcccatagtttgccagtgggttttccttcttttagctcatgaaccctcgccacacagcccaatttaacagatgaggacactgagacttggaaaggtgaaacgacttgtccaaggtcctccagcctggacctgcggaggcaggaactttgccttgggagcagagctgggccaggctccctccagcttcctgtctggccatgggctgttgaatcagcagcagtgcccacagtggactctgaacttcttggaaaacagtgtggggagataaggcaggggccaggccttcgctccaggcaaggctggcgcctgtgcccctgcagcttcctgtcttcccagttctggtggaggcaggggtcatgggcagagctgggtcctgtgcctgctggtgaccttgaaccagtttggcctctatctaggcagtcgggggaggagggttgctgagcaggagggaagttgctattcctttggccttgatggggtggagagaccccaagatcagcccctttatttgggtggcttgcctggagcatgtgattctgggcacagttgtatgcctctagccaacttattgaatctccctgtgtccatttccacatctgtgaatgtggggtgagatcccttgtct

SEQ ID NO: 71496 - DNA, 1032 bp, Homo sapiens
gcacatttccaggcactgttctaggcgctgggaacacagcagtgaacaacacagatatccctgcctgcgtggagctgatattctagtggggggacataaggcacgaataagcaagtgggatcagctatgacaatgacaaaacagttacgggatggagagctggaaggggatgtcttagatccagggctcaggaaggacacctctgcggaactaacatgtgagcttagaaccctccatgacaagaaggatccaggtgctataacgtctgagggaagagcattccaggccaaaggaacagcatgtgcaaaggtgctgaggtgggaatacatgtggtgctttggaataaagtcataaaggcagtggtgacacctatactggtaagagatgatgtttcaaaggtgggcccatcacatggtgtcttgaaggtcttggtggggactttgggaattattttgaaggcagtagggtgccatggagggttgtgaggagaaggacctgtggagtgtgggattcaagctgttcacacggcatctgaggatgtgggaagaggggtggggtgggggaatgtcaatgaagtctaaacgaggccgggtgtagtggctcacacctgcaatctcagcactttgggaggctgaggccagcggatcacctgaggtcaggagtttgagaccagcctggtcaacagggtgaaaccctgtctctactaaaaatacaaaaattagccaggcatggttgcacgcacctgtagtcccagctactggggaggcagaggcagaagaatcgcttgaacctgggaggtggacactgcagtgagccaagattgcatcactgcactcgagcctgggagacagaggtaggctctgtctctaaaaaaaaaaaaaaaaaaagtctgaatggatcatcccatattatttgatcactttcttatacctggggacactgcggccaagagagaacagttacttgtctgtagccatgcagctgccaggcagcacccacagagcagcccggtacccagccaatgccaaatgg

SEQ ID NO: 71497 - DNA, 1046 bp, Homo sapiens
gtacgctggaacccagactcagcccaggacataaggtagccccctgcgaccaccatcacccatcttatctaacaggtgcttctcctggggggctgctggacccggcctgccagaagacggaccatttcctgtcctgctacccctggttccacggccccatctccagagtgaaagcagctcagctggttcagctgcagggccctgatgctcatggagtgttcctggtgcggcagagcgagacgcggcgtggggaatacgtgctcactttcaactttcaggggatagccaaggtatggggtggggtggggtggggtggggcaggcaggaccgtgccacccctctccactggagttcagggtcctagagggacagcccgagcccaccatcctctcctcccacagcacctgcgcctgtcgctgacagagcggggccagtgccgtgtgcagcacctccactttccctcggtcgtggacatgctccaccacttccagcgctcgcccatcccactcgagtgcggcgccgcctgtgatgtccggctctccagctacgtggtagtcgtctcccaaccaccaggtctgaccctactgccctttgctgaagggggtggctgacactgggtagagggtagaggcttgctgcagacccaggggtacaggtatcttgttctgtgtcctgtcagcacttgcctcaagactgatggtgtggtctctcttggtcacttgtcctaggttcctgcaacacggtcctcttccctttctcccttcctcactgggattcagagtcccttcctcactggggttcagagttgggccttccccaccttagttcttctggctgtccccgggggctcagcccagagggtctcccagggcgatcctcaccccccgagcagatcttccacctggtgccttcgcccgaagaactggccaacagcctgcagcacctggagcatgagcctgtgaatcgagcccgggactcggactacgaaatggactcatcctcccggagccacctgcgggccatagacaatcagtacacacctctct

SEQ ID NO: 71498 - DNA, 1144 bp, Homo sapiens
tggccactgtccttcctaaatgtcaagaagtgaagtatgtcaccctttcagggaaattcaggcaattactgaaataggagggtggcaagaacagttctatcctggtgccttacgaataaaaaactggattctggtttacagcagctttacagtgatagttaaattaactggggctaggggaagagcaagcaaaaagggaagaaggactcctaggccctttctagtaaatccttcagcaacaaggctggcttggtgccctccaagcatctaatggcttattaaattatcccacaagtgggttttaggctccttttttgagccaaaatggaagctgggaatctggtgccataactaatgagaaactcctttaatagcccacaatcagtgttctgttctagctggctactgcttcactggattgagaatctatctatctccttgcacacatgggcacacacaatctccaccatccagggaggtcctgaagtcaaatctctatctatacaagtgatacaattcatagggggctggctcctcccagaacctgtctggaggctcagaaacgggggcagtgacagtggagtcagctgctcttgggtgccagcagagccattcagtacaacccccaggctcacagcagtggcttctaggaaactgggagtttagatcagctttacagatacatcgatcagaggctaaaatgaaacctcagcctaaaactcataggactgactgcctgggaggagggttaggtctgcttcttccacttatacttagtctctgtgctccaagaggtcaaatttttgcttctagaatttccttggggtctttcagagggtgggggaacaaacccctatgcacttttcttttttttttttttgagatggagtttctcttgtcaaccgggctggagtgcagtggtgcaatcttggctcactgcaacctccaccttcctggttcaagcgattctgcctcgacctctcaagtagctgggattacaagcaccagccaccatgcctggctaattttgtatttttagtagagacagggtttcaccatgttggccaggctggtctcgaatgtctgacctcaggtgatccacccgccttggcctcccaaagtgctgggattacaggcgcgagcc

SEQ ID NO: 71499 - DNA, 1041 bp, Homo sapiens
tcaaggcaggttagttgacttaattctttggtgctggtgactgttagtttgtaaaagttcaataagtcagatgaaggaagggatggtgccgggagctgtcaagctgtactggtggggtctgtaattagagctaactggagggatcatgatgtctactgtccagtttggtgttgagccatggctctcggtagaagttgccggctggggcctggtcaggactggaaggagagtggtgggatgtgctgtgcctatggtgggctagctgcagccagtggggtgcctgccccacactgctgcccaccccttcatcagctgattctgctcccacataaagaaaggtgttggcttagtgtcacttcttcctagagccatgggagttttctgtcagcatgtttttgagctgtcctggtaacttggacgggaagcagtctggaggtgggtgccttccaaatctctgccacagaatctgaacttgcactttgcagcctgttagtcagagctgctaagtttgctctacctggtgtgcctcttggcaccacctgagagatgtatgtagagaggctgctaagaaatgagtgcccctggcatgaagacgtcatatcccagatgtttaacttctggctggagggagggaacttaatttggttcattatctactgggtacctttcctgtgcggaggggaggaccagtgactttccataataagctttctcctttaaaaaaacttcagactcttacttactcttttggttcacactaattagcattcattttccagagaaagctgcttgactttgaggaaataaagacaggtgtccttaaaaatggactgcaaatctggatcagtgtcaggtctgctttagggtccatgaaatcacccaagagtgttggtactaaaagtggtgtaggctgggcgcggtggctcgcgcctgtaatcccagcactttgggaggccaaggcgggtggatcacctgaggtcagacattcgagaccagcctggccaacatggtgaaaccctgtctctactaaaaatacaaaat

SEQ ID NO: 71500 - DNA, 2599 bp, Homo sapiens
tgggaaaaaggaaacaagggctcttcctggccctgccaaccccctgcagagctggaatccagctgtttgggctgactaaaatcacctttccaacttgacagtgagtgagaccaggttgaacttggtacagagacgctgggctggcccagatgacttcaggttactcctttccatctcactggagccattaaaaactccaactcctcctcctcctcctgctccatcagcatatctctgagagagtcacgggggcctaagagtctcttttcactgcctggtgagcagaccagaagcagagggagagaggcaaatgaacagaggtccaagtaattcacatacttgactgtgacagtctctgcttattaatgtaatctgttttcctatttgaaagggatgttatctgcaaaactacctcaggccccacatggcagcctgattctgaagcatcattgaatcttgtatgatattaagttgagaaagctgcccttggatccagtgtctaatctttgtgaagatcttaccccatacatagaatacaatgatcagaaatgtcaagggttaggacagcacagccctgacttctacccaggctcacttgttgcctgctccctgacccttgcaggatctgcccaaaggtgaagcgcgtcttcaggtcaatagataatctactagagattgtccccagagaacagaactgggccctgaggcccaccgttgccctttcctgagagtcccagcccagtgaaaggaacacagttgacatgttgttgaagccggagatgttgcctgtatgcgtaaaagagctctctgtttcaggctcatgtacagtcaggaatggttccttctcatccaactgcccatgcgccaatgatgctaatgacgacacagccacccggcggtccccaggccgccctcgctcaaagtgcactacagcccattccagtctcgacaacagcgcatttcccctatatgacgcacccttcaggtgaggcgtgtgtgtgcaggggccgccggggcaccccaaagcattctgctcgcacaggtggaatggcaggcagggccagtgcttcaagccccgcatttgagaactagcaagacccgtccaggagtgtgcacaggagggactgtgacgatcagttcagcatcagggcctgaggcttccgggagccgagtctgtgtgtgttctgatggtatacaggatttggcttgatgagaagcagcagcagcagcaacagcagcctgatgcatgcctaggactcagttggccttccttgttatgacaggctggacagggcagtgttttccttcctgagtcccaaaagtctgacatgtggggggttattaccatggcagagtttgattgtagctctggagaagatactgctgagaaagcgctgtggatggactggctttgagtgtagcgttagccccagcccctgaacaggggagagcgccctgtgattgtgctctactacttgatggctgccatggcgatacttcacagtctgacctgttattctgaaagcaatactggtgcttggctaatatttggggagggggtttgttaaggcctttttttctaccccatgaacaagtcttctgggagttttatctgaagtggttttacgtctgactggtttgtttctacccacccacccaaccctccccactttggtgcagatgggagggggaaaagcgaattcaattttgagttttgttcagctagcacgaggatagtttacaatcatgtgctgcagagacactaggctgatgtgtggtgttgccagttttctgtttcaatgttcgcttttctttttacagtacaagcccaccaccaacagcagttgtaaggctgccctggaggaaccgaaaggccaaattccctcctcccttctactgcttctaccaactggaagcacagaaaactagaatttcatttattttgtttttaaaatatatatgttgatttcttgtaacatccaataggaatgctaacagttcacttgcagtggaagatacttggaccgagtagaggcatttaggaacttgggggctattccataattccatatgctgtttcagagtcccgcaggtaccccagctctgcttgccgaaactggaagttatttattttttaataacccttgaaagtcatgaacacatcagctagcaaaagaagtaacaagagtgattcttgctgctattactgctaaaaaaaaaaaaaaaaaaaaatcaagacttggaacgcccttttactaaacttgacaaagtttcagtaaattcttaccgtcaaactgacggattattatttataaatcaagtttgatgaggtgatcactgtctacagtggttcaacttttaagttaagggaaaaacttttactttgtagataatataaaataaaaacttaaaaaaaatttaaaaaataaaaaaagttttaaaaactgatcaagttagtgtgtgtctgtataagctacttctttgtaggatacttaatatcaaagcaggtgtgctaagggtgcattttgaatatcccggaaggtagctgtgaaatgatttttcttcttcacccttagttctggttcaaggtatctctaga

SEQ ID NO: 71501 - DNA, 1039 bp, Homo sapiens
ttctcctgtactttccagtgaccctcatcataggcccaagtgtgcaaagcttagctttgtgggtatcccttggctgcttttcattaaagaagttttcctctcaattctttcctgtcgctttgcagcaccatcagcaccaggccgcccaggctctccatctggccagtccacagcagcagtcagccatttaccacgcggggcttgcgccaactccaccctccatgacacctgcctccaacacgcagtcgccacagaatagtttcccagcagcacaacagactgtctttacgatccatccttctcacgttcagccggcgtataccaacccaccccacatggcccacgtacctcaggtaataccagctttagccaactttctgtgaaggccaagtagaatgtgaaggttatcagtaagcagctagaggctctcccagctaggaaaccctgtgtgtcatgccatttgcctgtctccctttccctctcaaatacacgtgatctggccctaagggaatgtttgtgtggttttgtcatgggatcagtgaaggtgctgattggtcagtcctttagttttccaactgagaccttaaaaatatctttgactctggaatgcaacccagtccttctttcctttctgtgtctgctttgctatgtctatatagcctcactactatatatatgtgtacatatatattcccctacacacttaccttggaagccaggcagggatgatggccttcacagagtctcagctctccgaagtgactaccggggcctgtcaacttgattgttactcacatgagttccagacacatctctccaattgttttccctggttatccatatatctgctttgaccataagttgtactcttgagagggcttggccttggacattggtgcagtgtaactagaagctggaagcacccaggtggtcccatttttctttaagagcagccctggaagcactttggagctcacctccagtgtaagctgctacaggtgaaaggtgtgcttgccatctcagtggttgctgtctgcat

SEQ ID NO: 71502 - DNA, 1065 bp, Homo sapiens
caaaaaacaaaaaactgaaagacatgaagaaatggtttttgtaccaaggtttggcccacgctgagattcacaaagaactggctttcagttcttatctttattttgatttaaactggcccatcatgttgtcctttgaagttagtctagtaaatttctttccaaagggctggggcactcagaagggagtttacttttctatatttatttcataaagcaaagatgggagatcctccattagggcttgggaaagtaaactgagtggcagaagggctcctgtgattagctgagagagactgtggtccttcggccctgatgatagatccctggccttgccacataccatacacagtgcccgcacccccatcccccaccacacccaatatagtctgtgccctcaggacattgctccagggcagtagcatggtgaggttagcctgatgatggccttgagctaaagagtgtgcacctaaaatgcacttgtttgagtagtttctgcctatgccttcaagttgcctttttgggaaaacctagtgaccgttaagagtaaatgcaaactaatttgattttaatatcatatgtagagctgtattatatgaaccaaatgctagtctgttaagcaatagctacacttattttttcaagacaatggatggtttaaatggagtcatctatagaaattggtagtggcgtgagttatgcattgtaaccatcaagaaagttcagttgatgaagtgtagaggagcgatggaggttgtcagacatcggttgtgtacatgctcctttttctttcactttagtttccacgggctcccttgctcagcagtatgcgcaccctaacgctaccctgcacccacatactccacaccctcagccttcagctacccccactggacagcagcaaagccaacatggtggaagtcatcctgcacccagtcctgttcaggtaagggcaactcagaggtctgcatggagtggcttctttatcctagtatctgagtgctttcttcaggtgccaggtatcgcatcgtcagaacacatggcatgtccaccctcgtgaagatggat

SEQ ID NO: 71503 - DNA, 1039 bp, Homo sapiens
ttatcttggacagcacaggtcccctctccccacctggcaaaaagtacagaaatagttgctccttcatggagaaagtctgggcagagctttcttctggaaatgaacttttaaggtacatttttcctatttgtagggcaatttgtaaaaataagggccggacgtggtggctcacgcctgtaatcccagtactttgggaggccgaggtgggtggattgcttgaggccaggagttcgagaacagcctggccaacatggtgaaaccctatctctaccaaagcatggtggcacgcacctgtagtcccagctacttgggaggcggaggcacaagagttccatgaaccctggaggtggaggttgcagtgagctgagattgtaccactgcactcaggcctgggcaacagagagagactctgtctcaaaataaaaaataaaaataaggctagtcttggactttggtatttaaataggaaggagtactaatatttgtagaaatcctttagaaatttgtgccattaatattgtcaccttgtatgaaatgttgtgttctagaggatattaaggattcaaattttatgttaggcacattttgagttattttggggtgactcaatgtctgactctactaaatgccatattagcatttaaaatgcatttgaccttaaatctttgttaattatgccatgacttggtatccaaaaataagctgatacatacatacatacatatatgtgtgtgtgtgtgtgtgtgtgtgtatatatatatatatgtatgtgtgtatatataatttatttggtgctaggaaatgttaaatttaatcctttaatagatgctctttaaaaaggagtcttgctgtatgtatatactattaaaggggaaactatgtctgtgattgtagtgtgtaaaagatagtaggtgattttattatgtactcaatttgaggtctcaaatgtagttatcctcaccatcttactgtctctgttagtagtttggtgttgttttcctggtaagtagctaaggtccttaatcattaacacctaagc

SEQ ID NO: 71504 - DNA, 1029 bp, Homo sapiens
aaggctggtaaggcctaactcttaatttttgtaccatataaaaaaacttttaatatggtaaagggattttcctttataatttttgcttttgtgtgatggtagggtagatagctaaggacttggggacccttttcaatatatattcgaaggttactgatgattgtaagaggttcagaggaaacagccaagaaagatttgagagtttacagctgtttctggaaatctggaaaccatggagttaaaaatcttaactaaagtctgcttggctctatttgcagtgttaatgtgctttctttattttttgtttgaacacagcatcctcatgtctatagtcctgtaatacagggtaatgctagaatgatggcaccaccaacacacgcccagcctggtttagtatcttcttcagcaactcagtacggggctcatgagcagacgcatgcgatgtatggtaggaagcactttgtttgtctcttccagtgtgtgtgactcttcttaatttaagtttctgaaaacatactctatctaagaataacctgaccttttatgacattgagggtcaagaatctgaaggaaaagatgaacccatttctttgcctgacttgctttataacttttggcaaatagtttctacttctgtacctggtcttcagatctctttcctgctttaactaaaatgtaatgatgtatataatggcaaagcatctttgtggagaaaggtacctttctcctcttcctcatcaatattatgctttggtatatcctgcctacgacatgcaagagaattttataataataaaagcataaaggtgttctccagcatgaaaacattttgcttcactacttgatctgagggtcactggcattacatattttttttgctgtttgttataatgataatactatgtttctacatcatgctgtattttaatggttgaatattatgtcatattagatatattttagacatgagtcacactttaaatataaccaatgtgaacagaatgctgaaatgaaaatgagaagtatttt

SEQ ID NO: 71505 - DNA, 1051 bp, Homo sapiens
caggcgtgcaagtaagtcatagaatttgatgttcacttagcctccccaattgtttgtatctgacaccaagcactctttaggttttcagtgacttgagggtgtgatggttatgcatatgcatttgaaacagacaggcatgcagagattcagtgtgttgttaagtatgaggacctaaatctgagaatgttttctgtgaaaaagatggtttagatttactgtagtttggggtttgttccttttagctgtgggtatgatctaattttttaatgactaatggagaatcaggaaaccttctcatgcctagctctctagcaatataaaactaagagtgacagaataccttgttattatcataggtgcctaatgttaattttttttttaattctctcaagcctttatacccaatacctatgacgcccatgccagtgaatcaagccaagacatatagagcaggtaaaggtgagaataatcctgcctgtgtttgcttgtagtttgcatgctgcatgaattgagtaactaagtttataatgaataaatagttgtagtttagctctgactttttgatgaggctatgcattggcttttgatgaacaacattacatagatattcacatggattttatgaagaaaaacaggggagaaaaaatgcccatcagttgtgattatatagtatcctcttcaaaaagagtaattggaggcctggtgtgatggctcacacctgtaattttagcactttgggaggccaaggcaggaggattgcttgagctcaggagcccaagatcagcctggacaacagagactttgtctctactaaaattcaaaaaaattagctgggcatggtggcatatgcctgtagccccagctgtttgggggactgaggcgagaggatcacttgagcccaggaagtagaggctgcagtgagctgtgattatgccactgccctccagcctgggcgacagagtgagaccccgtctcaaacataaatactggctgggcatggtggcttatgcctgtaatcccagcactttgggaggccgaggtgggtgtatca

SEQ ID NO: 71506 - DNA, 1044 bp, Homo sapiens
agaattgcttgaacccagaaggtggaggctgcagtgagccgagatcatgccactgcactccagcctgggtgacagagcgagactctgtctcaaaaataaataaataaataaataaaaggatactgttatgttaagaattgcttttaaggatatttcataagtagctactgtcttttcagctcaagtgtttgttgattggccaggcgtggtagctcatacctgtaatcccagcactttgggaggctgagtcaggcagatcacttaaggtcagcgtggccaaaatggtgaaaccccatctttactaaaaataaatattaaaaaaaattagctgggcgtggtggcagtctcctgtaatcccagctaatcaggaggctaaggcaagagaatggcttaaactcgggaggcagaggttgcagtgagccaagattgcactgctgcactccaacctgagcaacagagtgggactctgtgaaggaaaaaaaaaaagtattttttgattgcctttgagaggaacggttgtatattactcagatttttaaaaaattgttcttttatggctgtattctttaagggattaaggaatgggcaatataagtgtatatgtttcaataaaaacgattagtgatcttctagtgagaacagtttaaatctatatttagcaattttttttaaattgtcaggtatggaagattttagagcaacgtaaagtccatgtagatttcactggcctttatattttttttaggcaagttaggaaatcaacattgaatcccaatgcaaaggagttcaacccacgttccttctctcaggtaggtttattactttctttgaggttatctagtcccaaaaaaagaaaaattattagtaatagtccttcttccatacctgccatctgaattttgttttagtgtgctgaaccaaccttctttcttttttttacatggccattaatgaatactttttaaacattaaaaaaaggtctttgttttgtcatcaattagatgtgatcttgggcaaatctttgaatttctctgacccagaatt

SEQ ID NO: 71507 - DNA, 1049 bp, Homo sapiens
agactagctgacactttactgagaaacctttcttttttataggttgctttttctatagactctcttagcatttactcattttattgtgaagtgtctgatcttatttaaatgacaagtataagaggatagaaactatttcatatttttctcacccagcaggcacaatttctgacatgtggtaagcactcagtaaatattgaactttagaggctaggacatttgagtgctttggtgactgtggttgtgctatataggtactctgttattgttagtttatagtaaaagcattactcttaaagtatgaaaaaagccttattcagaacatttcatgcgtatagttaatattacgtagcttgtgctcatggcaaaaatgtattactaaagttatttaagatatttaagtataattgtttcctttatttagttacagccaagttctacttctgaatctatggatcaactactaaacaaaaatagagagggagaaaaatcaagagatttgatcaaagacaaaattgaaccaagtgctaaggattctttcattgaaaatagcagcagcaactgtaccagtggcagcagcaagccgaatagccccagcatttccccttcaatacttagtaacacggagcacaagaggggacctgaggtcacttcccaaggggttcagacttccagcccagcatgtaaacaagagaaagacgataaggaagagaagaaagacgcagctgagtgagtaaacctggaacttagaccatcctgttactcaattaacttttttttttttaaaggcatttaggtccttccaactgtgaagaatccatctggacttttagactactttatacattgcccttagtttacaaacagctagtccaaacaaatgacatcttaagtaaatgaggttattgcaccctgtgctactcttctgttcttccccttttttgtaccccagggctagaaaaacaaggcataaattaagaaaagtttttctgtaaatgaacaggagttgaaaaattatcaattcaggggacctatctttactggattcc

SEQ ID NO: 71508 - DNA, 1070 bp, Homo sapiens
attccaaaatccaaatttaatatttgaaattattttctgatcttatatcttattctaatttctatcatctcatactaaaaagaatgtgatgttaaagtttaaaaataaacctgtgtcttaacagttcttaattttacaggtatatcaccagttgtttctgaacatagaaaacagattgatgatttaaagaaatttaagaatgattttagggtaagtattgtactaactgatgaatttgagttttagaaaataagcattactaaagatttatctatttataaaaatgcgttatgtatacagtcagaaacatcaaaccatatatgtagaaagcagaacatttttaaagtggtctttgcctatcctttaagtgggataactaaaatcatgagatttggtaacaacaatatgtaggtatcaaatgagagtatagccctgacatttgaaaccaccatagcacagcttactatttgatggtcatttgtactttgttcagtgaagctagatattagtagagcaaggccaagtcattaataatctagtgtggcaaatggaagatgtactggactctggtgttctgaggtagttggagatttatactttgtacacaaatatattgtggtcaaaatctttctgtaacattatttctctgtcttagcacaggctttacttaacatctctccttgattgtcatttcattcttttgcatgttatttactataggtatcgaggtagattttgagaccaaccaataaatcttcttgaaacttagcttcttagaaaggaaaatctaaataccagccttttaaaaaaagtagctgaattaaaggatgagtgaaccaaaggcaaaggtagcctttcctcagcctgtgttttagctttctaaatgttaacaatagcttcattcttgacttattggtaacattcaaaatactacttattatttcatactttagcacatgtatctattcagctttaatgctattaacagttgttaacctaagttttcatttgttggcgggcacggtggctcacacctgtaatcctagcactttgggaggccgaggtgggca

SEQ ID NO: 71509 - DNA, 1109 bp, Homo sapiens
atagttgaaacagattgctacagttcttttaagagttgacatcttattgttgatttcttaccaccaacttcatccctccctttctttaaaaataaagggaaataataaaatttatttataaaactttgtggcattccacaaaataattctgaaagaattagtatggccaaaaaaatatgtatggtgttttttttttttctatttttaaccaaggaaaaactgtagagtgagtgagtgtgtgtgcatgtgtgtgtgaatgggtgtatttagcagaaaagtagtactgatgaatatcatggaatttatgtgatgttcactgtttcttccttagggcctccaaggatgtccccaaaggcccagcgacatcctcgaaatcacagagtttctgctgggaggggttccatatccagtggcctagaatttgtatcccacaacccacccagtgaagcagctactcctccagtagcaaggaccagtccctcggggggaacgtggtcatcagtggtcagtgggggtaggtaacacttgggcataatgatggtactcattttgtcattacactagatataaagagggctgagctacaactctgtttgaggaagtgtaagtatgtatatgttaaaaatagtagaatcaccaggaattgggaaacccatatttttattctgggctctaccacttattcatcatatattaaagcaagtcagacactcattctgaagttgagatttcgcagtgagtaaagtgttaataattcttgcctagtctacattatgggattgtgatgagattcctataaggttcataaatacagatatattgtaaaactataaagttttgtaaagtacctctctaatatgaggcaaacacagtatgtaacactatttggagggaccgtatttccttatctttttagcagctttgtttatcagtacattctataaacatttatttttggcttacattgtagtgtgtttctatagcatctgtatatggcactaattcccaactatatttccataataaggaatatcaaatacaaataaagggtccaagttttatttgtgattagcataaggaatatgctgacagcagctataaaagtataa

SEQ ID NO: 71510 - DNA, 1018 bp, Homo sapiens
tatcatttgatactcacaggagtcacaaactctagaagagtaatgttttatttctacttaaatgggacttgcttaataagattccaaactgagttctgggttcaagtgtaaacctgatgaaaatcatagataattgtaaggaaccagcatttctaattggatataatagctactgcttattttcgttatgcctcagagttaaaactaatacagtaaataatcttactcctgagtaggaattattgtgatttattatgtgaaattatctagtgtatgttatattcctttaaacaaccagttactgagaaacagttatagaagcaggattaataggcaaagtcttaactgtcttcttcaatagtgtgtatagatcctaattaaccctttgggaacgtgtattcatttaaacagacttaatcttaaggaggttaaagtaaaatgtgaatttatgtcagttaagttatgctaaaacttatcacaaatcaaatgactgtcctcaaagggttaaaatgtacaagaaatcatttttgtcattttactttttttctgtttacttttttccctcatttttttctttagtttttatactttccttcatatcatttgttctgtcaggtgttccctggccatcgccttgcccatctccttcctctcgcccaccttctcgctaccagtcaggtcccaactctcttccacctcgggcagccacccctacacggccgccctccaggcccccctcgcggccatccagacccccgtctcacccctctgctcatggttctccagctcctgtctctactatgcctaaacgcatgtcttcagaaggtacaataccacaatttgttcatgtttttgtttgtctttgtttaactcctatgtgagtttataattacaaaatagtttcctcttcattatttaataacctataatttctgtgttttaactttagtttattaaaactatttctattaaccttttgttcattagagagaaatttgataaatgtgtgaagctataa

SEQ ID NO: 71511 - DNA, 2512 bp, Homo sapiens
tttacaggttagagaaaagagagaaccctgatctgaaggctattttatgaagtaattaaaatgttctaaactttaaaaataactgctcaaataattgtgttgtatagttacttatcaactggaggggctgataagtatttttctaaaacatttttaaggaaattttttcctattttctaatttgctaattttgctcaagtagtttgttagatattgttaatatagatgttggttataactgaatgaaagggaacaactactttgacattttgaaaaacaagcttcattttcttctagtctaatggatgggatcccaatgatatgtttcgatataatgaagaaaattatggtgtagtgtctacgtatgatagcagtttatcttcgtatacgtaagtttgaaaagtttgtttttattttagtgcatttgtctttgattttcatcagcttaatttatgatgaataaatgtttgttagtttttaagttaaacaattacatgaaataatttttctcttattaccaactgtgataaatttccattaaaaaaagggaataaatgtagtttgcctataccctgtttttatgctctaaacaaattttggttttgtctttttttttcttttgagagggaatctcgctgtgtctccaggctggagtgcagtggtgcaatctcggctcactgcaacctctgcatcccgggttcaagcgattctcctgcctcagcctcccgagtagctgggactataggcgcgtgctaccatgcccatctaatttctgtatttttagtagagacggggtttcaccatgttggccaggatagtctcgatctcttcacctcgtgatccacctgcctcggcctcccaaagtgctgggattacaggtgtgagccactgtgcctggccggttttgtcttctaagttgttaaaaaatatctaaatttgcaagggcagagattatggtgaacagtttaaccagtttttgaaatatgttcctctggagaaaaggtaacagaaaaaaaagttagaattttgatttataaatacacagatcactataacttttagttttagttttagttttagtttctgtttttaccagtattctaaactctaaactttcttagtagttgattatgacagatacataaactgtggctttaaaggactcattttgcttttcttttcctcatgtttcagagtgcccttagaaagagataactcagaagaatttttaaaacgggaagcaagggcaaaccagttagcagaagaaattgagtcaagtgcccagtacaaagctcgagtggccctggaaaatgatgataggagtgaggaagaaaaatacacagcagttcagagaaattccagtgaacgtgaggggcacagcataaacactaggtatttaaaggaaatcatgatgcagtattttggatacacaactcaaggtctgtgtgagacggtgtattgttattatatttcctcttcctttaatatagcttaggtagagaatgcaagtagaattggtttaagatctgttagagaaaaggttatggtgatcttggaaaatatgcttttgagagtaagctctgtggagccaagtgttggtatatcacggtgagcaatccaagatcttgaagagcttgttaaaatagttatctggtgggggacacgtgtaacaatcacagcagtacaatatgatttgcttggttaaaggcatgttcaaagtactaggaacatacagaatgaggaggagctagcataacctgtagagtcagagaaaacctcattgaggaggtgacattttgtgataagataatagggtctttgacacttagagaagagttgggagaagagtttatcacctgatgaaaagccatgtacaagcatggctatgagaaaatttggccagctcaggagagggctggttgttgcatgtgtctggaacacaggatctgtgtcaggtgcagcagtggcagttgatagtaggaactgaggtcattaaaggacttggcatgtcatgctaaagagcaccctgttggaaggagatggggtgaataaaccctggggcattgaggactggctgagacacagagaacagttagtgcactgaaatagttcaactgtgagaatttggtaaccacctagttaagggatgagcctgaggtttatttgataactaagtgacttaatggatgtactggtaagagagagaggaaacatggagcaagtttgaggggaaaaacagtgactccgtttgtgcagctaattgcatatgtgggcttgtgggtctttcatttattcataaacgtgttgagaaatacctgctacctatctagtaaagtaagagatgcatcctctcttaaaggcagtcagcttagagtctggtgatttgaattgacatgtccactgatagatgttgacactgtgagactggcggttcagtttgaggtttcatcagcattgccgatattggagccatgaaaaaccaaagaacagccagtgagagaagagatctcag

SEQ ID NO: 71512 - DNA, 1077 bp, Homo sapiens
aggttgcagtgagccgagatcacgccactgcattccagcctgggcaacagaacgagactctatctcaaaaaaaaaaaaaaaatgcttcgtgtggcttaaaattatatgaaaagaaaatacctttactgatagtcatctgtgattccatttgctaaattaaacgtgaaagcatacttttactgaatactatatattccgtatcagtttagatagcagtttatcttcacatacataagttttaagtttacctttattatagtgcattggtcttttgttttcatcaacctaaattatgttcaataaatgtttctgttagattttaagttaaacaattatgtgaaattcatttttcgtaattgttttttaacatatgtctttgttggtaattcacgtgtgtgagtgtaactgattgccagattatataaactttcaaccaaaaccattctttgcagatgcttttactgactctgctatcagtgctaaagtgaatggcgaacacaaagagaaggacctggagccctgggatgcaggtgaactcacagccaatgaggaacttgaggctttggaaaatgacgtagtaagtaacatctttgtaattattgctagactctggtcagtatgacatcctgtcacttggttgtaatttaaatgtgcttttgttgttgttgttattgtagtgagtgtatttagagcagcaggtttgttgtataactagagactttctcccaagcaatatataaagaaaaatgtttgtcattttacttgtaggggttaagcaggagtactgtctgttcttgtggatgctcatgaattacttctttgtgattaaaataaataataagaagtagcttaaattaaaattagaaaccatgggaaatgccggtgtgttttgctttaacacccagccaaataaggtagcctaaggaaagtggtgtcttaattgttgacttcacctagagaagaggttgaagtaggacattttaagcctcttgtctgaagaaaaggttgtcattaagataaataattaggttacattggaattaaagcattacataaatttcttggtcttaaatttgg

SEQ ID NO: 71513 - DNA, 1036 bp, Homo sapiens
tgacagggtcttaccatgttgcccaggttggtctcaaactcctgagctcaagtgatctgcccgccttcgcctcccaaagtgtctgcgccctacaatttaaaaaaatttttgtagagacagtctcactgttacccgggctggttttgaacttctgccctcaagtactcctcttgccttggcctcccaaagtattgaaattaaggccatgaggcagcacacccagcctaaattcttcttatgttctgttcttggcacatagtagatgttcaacaatgtagagtcaaacgcatttggagttggaatggctctggtgttttttttttttttttaaaccagaaacacgtgcagtttattgaatgccattgtagaaaagtgtgtgaggataaacggctgatagagaacttggctctgggggcagggcgaggaatggagggtggatggagtacatgggaatcagatcacgggcagagctcctggcctagataatgcctcctgatctgttgatagacttgaaagatcaacactgggatgatgctgagcagaatggtcgtaatgatgcgcacaatcagggcccagatgttcaggcacttggcggtaaaggcataggcctgggccctgatcaggtcgccaaccatcttcttgtccctagacttcacggagtaggccaatgctatgaagcccaggcagcaggagttcatgaagtgggtgttgaacagggaccagacgacatggtcgggcacggagttctcgctgtggatggggatcacggtggacattgggggagcagggttgtggggtgcccccagcacagccacctcttgctcctccttgagcatctcatagttagggggatggccgatgttggcaggagtgaagaggtttggacattgtggttcatggtgtccagggaagaccagctgtggtcgggttgctggggtggttctcagtgggcccctccctttccctggtagtttggatttctctggctctggtggttttttagtactcattctatttacgggtgaagaaattgaga

SEQ ID NO: 71514 - DNA, 1005 bp, Homo sapiens
cgcagcctaccctgtctcttaaaaaacagtaacaacaacaacaacaacaaaaaatcctaaatcttaaaaatggaaggcaaaaactctaagctttgagagattaggggacttgcccaaagcaatatttgtaggattttattacacctctccctttatttatttttttagagtcaaggtctccctctgtcacccaggctggagtgcagcctcaatctatggggccaagcatttctcctgtcttagcctcctgagtagctggaactacaggtgtacaccagctggctaacatttaaattttttgtagagacagggtcctgccatgttgcccagattggtctcaaactcctgggctcaagtgatcctcctgcctcagcttcccaaagtgctgagattacaggtgtgagccactgcaccgagccccctccctttatttttatttttaaattttaagttctggggcccctcccttgaaataaatagaaacgtaatatatacacaagatcatgctgtgtattttaaggcaatggtcctcaacctttttaacactagggaccggttttgtggaagatggtttttccataggggcaggggatgattttgagatgaaactgttccaccggccgggcacggtggctcacgcctgtaatcccagcactttgggaggccgaggcgggcagatcacgaggtcaggagatcgagaccatcctggctaacatggtgaaacccccctctactaaaaatacaaaaaaattagctgggcgcggtggagggcgcctgtagtcacagctactccggaggccgaggcaagagaatggcatgaaacccgggaggcagagcttgcagtgagctgagatagcaccactgtacttcagcctgggggacaaagtgagactccgtctaaaaaaaaaaaaattgttccacctcagatcattatgcatttgttagattctcataaagagcatacaacctacatctcttgctatatgcagttcccagtagggtttg

SEQ ID NO: 71515 - DNA, 1029 bp, Homo sapiens
tcggcctcccaaagtgctgggattgcaggcgtgagccactgcgcccggctgtaaggtttttacttaaccattctattgttgggaattgggtttccacttttttgttatagatagtggtgcagtgaacatttttaaatagctttttgcttcagtgtaattatttccttagagaaagttaccaagagtggttttactagttcagagggcttcaggatttttatggctcttgctagcggtgctctattattctttagaagacttgtattacttccagtgtcaagaaggttgctcttccatggaatggtttctttgtagtttgtcaaatattgtggggaatttttaaaggaaaaattgcatttttactgtcaagtgcatatattattaagtgcttttgttagttactggattattgatatttgagtttaatttggttcctctgaggatttaataaggtaatatatgtgaagatgttttgaaacctgtaaccattattattaatgagggtacttggtttatctgtcgtgctgatagtactgagtaaagtgcaggaatgaaattcctgaggaactgttctaaagctttgttgttgttgttaacctttctttttcatctgaaagtgttttttattagctgctagcctatgaccaagttatttttggtaacttttttgtaatttcatggcactattgggaattttcgctggttgactcttcttcttctacattcccttccccattaaaaataaaaatatggatttacaattgttactctattcctaaacctaaataatatgacattagaattgcttgggatacaggattcagtctgaataaaatatttttcttttagtgattttcagcttagtatttttactgcttctttctcttgaggcattgcaacttaaaaattgtgctgtttagccaggcgcctgtaatcccagctacttgggaggctgaggcaggagcatcacttgagcccaggaggcggaggttgcagtcagctgagattgtgccactgcactccagcctg

SEQ ID NO: 71516 - DNA, 1083 bp, Homo sapiens
ttccctttttcgttggcatctagcgaaaaatgaaaaaatttaaaatacaacttttatagaaaaggatgtattctgtttttactttcttaggtattaggaagagatttggcagataattcaacatgttcaaatatataaacattaaaactaaggttattaagttgcattgactactaggcttaaaaattagattataagagaatttgctcctgagtagtttgagtgatcaaagatatttggaatgttttagtaccacaaggtcttttttctgttccttgaggctttacaacaatttaaggttaatttagatttttccttgctttaagttcttttacttgagacctaaatggcagcccttattctttctgatgaataggtgaaattttgtttactgtgttggatttgtgtaatgtgaagttttattcttgaacagatcgttaatgtacttgtagaattactttgaatttgaatcactttcctgcattccttgtaaataagtttcagcttctagaatctcctcacttaggtttgtgcgtatcaacagtgaaaataagtctctgagagcaagggtgaaaaaaaatgcagcattcggtttgacaagtttcgagatagcaaaatatgcttgaaagtctggaaattcacatctgctttaagaaacatttcataatttgactttgtgtgtgtgtgtgtgaatagtttttcatgactttcagaagtgatttattttgttctttgttatatatatttttgaaggtggctgttttaggaaagataatgtaatcacaatattagaacataattttactgtaatctaattttgtgtgtgtgtgtgtgtgtgtgtgtgtgtgtgtgtgtgtgttttggatggaatctcactctgtcgcccaggctggagtgcagtggcctgatctcagcttactgcagtctctgtctcctgggttcatttaagtgattctccagcctcagcctccccagtagctgggattacaggttcgtgctaccacacctggctaatttttttgtatttttagtgaggacgggattttgccatgttggccaggctggtctcgaactcctgacctc

SEQ ID NO: 71517 - DNA, 1095 bp, Homo sapiens
agtactttggaaggccgagacaggtggatcacctgaggttgggagttcaagaccagcctggccaacatgccgaaccccaatatctactcaaaatacaaaaattagccaggcatagtggcaggtgcctgtaatcccagctacttgggaggctgaggcaggagaatcgcttgaacccaggaggtggaggttgcagtgagctgagatcgtgccattgcattccagcctgggcaacaagagcgaaactccgtctcaaaaaaaaatacacttgtgttaagtagagcaaaattcttgctttgcatagctgattgcgatggcagaaaaccattctccctcacgatgggagaaaggggtctgtcctaaagggattctgaggtcatggtttctctgttcaatcccagagcagaaaggggactgtgtcagcaaatgaaaaatgtgcttttgtcttcctttgtttttcaaaaggtgcactcagctaaacacaaaagtggccaaactcaccaacgagctcaaagaggagcaggaaatgaacaagtgtttgcgagccaaccaagtcctcctgcagaacaagctaaaagaggaggagagggtgctgaaggagacctgtgaccaaaaagatctgcagatcaccgagatccaggagcagctgcgtgacgtcatgttctacctggagacacagcagaagatcaaccatctgcctgccgagacccggcaggaaatccaggagggacagatcaacatcgccatggcctcggcctcgagccctgcctcttcggggggcagtgggaagttgccctccaggaagggccgcagcaagaggggcaagtgaccttcagagcaacagacatccctgagactgttctccctgacactgtgagagtgtgctgggaccttcagctaaatgtgagggtgggccctaataagtacaagtgaggatcaagccacagttgtttggctctttcatttgctagtgtgtgatgtagtgaatgtaaagggtgctgactggagagctgatagaaaggcgctgcgttcgaaaaggtcttaagagttcactaacctcacattctaatgaccattttgccttcctgcttggtagaa

SEQ ID NO: 71518 - DNA, 1113 bp, Homo sapiens
ggagttaagagagtaactgcttacagttttaaacagacaataactatttgcttctctctcttttttttttttttgagacggagtttcgctcttgttgcccaggctggagtgcaatggtgtgatcttggctcaccgcaacctctgcctcctgggttcaagtgattctacctcagcctcctgagtagctaggattacaggcatacgccaccatgcctggctaattttgtatttttagtagagacggggtttcttcatgttggtcaggttggtcttgaactcctgacctcaggtgatccgcctgccttcgcctcccgaagtgctgggattacaggtgtgagccaccatgcccggctttgcttccctcttaatgtgttaatagttgtctctaaaaatatatgcaattcttaaaaaggtaccatttctgatttattatctgtaacctttggaaactaatcacatgaaactacaaaattagcaaatgtcttgaaatctgtatataaaacataaattacctctaattttgaaccctaacttattagtgtacagctcaatatttaaacaaaaaatgaaagagaaaaaaaaagtggctccaaaaatagtcttataccattctttaaaaaaggaaactgttccttttaagtttacacccaccccacaccccaatttcaaaacatcgtttaattgtcttggtcattgacatttccaacataagattttatatttcgctcccatagcttctggttatcaaaaaacccatgctttcttttattgaaggagtttggtccagctgatgttggtgtatcccttccaatattcttcatcttcatctttgcttctggagatttcctctggttcactatcttcatcttcattaaaagctgctgctcctgaaaaagtgcttggagcaagagttggaacagtttcttttggcttatttgatccaagtttgatggatattgttgatgctttctttgtcatccaactaaggcaaatccaaacttggagatcactgtaggctttgttgggaggtctgcagcttcttcttcatctgaccgtttctcaatgctgcgactggaactttcccctccattactggaagaaacagttttagtt

SEQ ID NO: 71519 - DNA, 1119 bp, Homo sapiens
taattaactaacattcattcaagaaatacttggccgggcgcggtggctcacgcctgtaatcctcacactttgggaggccgaggcgggcgggtcacctgaggttgagagttcaagaccagcctggccaacatggtgaaaccctgtctgtactaaaaatacaaaaattagctgggcgtggtgacaggtgcctgtaatcccagctactggggaggctgaggcaggagaatcgcttgaacccgggaggtggaggttgcggtgagccaagattgtggcactgcactccagcctgggcgacaagagataaagtccatttcaaaaaaaaaaacaaaaaaaaaacttatgctcatatctgctggagccttccttgtgtgctgaatcagacagcgtctctgttttaatggcaccagcagtatcatggaggaaacagatgaattaaataagtgcagaatatgtgtagaattacaactgtggtaagtgctgtgaaggaaaggagaaacaatttgggaaagtattacaagaagatgtgtttggtttggagagagggatgggggcaggtagggatggtgtcattgggaacttcctgaggacgtgacctttgaagctgcaaattaaagattgaatatgactttatagcttatgagcacctttccaaaggctaaaagtggcttctgagttctgagagtcagctaaattgatattagccgcatatagacatctgcatgggtcagtcatgtagtcatttattcatcaaacatttagagggcttcctctgtgtgctcggcactgtggtataagggctgggaatacagtggtgggcaaaacaggccttgtccctgccctgacagagcatgtattagggatatttcagttaagtctccaaattccgtttcccttttcatgtgtttcattgatttaagacagtaatcacagatgttcatggcttggttcatggcatgagcataagccaggatgtttaagactacccctacaagtttttgaaattttgtttttttaatggacttgatagcttcattttgggctgaacacaatttcattttatcaggtgttactaaaatgttagctcatctgggcatgatcactgttgcatcttctctaagg

SEQ ID NO: 71520 - DNA, 1142 bp, Homo sapiens
gtggggattacaggcatgaaccattgctctcagccctggacttcttacctgggggctcagggctccaaaatagtgtgtttcaagagacagagggctgggcagaagctgtatcacgttttctgacctagtctagtttcaggaatccctcagcatcacttccacgtgtcttatatctgttagaagcaagatgcttcactgggccaagcattagactctaccttttgtgggaggagtgtcaaaggatttacagatctgttttaaaaccatcacagggagggagtaattcccggaacccagagaggctagctctctggggaaggctgcagagaaggagctggggaaataaataaccaggccctttcccatctcctgcttttgattggctgagtccagctggaagccagagggcaagggagcctttggagcacacagcccagggagctcaggcacccgggcacagaggggatgggagggtggggagccaagcctaaagggcaaacagaccacgcagaatccaccctagccggcagttttcttagtgctgtctctattcctcctgcgacttttcaggctcgacaacctggtgtttcatccagaagagccagaggtgcttgctgtccttgactgggaactttctaccttgggcgacccccttgctgatgtggcctacagctgcctggctcattacctgccatccagttttcccgtgctgagaggtaggaactgctgctggaggatagtgggggagcaagccagttctccaagcatttgggagcaaactcagctgaagtagtccgtgattgggcgggggaagtgaaagtgaggtcctggtggttctggtgggaaacataactagaatgcagtcctgtcacatttacgggaaagtggatataggatgtgttttaagtgaaaagtatgcctgtataggtaccgcttatgcttttacacagctaacttctatttagggttttaaattaaaaacacattcattgtggctgggtgtggtgtctcatgcctgtaatcccagcacgttgggaggccaaggcgggtggatcacaaggtcaggagttccagaccagcctggccaacatggtgaaccctgtctctactaaaaatacaaaattagctggacgtggtggcgt

SEQ ID NO: 71521 - DNA, 1046 bp, Homo sapiens
ggcggtggcctagagacccaggacctgggcgcctgggaaaatggaatgcaacccacattgtaaagccactggcatctgattatctccatttgaacacacagcacagaacaatcatttaaatgttattttggaaaggggttttggggacacagaagaataagtaaacacatctcggaggctttgtggactttctgtgtcatacaaagagaatcgagtggagaggttcccttcagcgccttcatgcctcctcctgcctgtgtttcctcgaggtccaggccatcatctcagccccatacatgctgggagcacagaggccacgggtccgataagtcccgagttggctgccttccctcactatgtagcccggggctctgtgctcatacatactttacccaggagctggcatgtgaggcccctgcagcctccacctgctccatagtcagaatatctgggcgaaggggaggtggtggcccattcgccattacactttggagcacaatctctcttctctgaggagagtggaaatgcttactcacttgcagtctgagctccttgagaaacccagcgacatgcagaggtgagccaggggcagtgaggccccagcctgctcgtctcataactcgtggtggggtagccaaaactcgtctcaggttagaccagacgggcaggaaccatcccccccggctgccaccttgcagaggtgaccctgtgggaactgccttccctgagaatggccagccaggatcagcaccatgaggggcccgtgaatgggctcctcagacccacatgcccaggggtctggggaggcaggtcccccttcaccacacttgagaaactgcttgttgctcaaggaagttaaaccccaaacaaatgcctgtcacaatgacagccacactggccaggagcccactgctaagctggcaggagcgcagcagctgagtgctccctcaggctccgggaggagaggttttcttcaaaaaaaaggaagtggtcgtggcctggcctgtctcatgggcctaagaatgtctttcgtggcctctgaggtt

SEQ ID NO: 71522 - DNA, 1125 bp, Homo sapiens
ccgtgcctgcccccaaccagcagcccgaggtcttctgcaaccaggtgagcccaccggccgggctcgcgctttgttttccggcccgagtcccccgcaggcccctaggaaggccccgcgccgccgtgggccttagtgtactcatctggggctcgaggggtttgcagaggctgacctggaagcacatctgccccctcctctcctgcaagcattttagccccttcgccgcctctgacagtccccgtcccatttccccgtgacttgggccccctctccgtcttcgcccagcctcggtctgttttccagggccaactctcggggttccgttctccccatggtccttgctttcgggtctccgcagggtccccaccctcacccactcagaagacgcgaccaagtccctctttgcaggaactttcctgtcttttccttagtcatcccctttaccccctgactcatgccctcatccaaggagttcaaaaggaaaaaccaggaaagaggtgatttgcagccacgttctccagttcaccatgggcgaggccacgctcggctgcttccattgctgggagtagggaatcctggaggaccttcggccccagggggccgaccccaaggggtgtctgcggcttccaacgccggcttcgaccaaaccaaggaggagctttccaggataaaactgattcctgtggtccatttattgattgctcaatcagtaatactttggaatattttttgttttgatctttgagtttggttaaagttctagacttcacagaggctgaaattggttatgaaagagtttgttttgtttgtgccagtgcatgttggctgccttctctgacttaagctttttctcctataaatggaaaggcgctctgagggttaggttcacacaggccctcatcaaccagtcacttcatagttaatcacagctcctgtcctgtctgcacagcctttgtgcagcactgttctaagcgtctacctgttttgcaatttaaggtaatttttacaacagcctcagtaggaagggactgtaattctccattttacagatgaagagactgagtcacaaagaggtttagtgactcacctaaagaccaaagtcagtggcatagttggggttcacag

SEQ ID NO: 71523 - DNA, 1004 bp, Homo sapiens
gaggtggatgactattggccccagctgtcctcacactgtagccacacaagggaactctgcccagatgagcccaaccaggggactctactgtgggagataagaaatcattttaagccaccaagttttagggtgctttgttacacagcaatggataactagaacaagtatgaacattctcttcattttttaaagaaaccaaggcactgagaagtcaagtgacttacccaaggtcacttggcagagtgagcattctggcctagattgtctgcaaggcctgtgcttttcatttgtaggctacaccactctgaaattaattcatatttgctttttcttgtttttttttttccttacaatactggtagtcagtattaggttgacagctggtcctgagaacttctttccttctcattgtagattttcataaacaatgaatggcacgatgccgtcagcaggaaaacattccccaccgtcaatccgtccactggagaggtcatctgtcaggtagctgaaggggacaaggtgagaactggtgacttaccttgggggagggatggattcgtcttctattttatacgtttttgtgtggtgaaagctttaccatatatgtgtattactttcacaagtaacagataccagtgaaaaattccgagtaaattaatcaatagaaacttgtctgcagacaacggtgttaattcacttagtgtagaactatagacttagaagtgaattcggcaaatatctaatacagtgtctcctttccagacctggaagttgaaggtcagagatggaaaccttgctgggtagaatttgggtctcctaagatctagctcctgtggaggtttgaattgtacagactgtaggaaccaatcgaaactgataatattctgtttaaaatttttaaattagactcttagtaaaaatattttgtgtttttggccgggcgcagtggcgcaggcctgtaatcccagcactttgggaggctgaggtgggaggatcacttgaac

SEQ ID NO: 71524 - DNA, 1108 bp, Homo sapiens
ggccaaggtgggcagatcatgaggtcaggagtttgagaccagcctgaccaacatggtgaaaccccgtctctactaaaaatacagaaattagccaggtgtggtggcatctcttgagtaatcccagctactcaagaggctgaggtaggataattgcttgaacccgggaggcggaggttgcaatgagccgagattgcgccactatactccagcctgggcgacagagcgagatttcgtctcaaaaaaaaaacaaaaaaaaagaaaatacagaaattatccggattctcattcccaccaggacttcatgaaaggaggggaaggtcatgttattcaaccccattgctgaagtctggtgctcatcagggctctgccgggctaggagcattgtttacggggcaggttttctgtgcagcgatatgctgatgaccttctggatgtgtttgtattcggacctggttattactgagaagacctgagttttccaggaaggcttgagttttcctgtgttttctaggaagatgtggacaaggcagtgaaggccgcccgggccgccttccagctgggctcaccttggcgccgcatggacgcatcacacaggggccggctgctgaaccgcctggccgatctgatcgagcgggaccggacctacctggcggtgagtcctcagcccttctccccctcagatcccatgtggtgaataggctcgcagcatcctgtgaacagccaggaaccaagcatcctgtgaacagccagggaacacacatctgacacgggactgatgggaatggcataggatggacacctttagggggcacctctgtactaaccagaggagcctttcagtgtctcctttgtttttttgttttgttttgttttgcttttttgagatggagtctcactctgtcgcctaggctggagtgcagtggcgacatctcggctcactgcaacctccacctcctgggttcaagtgattctcctgcctcagcctcccaagtagctggaattacaggcacaagccaccacgcacagctaatttgtgtatttttagtagagacaaggtttcaccatgttggccaggctggtctccaacccttgggctcaagtaatccac

SEQ ID NO: 71525 - DNA, 1032 bp, Homo sapiens
tgttgtggctccagccgatcctgtcgcccccccagtgcccaatggcgttggttgctgtccctcgggcctcaggataagacgccagcgcagggcctgcatggcctggccttggcctgtccccagcctctccctggctgctctctgcatcatcaggctaggccacgcccctgctatctgactcatccacttgccgccatcacgccctttgtcctggttggcagtgggctccgagagcacccctcatctccctgtatctgtctctggcacccagcaggcatcaacccttacagtggtgggaacaggctccattgggcaggcggccaccagggccagggtcctcctcctcactgtcacctttctgtctcctgcccacttcccgcagtggattgggccgtggaacaggcccacttcgccctgttcttcaaccagggccagtgctgctgtgccggctcccggaccttcgtgcaggaggacatctatgatgagtttgtggagcggagcgttgcccgggccaagtctcgggtggtcgggaacccctttgatagcaagaccgagcaggggccgcaggtgagccaggcagtgccgcagggtctgggtgtctagagccagcatgagaagcagagagggcatcgggctcagatcagttgggactgggttcaggtctcagctctaccacacagcagctgtgtgcctttgggaagctatgttccctccctcagccttcatttccccatcccgagccgtgccctgcctcattcacagggtggctgtgatgtagaaattaatcctgggaagcactttgtaaattgcatatatgtaacaaataccaggagtgtctgcaaaagggagtgtgtgtttccaagaccttggtcatcagtagaagtgtatccaccagaagatacacagctctgtgaaccttcgtgtctgagagccatggtatggctagtatagggactttatttcacttcatgttttgagctgtttgattttatttatttatttatttacctatttatattttagagacaaggt

SEQ ID NO: 71526 - DNA, 1115 bp, Homo sapiens
tgagaccccatctcaaaaacaaaaatacaaaaaaaaaaaaatactccctagtgaatatccttgttcatttctctttgtgcatatgtagaataaattcctagaagttaaatagctgggccaaaggatctgagtatataatttttgagcaatattaataaaccacttgctctaaaggctgtaccagtctgtcatccttctaacagtatatgtaacggtctcttgctatcagtgtattttcttcctaaactttttggtaatcttatagttgaaaagtaaagattgatttgatgtccttttctccggtaggctgaggaagttgggccttttttgtgttttctgctattggccctgtgtgtttcctcttctgatcttgctttcttatgaccttggtccatttcccagttgtcttgttgcctgcataattctaagcctgaagcctaggagaggtctgaatccgatgtctccataactctgggttccttctcccacaggtggatgaaactcagtttaagaagatcctcggctacatcaacacggggaagcaagagggggcgaagctgctgtgtggtgggggcattgctgctgaccgtggttacttcatccagcccactgtgtttggagatgtgcaggatggcatgaccatcgccaaggaggaggtgagcacttggggccagtgctctggaaacattcttggcgggaggtgaggtaaacagttcagcctggcatcctgatgctgtcacccatctgctggcttggggccagatctcaagttatacccagaaccagtgcccataacacgctattcatagtatgtatctgatcttgtccctcctcttcagcttgtaccctctgtctgggagatcgtctgcattcctcagcatggcctgcaggccttggtgtcctggccctcagagccaggagtctaggaatgacattgtctgctccttcccatgaccttttttctttcagtcagattcttgctctgttgcccaggctggagtgcagtggcataatcatggctccttatagccttgaactcttgggctcaaatgatcctcccacctcagccttctgagtagctgggactacaggtgctcaccaccatgcctggctaa

SEQ ID NO: 71527 - DNA, 1071 bp, Homo sapiens
tgggcaacatagtgagaccccatctctacaaaaaataaaagataaaaaaattagccaggcatagtggcacatacttgttatcttaactacttgggaggctgaggcaggaggatcactgaagaccaggagttggagaccagcctgggtaacataatcagaccctgtctcttaaaaaaaaatttattgccaggcgtggttgcacgtgctggtagtccagctactcaggaagctgaggcaggagaatctcttgaaccccagatgtggaggttgcaacgagccaagatcatgccatggcaactccagcctgggcaacagagaaagattctatctcaaaaaaaaaaatttttttttaagttaaaaataaaataaagactttggggcaatacagggggtcctgggagtgtaacccataacccccaagagtgatttctgcaatctcgtttcaaattacagggtcaactgctatgatgtgtttggagcccagtcaccctttggtggctacaagatgtcggggagtggccgggagttgggcgagtacgggctgcaggcatacactgaagtgaaaactgtgagtgtgggacctgctgggggctcagggcctgttggggcttgagggtctgctggtggctcggagcctgctgggggattggggtctgttgggggctcggggcctgccagaggttcaggacctgccggggactcagggcctgctggaagttcaggacctgctggggatcagggcctgccagggatttagggtctgctgggcgggccaccttttggcctctccctcatgcttgaggccatcagtgtttcctactaatttcccattttaagcctgagaagtgacaagagagggtaaagacccagcctctgctctgtcccatgagaaatactgagggacgtgcccccatcaggcctatgcggtcatttgctgggcttcgttatacgccaaggcctgtaggcctgagaagagggagagacttcagggggcggagcggagaggaaaagcttctagtaagaatcttttcagattttcaccaggcgcggtggcttttcaccgggcacggt

SEQ ID NO: 71528 - DNA, 1215 bp, Homo sapiens
cctcatccccaccggtcccgaggggcggctgctgcccgtcgccacgaggcccaggggcccgagtgccgagccctttgctccctcggccgcgcggggacagggctgctgagcagcctccgcctctcccggctgtgggggccccactgagtatgtcggaggagagcgacatggacaaagccatcaaggtaagggggaggtgccccctcttcccccgcgttgtcctgtggcgttcttctcggctctagcctcaaaaagcagggagattttgcagtgagaggttccatcgactaccgggtttcggcctcccccggattccgtggatcgcgctttacagccctggggccaagggttatgggtgtgggtgtaggtgtgtgtccgactcccgccagcttccctggtgagtgtgatttgtgctcagctggaacagaggtgagtggcctggagacactattaagtgtcaatgaatgggacgaagagagccctactactactactacacgtttcgatcactccccaaggccgccagcatttgcttccggatggtctacagaacttggagagttggaatttatccatccctcccgatttgtttgaaatcagccttctggaaatctgcagttggaaaaaggtggttcgccgtacaaaacctgtcctttggggaataggttgtcctcacttttccgtgtattctcccctttttctttttcctcttctttctcctaggaagcattgagtttacttaggaaaagttaacagttcctgtgacttaactgcacttaaaccaaaagaaaagcaaatgtgtgttcgaaaattacacaaataaaataagttttctaaaacctgtttttaactttttttttttttaaaggcacattttgcccactcagggccagttatctgtcttgacagctgtagctaagaaattagtcttatgaaaattaaacattgacgcttaaagtttgatgtattatttacttatttgtagtgttaagtcagcccagtgcattgaataatttcattttatcttgaaggacaggcatctattggcagcttggggttattttccccttcaagacagttactagtaatgattaagaatttacatttctaccaattctttaggtggtgtatatagtttctcaaaatcatcaagtcattccaaagaaacttaaccctttaaaggaggcatcaacatataacatatacattaaggaa

SEQ ID NO: 71529 - DNA, 2357 bp, Homo sapiens
taattttcgtagtttttagtagacacggggtttcaccatgttggccaggatggtcttgataccttgacctcatgatctgcctgccttggcctcctaaagtgctgggattacaggtgtgagcccggccgagaccctgtctcttataataaataagtgagtgaatgaattaattaattaaattcttttttatctaaaagcatatggcaacagaggctaacatgcaatagttagccaagaattccattacaactttcattaaactgtagaggctctatcctaaactgttgaaagttatttatatcagaaatatacttacataatgaaattgacagaatatatctgtacacaaaatggtggtgttggaaattagatgtttactatgatattgattagttactattttttttgaacttttaagtctcagtttattcagttattccaataatgtaatcaacttgttcagggatataggcctctacagcttggcagcatatatctgactagtctttctagaatctcataaaatatacttgaccattgtagcaaagaggcatttagtaattgatgcattttgaaagagtatcttcctctcagaaccccccaaaagcattgattgtctatggaaatgtaccttatagatgagctgaataatttccttttatcgtgaagtctttgctttcttgttggaaaattgggaaacaatgtctgagtcattgtcatttagacaaaatgtcataaagccctgtagaacacaaagttctgcttatcagattctcttagaagatgagctgttgagtgacaggtcttctgttgtcccatctctgcttattcagtttgttaactgaggaatcattctctgtcctctccctttttttatattaataggaaacttccattttagaagaatacagtatcaattggactcagaagctgggagctggaattagtggtccagttaggtaagagatccatatgagaaactatggcaaattgttggcatgtgcaaactctgagaagggccatttgaaatacatcttgaattagacacatcaggtgtgccagatttgaggaataggctgaatttaacaagtacaggtttttatgttaggctttttctcatgtatttaggaattagttaagagtgactgagtcgcatggtctttttatagagtcatttaagatgtcgagactggccaggcgcggtggctcatgcctgttatcccagaactttgggaggctgaggcaggcggatcatgaggtcaggagatggagaccatcctggccaacatggtgaaaccccgtctctcctaaagatacaaaaattagccaggtgtggtggtgggtgcctgtaatcccagctactcgggaggctgaggcaggagaatcacttgaaccagggaggcagagattgcagtgagctgagatcatgccactgcactccagcctggccacagagcgagattctgtctcaaaaaaaaaaaaaaaaaaaaaaaagggtgtcgagactgtggggccactgtgagagtcacctatagccagctgaggccattattttttcattgacccacagccccaaaagcatggcttagaagctgaggcctgagcattggctgctgggcagaggggtgagatgcttctttcccccacctgctacccttgggggcaagtttgttctggatgcacctggccatatccttgatgagaagtacaaatctcaaagaaaaagcttgttaaattaattttcattctaacatatatgatctctgattgattttttttctccaaatctagagtctgtgtaaagaaatctactcaagaacggtttgcgctgaaaattcttcttgatcgtccaaaagctagaaatgaggtatgctttattgcctcgacttaattaaatagttgaagtgcctaagaattgttcttttgcaagtaaggcagcttcctagagagaatacagtgatgcataaaaagttttatgtccaaactttacctctcttccccattcatgctatcttagtaaagtagtcctagatctgtcaatatcaaaggccattgagtcatttcctttcagccacctcttgttcttttaaaattaatgtgattcttgtaccctcatgtattcagatttacctcagttttgcttattgaagaaggtacttaaaggtggagataaaatagcacaaggaagagtcaggtgaatggtgtataaaagtgatgctacaggaggactctgaggatgtttctagtttgtttcttctttttgagacagagtttcactcttgttgcccaggctggagtgcgatggcgcaatctcggcttacggcaacctccgcctcccgggttcaagtgattctcct

SEQ ID NO: 71530 - DNA, 1151 bp, Homo sapiens
gaaatgcaaataatttctaaaatgaaatgaattgtttgccagattttcatttgcaaataaatggaacagtaggaagtaaatctgttggtgagtttttattcatggaaaaagcattaaggagataatctttgaaaacactgggtttttacatcattctaagtgataaagtttttattgtaattagcttgtacctagtatggtcagtttttggagagaaaatgttggtatcccctacctattgatacatttcctctgttctctttaaggtacgtctgcacatgatgtgtgccacacacccaaacatagttcagattattgaagtgtttgctaacagtgtccagtttccccatgagtccagccctaggtaagactacacagtgtcatcatcaaatgcccacatgtaggccaatgtgtagtggagctgtcctctcttttatgtgctccctccccttccctctccttcttcctcctaccctcgcttcctctgcccttccttctccccctccatctccctttttgtaatttggaaaatgtcaagcatttgtaaaagcagacagaattatgtaatgaatcctcaagttctcatgatccatcctcaacagtaatcctcttgtggccagtctaatttcatctatgcccctaccactcttcacatcccctgatgattctgattactttctcatttcaagaaagcatttaatgtagaatttaaacagattctatttcaaatcagtgaaaggggcccaaatattattctaggcagagtcttagaggctgataaaacaaaaagcctttattattgcttagtctaactttccttttaaagaaagaaatcaacattattcttttagttaccaaatgtttggcaagcatattgggtggcattctaagtctctttgttaaaattcaaaattaaataaggtatggtttttttggggaagactgagatgtaaacccatcatcatagcagtgcaataggcactaaggacaggcatccctaaaatattctaagcttacaaaggagaggagctgctaactatagtctgggaggagaggtgtctcacaaaggctgtgtggaagctaggacttgaaggaagggtaggaattttccagatggaaaaagaagatagaattttaaaaacaaatgggaa

SEQ ID NO: 71531 - DNA, 2082 bp, Homo sapiens
gatgttttgacaggagaaatgtgaccccttttatacttgggggtgggggtactgtgttcttaattggttgtcaactgtttcctgaggctgctgtgagatttcaataaactctggaaggaaggcatcttaactgctttgtagactgcagttatctttaggcatgtagctaccaagtactgttattggactttgcaataaaatgctgctgataccacctgaaagattgtatggtataaaaatgtattttaagagaattgtacataagatgcttcctgcatgtgagccacctttctgtgatttcttcagatttaataatatcctaagatctttgtaattctgaattattcctggttatattctatgttgacatcacattttattgctgtagaaatgatttatgtcacaaacaatactaggaatccagctgataatcacttcttgcagaggtgaaaagctaaaccctcaaggcttatcttcataccaggcaagcaaagcaaagagaattaggaagcacagcccaattgcttcttaataaaaagttcttccaagtttcccatgaaccttaagcaattttggatgcctcctttctggtagggaggaactgatacttggattgctgagaaaatgccatatggagagttaaagaacaagtaaaatctgttctttctgtttgatttttaaaattatacctttaattttttcaaatattaggattaaaggatgagctctgataatcttctataaaataaaaccccttcaaatccacataaacaggcaacattttcaacaagcatgatgagcaaaatgagtttccagtatgaattggaaaaacccagtcagctgatttcttgaccctcagctccctggagagtgccattcttgtctgagccctgctgtgggaactgcgcctgctgaccattgctcagcttaggtgtttcttctgcagtgtctgtcatacctcagatgaatgaaagtgggagcatttcatttttcccatttcttacaggatttacccatcagtttattctgacaaagaattgctgtaccatcatatttttctttctgtctgacaaaatacaagttgcagttaaactaagcttaatccattctgtttcttggtattccaagtttttcttaatttctgctttaaaattgaaagtgaacgcagtcttaatgaaggcttgttttttgacatcctgagttctctacgccaggtgtattaaagagtggtcttttctaagaagcgactgtttcattgtgtcttttttcagatagctttggctctgcggcactgtcacttgttaaacattgcgcacagagacctcaagcctgaaaatctgctttttaaggataactctttggtgagaagactgtttttctgcattttagtgctgcaactcttaacatagttcaggagtgggtgtgtttggagcgctctgaattcatggtgaaaaagctttaagccaaagtgcttcaaacagcttatttcttcaactcgttcccttgctagaggctcagagaagctgtactactgtactcccggcattgataattttggatgatactgatatgtatttgtgggacttaatgattttggatattatttggaggacctttgggaaggggcaggaatctgtatgctgttatatattatctcgtttcatttgctgttttccctttcagctctgtcccctgccccatgtctcaccagataagttgctctgtctatcatgaagcttatggcagatattaaaagtgaagtagcatcccagattgatgagaggtgatgggcttatagagtgaagggtccctaggccaagaccttgacgttagtgctgcccttacaagttctaaagcaaaaatagctgtgtgagtgggtaggaattccttacttctgcattactaaggacagttcctcagtgtgaatcattgtctccagacctggggacatgttattttcataagttcgcatctcagctggaaagaaacttgttagatctcagggtaacatgtcttacacctggattttcctttaatgtttactgagcactctggagcagtgactccttttttttttaattt

SEQ ID NO: 71532 - DNA, 1075 bp, Homo sapiens
caaacccctgcactcagtgaacaaccccattctgcggaagaggaagttacttgggtaactgagcttatttcttcgattcttcttcatggctggaatggctgagtactgggttctgaaatttaagaaatttaacttgctcagctaggggtctttagcctctgaagagggtggagaggataagttctttaaatagtatcaggagttggacactattgttatttttctgatacatctgttgccttatgtttagaggtaatatctgtccagagttggtttttggggtctcacgttgtcattacccctccctcaaactcttaaagcaccaagccaaaggacagtgtctatatccacgaccatgagaatggagccgaggattccaatgttgccttggaaaaactccgagatgtgattgctcagtgtattctcccccaggctggtaaaggtcacaccatttactaatcctctgtgtgtctgtgagtgtgtgtgtgcaggggtgggtgggtgtatgcatgcacatggcaaaaggaatggtttaattttgggttgtctgtttcatcttgtgttataagaaaagtacattatataaggtagtctatgcccactaaaaagattggacagtgggagcttagaaatgcagttaagttctgcccctcctttgtttctgtggaatttctagtttagacttaattggcagtgtcaggtgcaagcatgcaattttgtgttttcttagtttgacaacaagggcacaggttgggggatggagaatggaaaatgtgggtagggtctgaatctcattgcaggctgttaaccatttccagagcctttagagtgcaaggctgccattagctcataaataagagaatacctccttagttcagaagtggctcctgctgctactcatgtcatgggcagagtgacttacacgtgggtcctttggagtgagagctttctttcgttatgttctctctccactcatcggcgggtgaggggctattctcagcagataaatgagatgcttcacgtactaggccagaaaacagttgggttgacctatctatctccctagattccttgg

SEQ ID NO: 71533 - DNA, 1123 bp, Homo sapiens
ttttcttgatgaaatgttaactagacacctggttagtcagcttttattttgaccccacagttttttttttgagacggattctcactctgttgcccaggttggagtgcaatggtgtgatctcggcttactgcaacctacgcctcctgggttcaagcgattctcctgcctcaccttcctgagtagctgagattacaggcgcctgccaccacgccccgctaatttttgcatttttagtagggacagggtttcaccatgctggccaggctggtctcgaactcccgacctcaggtgatccgcctgcctcggcctcccaaagtgctgggattacaggggtgagccaccgtgcccgggccccacactttgtttttatgttagggcagttggaggaactgaactttgatcctgatcctttatatactcccatggtgaaacttgagcccattttacttaacacaatatatccgtgcattaggaaaacttggtagagaagattatatgcagatataaaatatctaaactcatttgttatgaaccaacgataatgagggaaaacttggacatccacatacagattttcttgaattaaagaaaaaaaccagacactgacaaaggagagctgaactgataaatggtaccctgaaaactgcagaaatgagggaaagaggcagtgggccacaaagaactttgtccttttcagagatccccagagaagccctgcccccttccccccaccccctgacagaatgttgtgtttcaaagaatgagcagattaatggatatcaagttgtgtggcctgagctgaggataaagaataatttgcctgaggagttacagtactggctggatcactacaggccttctacttggaatatcttcccatgaaagtaaaaggaatataactaaggaagattaaagttgttgctgttggaaggaagacatactaaagaaactgccgaaggccaggagagaagcaggaagagaaacacggcttgaagttctgtaagaatcagagttgggcaagaactgccaataagggagccagcgtagatctgagtactaaacacctgagcctccgagggtttgtgtgcgagggagagctctgctgatggacataggcccagaa

SEQ ID NO: 71534 - DNA, 1050 bp, Homo sapiens
ataaacacagaggtggtgctggctggaatggagatttggaccgagggggacctaatagatgtcacagtggacttgcaaatcacactcaggaatttcaatcactggagacaagagatgctcttccatcgtgcaaaacacgatgttgcccacatgatcgttgggcatcaccctggacagaatatgggccaggcctttctcagtggtgcctgctcaagcggttttgcggcagctgttgaatccttccatcatgaagatgtgctgttgtttgcagccctgatggcccatgagctcgggcacaacctgggtattcagcacgaccactcggcctgcttttgtaaagataagcacttttgcctcatgcatgaaaatatcacaaaagaaagtggcttcagcagctgcagctctgactacttctaccagttccttcgagaacacaaaggggcctgcctatttaacaagccacggcccaggggccgcaagcgtagggattctgcctgtggaaatggtgtggtggaggacacggagcagtgtgactgtggttctctatgtcagcatcatgcatgctgtgatgaaaactgtatactgaaggcgaaagcagagtgcagtgatggtccatgttgtcataagtgtaaatttcaccgtaagggatatccttgctgtccttctagtcgttcctgtgatctcccagaattttgcaatggtacatctgcattatgccccaacaacaggcataagcaagatggctcaaaatgtcatacaatttacgagtgccttaaagttcattgtatggaccctaataatcagtgcttacaattatatggatatggtgcaaaatcagcctcacaagagtgttacaattcaatgaacagcaaaggggaccaatttggaaactgtggcatttctaccagtcctgggtcacaatatgttcggtgttcagatggtaatatattttgtgggaaacttatatgttcaggtattacaggcttaccaaaaatcaatctccaacatacaatgattcaggtccctcagggagatggctcatgttggagc

SEQ ID NO: 71535 - DNA, 1033 bp, Homo sapiens
atttcctacactgtcaaatatatgaaagttccttttgtacgttcttcaacactgatcaacaagcagtttcagtccacatttgctttgatctgtcactgagttaacccaagctgcttcttcagagattctggcatcttgggggagggcaagggaggctgaagtagaccttcacagaatcatagataaactactgtagtgcagtcagagtaccagtcataatgatacagacaaacattcccttccatacacctttaaatccaagtctctggaggacttgagaagcactgctacctttttctttattcaacacagataccacagaatcatcagggtgagaaacaattgcacaaaacactccaggtatgtaacctgctacaaatgttacaaccagctcctctgtctttgaacattcaccacagggcttccgaaccacaaacttgtacaatgcttcaacagtaccttaaaagcaggcaaacttcatcatggcatatgctatctgtctcatccagagaggagcaacccctttgtagaatgtttttaggccttcttccttatacatcttgggagctgcatccctcaaagtcttggtctaacctggttgggtttgaatttgaaccttagcagcttccatagggcaattacagcaaagaattcagcactggcagaggcagccaaatacagtgatgtgcaccagagataacatgctctgggagtatgttgctatacaagactttaaagacttcataaaagccaaacttgcagaacacctgcatggagtggccaatgaaagtcagagcctgtcctttagccaaagaatgaacaccatcctccttaagtgtaactgagaatccattaaatatgcccttctacttttgggggtccacctgcatacagcatttcactaaacccaggggaatgaccgcagtgtgtgtcagaccacaacctaagaccccacgagagccacacaatgcataatacttcgtggagtcaaattcacaactgtacttttataaggcagcagctgccaggttaa

SEQ ID NO: 71536 - DNA, 1050 bp, Homo sapiens
ctgaacttgactaatagactgaccgagggttggagcgggtcccaaccaactgcctgacggcccaaaggcaggaagaaacgatggtaggccttgtcatcttcgaaggagaggaaggacagcaaacgaattgctatagcgtccccatgcgcacttggcgcttctcctcaagcggagcaggaacggaactgggcggacccgccggaagactcggcgagtgcgcgcgcgcaggagcccattttcccgcccgcaacgtggccccgcccttttacccaggccctacgcgagcttcgccgagtacgcgtgcgcagcagcttcccctccctcgccccgcccctcacgtggccccaccctctcaccctagacagatgggagcctcctggggtgtccacgtgagcgcgcgtgagtccgcccccccagtcacgtgaccgctgactcggggcgttctccactatcgcttacctacctccctctgcaggaacccggcgatatggctgccgctgtgccccgcgccgcatttctctccccgctgcttccccttctcctgggcttcctgctcctctccgctccgcatggcggcagcggcctgcacaccaagggcgcccttcccctggatacggtcactttctacaaggtaaccggggcgggggacgtcgcgcgcaggtgccgccggggcgcccggaagagcgcgcgcccgtggggagacgctggattccgggagctgacgggaggtggtctgtagcaacggtcccagagcttcccggcgtcctacaggcctagtggactctgagcggagaatgttatgaccaccgggcatgcacgcttcagggccccggcgcacccttgcttttgcagcatttatacttgcatccacccttgcaaagatgcagccgagggaactgggtgccccttcccttcacctgtggggagagggcggtgcctggcgagatccaaccctcgagtcccaagtgggagaaccggagggcggtgcgaggtcgacgccaccgggctcccggctgtggaagctgggaggggttggcggggggaaatgca

SEQ ID NO: 71537 - DNA, 1119 bp, Homo sapiens
agcccttggtgtccaatgggctagtgggaatcagctctaccattacctataatcaggcaactcacttctttaaagtatagataagttcattattcattcattcgttcattgagtaaaaagttactaaaggcctgccaggcaccatactaagtgaacacagcagggaacaaaatggcatctcttagctcatgaaactaacattctagtgatggtgaagggaaagaaacaacaacaaaaaagatactggaaatcactgaaaggcaaagcatggaacaaggctgccagacagaacactagtacatttccttttggttcagtcgtgatggaagagaagatttgaaaagagactggagaaaacgtttgttcattcacgcaacaaaatagttattgtgcaccttctatgagacaggtaatctgttatgcagcgcagacgatcaggaacaaaatagacaaggagcttcttcatgagcacataatattccagtgagagagaaagatggcaaaatagatttttaaaaaatcagtgatgagtgctgtatggagaaataaaacagattaatgtgactggcactttagactggggggaagataaatcaaggaagaactctaaggaggaaacacttaacctaagcccgaatgatgagaagtaactaactagcctttcaaagtttgggcagagaatattccagtcacaaggaacaactagtgcaacatatcctaaggcagtaaagagcaaggaatattcaaaagacagtaggagaatggttgggagatgagagggaagccaggagtcaggtcatatagaacttaggctactgtgtggagactcaagagtggaagcagggagaccagagaagaggctattgtaatgttgacctagactagggtggtaatagtagaaaacactgttagctttatggcgcaaagtttccctttgggtcacacttgttctgtgatattatctgattcccatggagcagggtggggtaggggtgtcattttgccagtaaaggcccccaaagcatagggtgctgtagggtgtgtctgagcatgcctgacaaccaatcagccacacctacaccattttttttttttttgagacagagttttgctcttgtt

SEQ ID NO: 71538 - DNA, 1052 bp, Homo sapiens
ttcagggcagataagctagtgagaggccaggcttgggacaatgtcttctccctagactacacttccctctggctagatctctgggttttaaactgtcagggccaagacttttaattgcagtaaaattcacataatatttgccattgtaaccatttaaaagtgtacattctgcatgattcagtgcattaagaatgtgcaaccatagaggttactatctagtgccagaacattttcatcatcccaaaaggaaaccctatactcattacgcagtcactccccagtcttcctcctcccagccccagcaaccactcatctattttctgtctctatagatttgtctattctgatggaaatgtacaatatgtgcccttttgtgtctggcttttttcacttagcatgttttcaaggtttgtccatgttgtaccatgtattggcacactgttactttttatggccaaataaatattacactgtacgatagaccacatttttgtttattcactcatcagctgaatgtttgggttgtttccaccttttggctactgtcaatagtgctgctatgaacattcacataacacattttgtttgaacacctgtattccactcttttgggtatatatacaagtggaactgtggtggtcatatgctaagtctacatttaacttactgaagaagccaaggacttcttttgatggtttctcccaatgcacaagttttatctaacaagccaccttagggtaacactgccttcctcacttccatcaactttttgttttcctaatccaagtgatccctatcaagttttttcatcacaggcaatcactgtaaataatcatgtcaaggctgagcatggtggctcacacctgtaatctcaacactttgcggggctgaagtgggaggatcacgtgaggctagaagttcaagaccagcctgggcaacatagctggcttaaaaaaaaaaaattagccagtcatggtggcacacacctgtattcccagctaaactactcaggaggctgaggtggaaaatcacttgtgcctaggagttagagg

SEQ ID NO: 71539 - DNA, 1639 bp, Homo sapiens
aactctggcctatctagccaaagcgtcctccatgatgccaactcctttgtaggtaggtttgtttatttttgtcagatttcttgttcagggtttactgcgaaaggcctcctgggatgatgagcatgacaggggctgatgtagtatgcagagggtctccttcacctaactgaaaggaaccctgaaggagaaggccttagtatgtctgcagccttgtttattctggacagggttgtgtatatctttgattagtgtgaacaggtactaatggggtgccctgcatgttgctggcactcactaaattgttaaatgagtcagtgggtgaatgaataaatattagtttgtgagagcttgcctcccttgtgggcttgtttccactctatttcttaaacaggggccccttgggaaggggaattagccccaaaagtccctggaacacccacttgctcagctctatacgccctcaggtcattcccaaaagcaagttcgtcttggtgaagttcgacacccagtacccctacggtgagaagcaggatgagttcaagcgtcttgctgaaaactcggcttccagcgatgatctcttggtggcagaggtggggatctcaggtatggacaagtccaggacggctgggggggcagagagggaggaagctagaaatcgtttccctacttggaacaggaatacccagcatctttccttctgagccactctcaaggagtgtaagtaaacaggttcatggtctctaaaggaatctgctgcccacagtaggcttaacctgagcagattttgggaccatggaatctaagctcagctgtacaggtgcctgaagggaagggaacccctcttccttcacattccacccctctctgacattaaactgtgagaactttgagctctccttgcagggaacactgggcagagggggtgctatgtcccctaggggacagcatagtcagttcttctgtcttcatttcagtttatgtaccaaaactgttaggttttggtgttagctcaaatgcactgatgccaccactaatccaagggcacctcccaaccacagcgacagctttaatagtcaccagcatttagtggctgacagggtaaagatctgcacccccattgcattttaaatcttcacttgaactctgcctgagaagcaagatgtattatctccatgttatacttcaggaaaaaaaaaactgaagctcaaagattaaaggactgtgggtgatagagtggctcatccagagctccacctaagtgtttagtcccaggcaggggcttacttatttcacttccctcccagcttggatgcctccattccgtagtaagctgggaacttagtagagcgtctggtcctgggtagagatagctggcacacctctccaggacagtcagtcagatttgactcaacttcaggtaactcccttggtgcttttattagaataataataatagttaacatttatcagatgtttactgcgtgccaggccgctgtgctgagtgttttacatgtgtttcatctttgcaagagctctgtgaaggaagtcccatgtggtactattacctccattttttcaaatgaagaaatggatgcttagagtaacttgctcaagattgtggaattgttaagtggcagaa

SEQ ID NO: 71540 - DNA, 1108 bp, Homo sapiens
agttctgccacttaacaattccacaatcttgagcaagttactctaagcatccatttcttcatttgaaaaaatggaggtaatagtaccacatgggacttccttcacagagctcttgcaaagatgaaacacatgtaaaacactcagcacagcggcctggcacgcagtaaacatctgataaatgttaactattattattattctaataaaagcaccaagggagttacctgaagttgagtcaaatctgactgactgtcctggagaggtgtgccagctatctctacccaggaccagacgctctactaagttcccagcttactacggaatggaggcatccaagctgggagggaagtgaaataagtaagcccctgcctgggactaaacacttaggtggagctctggatgagccactctatcacccacagtcctttaatctttgagcttcagttttttttttcctgaagtataacatggagataatacatcttgcttctcaggcagagttcaagtgaagatttaaaatgcaatgggggtgcagatctttaccctgtcagccactaaatgctggtgactattaaagctgtcgctgtggttgggaggtgcccttggattagtggtggcatcagtgcatttgagctaacaccaaaacctaacagttttggtacataaactgaaatgaagacagaagaactgactatgctgtcccctaggggacatagcaccccctctgcccagtgttccctgcaaggagagctcaaagttctcacagtttaatgtcagagaggggtggaatgtgaaggaagaggggttcccttcccttcaggcacctgtacagctgagcttagattccatggtcccaaaatctgctcaggttaagcctactgtgggcagcagattcctttagagaccatgaacctgtttacttacactccttgagagtggctcagaaggaaagatgctgggtattcctgttccaagtagggaaacgatttctagcttcctccctctctgcccccccagccgtcctggacttgtccatacctgagatccccacctctgccaccaagagatcatcgctggaagccgagttttcagcaagacgcttgaactc

SEQ ID NO: 71541 - DNA, 1820 bp, Homo sapiens
agtagctgggactacaggcacgcgccaccatgccctgctaatttttttgttatttttagcagagacagcggtttcactatgttggccaggctggtcttgaactcctgacctcgtgatctgtccgcctcggcctcccaaagtgctgggattacaggcatgagccaccgcacccgtccgagcttaatactcttaatcacaagtagacccccagcacctagaacagcatctgacacatagtgggcatataataaatattcagaagaatctccattttttcagatgaagaacagttcagagagtttaaatgatttgcctagtgctgcatggctaggaagtggcagaggaggaattcaaacacaggtctgtatggttgctcctcactttgaaccattacacggccaagaaaattcttctttccctcagttcagctaggtcccatagcaattttctgccctgagttccttatggtcttgctttttgtgtctggtttctgctcacagattatggtgacaagctgaacatggagctgagtgagaaatacaagctggacaaagagagctacccagtcttctacctcttccgggatggggactttgagaacccagtcccatacactggggcagttaaggttggagccatccagcgctggctgaaggggcaaggggtctacctaggtatgcctggttgcctgcctgtatacgacgccctggccggggagttcatcagggcctctggtgtggaggcccgccaggccctcttgaagcaggggcaagataacctctcaagtgtgaaggagactcagaagaagtgggccgagcaatacctgaagatcatggggaagatcttagaccaaggggaggacttcccagcatcagagatgacacggatcgccaggctgattgagaagaacaagatgagtgacgggaagaaggaggagctccagaagagcttaaacatcctgactgccttccagaagaagggggccgagaaagaggagctgtaaaaaggctgtctgtgattttccagggtttggtgggggtagggaggggagagttaacctgctggctgtgagtcccttgtggaatataagggggtagtgggaaaagtggtactaacccacgattctgagccctgagtatgcctggacattgatgctaacatgaccatgcttgggatgtctctagctggtctggggatagctggagcacttactcaggtggctggtgaaatgacacctcagaaggaatgagtgctatagagaggagagaggagtgtactgcccaggtctttgacagatgtaattctcattcaattaaagtttcagtgttttggttaagtggacctgaagccattcttttttcttttcaaattatactttcgtctatgacctgctttcctctttgaatctaagctggtatagactccactttcccagggtaacaaactatcctcataacactgtggaaactggcatacctttgttattttccagtgatattcagactgacatggattgactgtcaatggtaaagtttgtctattttccagtccttaaaactcaatagcagtattgatgaatatattgaaccaacattgatggaccatggtgtaattattttccatgctttgtgaggtacacatagcaaattcttagttttactgatatattctgtgacttggatttacacagctaaatgatatagtccgatttcaaaattaaaaaatattttccatctaaatcactatcactaaataaatactaacttctagaaagcagaataaagagcacttgtgccaacattcacatcttttcttcagac

SEQ ID NO: 71542 - DNA, 1136 bp, Homo sapiens
ggaaagtggagtctataccagcttagattcaaagaggaaagcaggtcatagacgaaagtataatttgaaaagaaaaaagaatggcttcaggtccacttaaccaaaacactgaaactttaattgaatgagaattacatctgtcaaagacctgggcagtacactcctctctcctctctatagcactcattccttctgaggtgtcatttcaccagccacctgagtaagtgctccagctatccccagaccagctagagacatcccaagcatggtcatgttagcatcaatgtccaggcatactcagggctcagaatcgtgggttagtaccacttttcccactacccccttatattccacaagggactcacagccagcaggttaactctcccctccctacccccaccaaaccctggaaaatcacagacagcctttttacagctcctctttctcggcccccttcttctggaaggcagtcaggatgtttaagctcttctggagctcctccttcttcccgtcactcatcttgttcttctcaatcagcctggcgatccgtgtcatctctgatgctgggaagtcctccccttggtctaagatcttccccatgatcttcaggtattgctcggcccacttcttctgagtctccttcacacttgagaggttatcttgcccctgcttcaagagggcctggcgggcctccacaccagaggccctgatgaactccccggccagggcgtcgtatacaggcaggcaaccaggcatacctaggtagaccccttgccccttcagccagcgctggatggctccaaccttaactgccccagtgtatgggactgggttctcaaagtccccatcccggaagaggtagaagactgggtagctctctttgtccagcttgtatttctcactcagctccatgttcagcttgtcaccataatctgtgagcagaaaccagacacaaaaagcaagaccataaggaactcagggcagaaaattgctatgggacctagctgaactgagggaaagaagaattttcttggccgtgtaatggttcaaagtgaggagcaaccatacagacctgtgtttgaattcctcctctgccacttcctagccatgcagcactaggcaaatcatttaaactc

SEQ ID NO: 71543 - DNA, 1065 bp, Homo sapiens
tgggacctctactggctttaatgacaaataatgttatgttgaggttatgcttcctttgttatttgctgattttcctactaaatgtagcatttcaattagatccagctttcacattttgagataattgtaaaaagaatgaaattatgcagaaatggccaatatctcttatcaatctgttcttttggaaaccctcatgtactataaattgtgtacagttaaaaaaatatatatatatatatattcttacatgagtaaaaagcaccctctcccagcaatcgtatgccattggtatttgaagagaattcccaaataacccattgctgctgctgctgtttttgatttgtatgggtttttttgttttgtttgtttttgtgtggtaaactgatatttaaaaaaggaaaggagaaaaatcacgactactgtttacagactgaaaaattattgctttttatactactgagatcctaagttaagactctccaaagcaaacatttggtttaaatcatttatctgatgtagataaaaggtagagaaacttgtagtgttctccacataatggaaaatgtacaaatgcctagttgtgttgcccatcaattttgtatattttcataattttaattgttgaaaattgcattatattttgcaatcactatgttcaatctggatttgtctttcattttaacttttaatataaaaaggggtttcaatgtatctacaggcttgttattgaaacttcctacttatttgatgtgatttattaatataggaagtatatattcttccttaagtaagtgaagcatagcaaatctactttaaactggatgggttaatttatataaacattttcattttaagttggcatttctgcctggttcctttttgttcagattcttagaagccacaaccttctgaatggtgtaattcatctcagttgtgaatttagggctatatcccaacatatttttaatatttgagaatttagaatttttatttgaagtcagctagtccttttgactcaaaagttagtaccttctgtacttgcagttattaattcaacatatatgt

SEQ ID NO: 71544 - DNA, 2383 bp, Homo sapiens
ttagtagagatggggtttcaccatgttgaccaggctggtttcaaactcctgggctcaagtgatccacctgcctgggcatcccaaagtgttggaattacaggcgtgagccaccgtgcctggcccagtttttctaccttatataacttacaacaaagggtacttgaaagagtaatgatgctaaagcaatagggtttccatgaagaatcacatcgaaaaatacccattcgtgatgaccttttgccttctttgcattttatgcaattgaaaatgacccactgtgttctgatggagcttgcaatgagaccaaaggtaatggcagctttaacttttatctgagaactagaatctggggggatggtttttaaacaagactaattattcttgtctcctcctttataggaagagagaaaattttcaaagactgtgcaagggaaggtgcagagcagttatctgcactcacttctggaaatgggggagctgctgaaaaaaagacttgagaccacaaagaaactaaaaatttaaggaagtatctatcatgggcactgatgactctgcaacagaatatgacaccatcttcccaggcaaaagcaacatctggttgaccatgattttaatccagaacttcctcataaaatgcatgaaggactttgatcgtgaatttttttaggtgttaaatatatacaactgattaaattattgtatataaaccagaagcgggaccctcatctgggtttgaccactttttatacatgttcatatgcatatggcagcaacaagagaaccctacttttcttcttcccatcaccagaaacatcttttcaggggagcggggggtctataaaaacagcaatagaaattaagcataaagcatcaacctcatagcaactgaatagcccttccattataaataacattgagagtttttggtctggtccttgagccacaagaagtggaggggagaccatgcctgggaacagacccccttttcacagcagtaagtttgttttgaggctttctcagctacttggctcccacagaacccaaggcaggtacacaaaggaccttagatgagatctggcatatgcacccgcaatagaagggcaccacttggatgaccacaggcacttagtttttggctagtttttgtctgatagttaagacatccccatcctagcttctgtgagagttaaaaatctcaggtaagaaggcaaggaaggctctgttaatttatagctgtttagaggggaaagcagtgcagaccacttattaagcccgctgaggactagctttctgtctttcatacatttgggaaagataggaatgactgtttcaaagaagagaggtgcacataatttatgcaggcaagtatgatacttatttcattggttttgtgagtcatatatatacatatatatatatacacatatatatatgacttgaaaattaagatttaatactttaatgttttaagtgtggggggtttgggaaggaaggaatgtaatattatggatttagccttaggctttaagttttaggctggcaaaagaaatgttattcagtgggtttgaggtttggactactttcttcaaacttagagaattataacaggatggtgtttactttgttcacctggatgtccccaagactctagcttcttctatcagtggttggtctgatagaagaggtaaaaattgctcttgaaaatgtcctacaatttatgcagtttctttgataatatttttctgtttaaatccctgcttctgtttttggtctgttacctaaatatagttcaagtttaattctgtaagagcaaagaaatgaatttgatgaggaaattaagcatccaatggaggattggtcttgaagaccttaaaggtgctttccaacctgcactgctccagtgaaatgtggtacttttttcttttaaaagcaaccaagagagctgggaatatctgtgtacgcaaagtaattgcattttgtcccttcattttgactttcttagattcataatttgatacagtgcttaaacttccaaggaaattttaaacaattactacattacctgttcaaaataaggcttgttggaaatcctagtccatcaactaatttcaaaaatttatttttgatatgagtagcaacagctggtcatataccctatcccaaaaggaagaactgtcttgaacaagatgaatggaaaattgtggttaattctgaatttcatgtaatgacaacatattctttcataaaactatggcctgtttaagatggaactttgtgtgtgtctgctggggagggtggggtacatgtgtatggcgtgtgttcttgaaatgatgtctctctgaatatccaaaaaagtactgtactgtagaaatgctctttgaaa

SEQ ID NO: 71545 - DNA, 1140 bp, Homo sapiens
tatttatatgtgttgagctactgggttcttaacataataatgttactaatcccctgtcataggtgatgcagtttttttttcagtttgttatttgtcttttaacttgagtgattttttttttgtcaatgtagtaatatttttaaaaacaaggataatctttttaatggtttttagctttgtgtgatgtttagaaagggtttttcagctgtcagtgtcatgattgcagaagttgttacctaattttcttccagtgctttgatggatttttttttatttaagtatttaatctatcggaaatttattttaatattactgtgttattttgtatctccaaatgtctagctggttattttagtaccattcattcacttgaaaccactggtttgaaatgccactatttaaattccctcacatctttcagtagcttttgtgatgtagatatgggtaatatgtttgataatgtttcaactcttttttaatctttttcccagccacctgtctttaccagtttccaagactatgttactgggcttcagactttaatttccaatgttgtggatcatattaaagggcttgaaacacatctaattgcacttaaacttgaagaacttattttagaagacacttctctctcaccggtaagagattgtaggcaatcggcaatgttttctacacacacacaaacactctgtctctctctctcatctttatcacaaggacaagttaaagttcaatttatcatttcctctttataagacttgtgactagaaggtgcttggcagtagtttcttgttgtgttgttggtggtaggttttttcccctcttcatttctccccatacgtcctcctttctatgcatttttggggttgttcttttactatgaaaactaatgccagcattttgagcaacatggaaccagccatattttgaaatccagggacaatcttcttgaatagaatttacctgctgctgagttagctgtcttccttgccacccagttatcacctgagaaaggagaaatgctggacatgagaagtaattatgtcagtaataattaggctagagcaagccaaccaaaaagggaatgaaaccaagtatggaatcaaaggtaccaccatcaaatgtcttctgatattattt

SEQ ID NO: 71546 - DNA, 1041 bp, Homo sapiens
ttacaaagtaatgttttagaagcttaagtccattccatatttaaaatcacttgttaggtccaaaagttgaagaaattcttcatttgttgaaaggctgttggattttaaaaatgaagcagtaggctgggcgcagtggctcacgcctgtaatcccagcactttgggtggccaaggcaggcggatcacctgaggtcaggagttcgagaccagcctggccaacatggcaaaagcccgtgtctactaaaaatacagaaattagcgaggcaaggtggcgggcgcctgtagtcttatctactccagaggttgaggcaggagaatcgcttgaaccagggaagcagaggttgcagtgagccgagatggcaccactgcactccagcctggatgatagagcgagactttgtctcaaaaaaaaaaaaaaataaaaataagaagcactaaactttgtagagaagagatttcttttgtaagctcctagtgaaaatcacaaatactccatagaccttttccttttatttatttattttttaaatcataaggttagtagatcctaccattcagagtgtttgaagcacatagattttaagctctcttaaggaattttaggtagtacctctggcaaaaaggtaattagtgcctttctttttattcttccttttcctttcattatcattttctttttgtctcaaaataatgaaaaatgcataagggtctgtagagagaagaaaatgtccttgcccatgaacttcttgcaggtatttatcttgcttctttatcttactaaaaatagaattgaaagtttttcattttttgtttttcaattttagaggatacaatggagattcaggaacgaatagaaaatagttttaagtctttactagaccagttaaaaggtaagttttcctactgtagattcctgtatttgtatctggttgtatggcaatagcttcgaagttctttcccctattcccaagcccaatcacccagagataagtaagtagttttaacactttggagtcaatactcctagatgccacctaaacac

SEQ ID NO: 71547 - DNA, 1050 bp, Homo sapiens
gtaaatgaaagctggaacccttcaaaggcatcttaactggtgaaagttaactttaaatgatttgaggccaggcgcggtagctgacgcctgtaatcccagcattttgggaggccaaggcaggcagatcacgaggtcaggagatcaagaccatcctggctaacacggtgaaaacccgtctctactaaaaatacaaaaaaaaaattagccgggcgtggtggcaggcgcctgtaggcccagctacttgggaggctgaggcaggagaatggcatgaacctgggaggcagagcttgcagtgagcagagatagtgccactgcactccagcctgggcgacagatcaagactctgtctcaaaaaaaaaaaaaaaaattgaaagcaatggattgaatattgaataagttagataatttggggatgtttctgtttaagggacgtttctgaagaacataagaaactttccttagaggaggagaccttgtggttaagaatccgatccttaacattgaggctgataagtggacttccaagtctcaaccaccctgtggagccaaagaactcggagaagactgccgagaatggggtatcctcccggattgatattcttcgtttgctccttcaacagctggaggcaaccctggagacaggaaagcgatttattgagaaggatattcaggtaccatcaatacatatttaccatcaaagttgcaataattatatttatgactgttttataaacaggagtttggggtgggtgagtagtaaggaattgttttgtcccagtttatggcttctgcaggagaaagaggaatattttagactcagagggaattgcagaggcttcctcaatatccagactagtgagggagaaagcaaaataactttttgtggtgttaagtttttaatagctagcaacaaattaatataaatgttctgtttttactgtaatgattcagttattagtttgctgattagtggcttttagctgaaccgctgagacaggtttttatctactagttacctgattttcttattttgtatgcatttagatggat

SEQ ID NO: 71548 - DNA, 1540 bp, Homo sapiens
ggtggcagaagctggttattacaattagtaatattagtaaaggagacatttgtctaaagtataagaaggaagaaaaacattttaaaaagctaatattctacttggtgaccaagacctttaaagattagatttaaaacttaattttagtttgagtgttttgttttggctggcaaggtttgcttacattgcctgacttgtgaactatttataccaaggtgatgtctttccttctcagacctcagaatatattattcaagcttacaaatatggtgcatttgagaagatcccagagtttatcgcttttaggaacaggctgaataattctcttcattttgcacaagtccgtactgaacggatgctgttagaccttctacttgaagcaaatatgtaagtattgcatgagagctataaaggaactaagggattagatcagttgttaagagccattaatgggctcatgggtgttattggcaggcttaaggtaaaatagggggaaaaaagggagagagacagtggggaaacagaacttggcacatgtcatggggaatggtagagtactgccagcaacatcttgagaccattacagaagccatttaggtcatggtcatcaatgcctggtccatattgtgcttacgaaggttccgcctcccctacaaatcaagagatttcaggaattaatgctgatcccctttgttttgtgtgggcttccagaagcctttttcttgccatgtagcaagccagtttgatctgcgcttggttctatttcaccttattatgagcccttccttcctctttcccttcctgtctagtaaaacaggaagtcctgattaataatattttctggctattttactattaaaataatatgtggatttttctctatcacagatcaaccagtttagcagaaagtataaagtcaatgaaccttaggccagaagaagatgacattccatgggaagatttgcgagacaacagagacttaaatgtttttttcagctgggatccaaaagacaggtaactggaatttaaccccaagcaatttttaaagtttttgtttgttttttgtttttttaaagagaccaagatcatagctcactgcagcttcgaactcctgggtgaagcagtttatttttaaagaattaggttgggctgggcacggtggctcaggcctgtaattgcagcactttgggaggccgaggccggtggatcacttgaggtctggagttcgagaccatcctggccaacatggtgaaaccctatctctactaaaaatacaaaaattacctgggcgtggtggcgtgtgcctgtaatcccagctattcgggaagctgaggcaggagaattgtttgaacccagggagcggaggttgcagtgagctgagatcgcaccattacactccagcctgggcaacaagagcaaaactccatctccaaaaaaaaaaaaaaaaaagaattaggatgaatctaaaattaaaaaaaacaaacttcactttacacaaatataaaataacatgtgtttgttgtagggatcagaaaatata

SEQ ID NO: 71549 - DNA, 1053 bp, Homo sapiens
ataggcatatgtgtttagagtatcctggcctcctcttgatagggtgtatcactgtcctttaatcaagctagaaggtatactcgagctttttcaggtagtccttcttgaaacctgcaggatcacaagtaatctttttaattttcttgtgtccgtccgtctttaatttctccagatactgcaggcaaacagctcgccgaggtgtcccatgggggtttaaaagccgcatcgaatgcagttgaattagcgcccgtggcgcaatcccgcggcctgaaatgaaccctgcaaggctgtatatcagagggtatgttgttgactattggcctattttcctactgggcaaattattcagacgtaatggagatgggggcagagctgattaactgaggctgtgtaaaaagactgttttttctagaaaggatcttttttgggggcagacatcagctttgagcataatagtttccttggcccaaaggggtaatctcctgtcttctgatcctgatggcatagacccacacccatgaaatgttcttccctgagattttcttctattgtgccagaatttctgcttagaattctttatcttgcctctgttctgtaatgtttgatctctgtatatgtattaagctacaattaaagcacatgtggtgaatgttcccttcacatacttgtttaaggaaatttccagcagaggtcttacgtaatgtagatggacaagaaacttggttcttgaagtctttgtcctcagaatagattatgacatgaattttgataggtcttttgtttggtgtcttacttctatcctgacgtaatgctcatatgccctgtgtttctaatacagtattcagaaataagcaaaaccaaggagcagcctgtctttttctgaaggagagtggtttttatttgggggggcggggggcaggtggttctattattctggtgcttttggaacctttgtatgaaacacagtttatcttagatgcagaaaaacatggagtaacatcccttccagaatggcactaaccaaatttttgactgatgtggcaaaacaaaacc

SEQ ID NO: 71550 - DNA, 1048 bp, Homo sapiens
agtagagttacatatggaagaaaaatgatgtctatagataacatctgtctggggttttatagaggaaatcctgcaggggcaaggtgctgagctccagttttccttcaaagtccatctcttcccagaatctgagattctgtgagattctataacatccccccacaagacctggccacttaaaatctgcatcgtttttgctgtgggcatgtttaagaatagacttaactattgaaggactctctgttgaggcgaaattctctattttggttacaggtgtatatctaaaatttgttctctgtcatttaacttcatttattggggggggtgatgatgtcaataaggttttgttttttgtttttgggaagctttcatttgctgtcaagatcagtggataatgctgtattttggttctaggtgatgagaccactgtgtggcaggccctgactttgctggaagagggattaacccatagcccttccaatgctcagttcaaattgctgcttgttcgaatctactgtatgctgggtgcatttgaaccagtggtggatctttactccagcctcgatgctaagcatatccagcatgataccattgggttggtagtatatactctgaataatgagcagccagctataccagtgtggggtacacaggactctaacttagattttaaagttgattgtgacattaagcctttctgattaaataataacctgttatgatccattgcaaaccagaaagatttttatatctcccagcattttgtggtaatttgaaaatttgcacaatttagaaatgtaagagagttttccccagagatagcaaacacctatatactttgaacccttattcttagcacacattattttgaagtgttcatttccgctttgcagttgaagttgacacatgtaatttatttattgacctcaacaaagtttgaatttgtattttgaacttgtatttagactactctttattattatgctagtatcacttaatggcattttctctgtttgtggtgctgttttaggaagacagcattatgttc

SEQ ID NO: 71551 - DNA, 1692 bp, Homo sapiens
aatttttttttaattttttggtaatctgctcttttctatagtcttcctaatgttttcattgctgtaatatatattatgttaatatgctgtaagttatggaacattttcagaagtataaaaatctttcactgcctgtagtacgtggtattgacaaatacttttggccagtaatgaatgagtgtgccagtttcattggagcttcaccagtgttgtgtgctgtcacaaattttttttgttttagctattttggtagatagaaaatggtttatgaaaggaattttagttttttttttcttgatgtctttttctagaccattcaatttctgttaattatggcctactgaagactagttgtgttttgagacctttgctccttttttccccactttgcagtttattaatcagttacttggagttgttcctttgtcgacaccaacagaggataagctggcactgcctgctgacatcagagctctgcagcaacatttgtgtgtggtgcagctgacgaggttacttggcttgtaccacaccatggataaaaatcagaaattgagtgtggtcagagaattgatgttaaggtaccagcatggactggaatttggtgagcaaccattcaaaatgtgcagtagttccctgatctacactaagacttagaaggcagttttttaagcacctgtagcaccctgttttaatgagttttgtaaggagactattttgtctgggaagaccatctaagtaatatgatgtaaagcctttcttaagcctggagttttaaataattctgattggctttcagttgtctgtattcttcttgatctgatgagctaactttttattagattggggctcatatagattgcatagtttatgataattatcacattttctgcttgtaggcctaaatattcttaatatatagactgtaagtgaacaaaaagaatattgtaaattgtaagataaatatttagtttagaaatagatgatcttcagataggtgtggcctttgctagatatatgtgatagacatataattgtctgactataagatgtcagtatttatctgtagtctaaagaattagatgaagtcaggagcatattgtgaatttagttatacatggcacttggcttatgttcttttcttcacctcaacctccttcaaatcttccttctctccctttgggaccatcatggataccacctctgctctggaaccctaccttctgttccagctgagtgtggtctcaccttcttttgaaccctttgaatcgtggcttatatttttctcctggtacttatcttattcttaattttcttttacttttcctcctctccctcctgtcactttcctgcttttaaaaactcctttggggtcagtaatagttgaacaaatgttaaaatagatatgatttttttcccccatagggaaaacctgtttgaaaacagaattgcaattttctgactattactgtctccttgctgtccatgcgcttattgatgtatggagggaaacaggtaagtagcagtgatttcagttcaactttactttttgcttttattgattataagtactgcattctttcattagactaattttacaatccacaaattttatttatgcttttaggttctgcttttcttgatatttctagggtgcttccagaaaaacctgtcttggccaggtgcgatggctca

SEQ ID NO: 71552 - DNA, 1041 bp, Homo sapiens
ctgcaacatccaccttctcggttcaagcgatcctttgccttatcctctcaagcagttgggattacaagcatgtgctgccacgcccagctaatttttgtacttttagtagagatggggtttcaccatgttgccaggctggtcttgaactcctgacttcaagggattgcccgccttagtcttccaaagtgtgggattacaggtgtgagctactgcatccagcctatttttttatcttttaaagactagtcaggtgcagtggtgaaaagggggaaagagtagaacaatgagttcagtctgtaactgaacaagtagttgagataacccgctatcttgggaccagttgcaagcaaaattttgttttaattgaaatgaatgttttcaaattaattctcacttaaatagaaattgcttctgttcatgagtaataaagtgattttgttccccgtcccccaggtgatccagaagaattaatgttccagtattttaaaaagtttggcgataaaccttgttgttttacagaccttaaggtgtttgttgacctcttacctgctacacagtgtacaaaagtaagtactatacagtttagaagtttgttgggtgcctctatttgttgaaacacagaggttaaatgtttgggtttcttttctaaaatgtgcggaattgataatcatgagatacaatgataactgccctgtcaagctaagtactctatgtgttacaacactgaaggcataatttctggttaagtcacaacgggagtaaagccctaacagatggtggattctcctttttttgactgtcttattttgagataattatggatttacatgtaattggaagaaataacacatctcgatttacatgtaattggaagaaataacacatctcatatatcctttatctgtttgtcccaatggcaacatcttgcccaattatagtgtaatataattaggaaattgacattgctctcatctgttgaacttactcagtttttgccagttttgcatgcactgatttttgtgtgtttgggtgttgtgtatg

SEQ ID NO: 71553 - DNA, 1243 bp, Homo sapiens
tacttttagtagagatggggtttcaccatcttggccaggctggtctcgaactcctgacctcaagtgatccgcccacctcaggcttccaaagtgctgggattacaggcgtgagccaccacgcccagccaggcagtatttcatatatacaaaattatgcattctttttttaaaaaggtaagttatgctgcagtaatcaaatgccaaaattgagagtaatcttataacatgttatctgttagaatatgttcatagttctcttttattcctttttctattattttatattatcaaagtcgtttttctctttttaaatgagtttggcttgactttaagcttcgggaaggacaatagaggcaataaaattcctttttcatgtgcttttcctcagctctttagaaggagaagtacattattctgcagaaaaagctgtgaagtttatagaagatcggataacggaagaatctaaaagttctcgccatctccgaggaccacatctagctaaattggagctgattaggcgtttacgaagtcaaggttgtaacgatgagtacaaactgggtaagaaaccatgatatctggtaagcctggagaatgcccttaatacccaagtgctatattcattagttgagatctacactggacagagtcatgtttgggaagcagatgtcttcatagcctgaaaatatttgctaatgaatggatcacttataaaattagtcctttatcatatattcaccttggcttaacattaacttatctccctgttccgtcagagtctttgtcaggcattctgttgctgacccaacaataaagtcaaaatcagctggttgcggtgtctcacgcctgtaatcccagcactttgggaggctgttgtgggtggattgcttgagctcaggagttggagatcagctggggcaacatggtgaaaccccatctacaaaaaatacaaaaaaattagctgggcataatgacgcacatctgtagtcccagctactcaggaggctgaggcaggagagtctcttgagtccaggaggcagaggttatagtgatctgagatcgtgccttcactccagcctgagcgacacagccagaacctgtctcaaaaatttaatttaaaaaaataaaaaaacctggctgggtgcattggctcacacctgtaatcctagcactttgggaggccgaggtgggcggaacacctgagctcaggagttcaagaccagcctggccaacatggccgtaaccc

SEQ ID NO: 71554 - DNA, 1079 bp, Homo sapiens
cctgggtgacaacaatgagactccatctcaaaaaaaaaaaaaagatacttgtgccaccatggtgctgaattctagttagggcttaagaatgaacactgaaaatcattaatttctcaaattcagtattcccctaaaagagagaggcttcattctttgctacaacacttctctccccttccctctattttggaagtgcttatgtggggacttttctgttatgaatattagttttctagacctggtcattttattgaaggaaagagtagtttactactctttacaaatacaaagtagtattactttgaaaatgcccttttagatttgcaaaggaaacatggagtgggtgggggtaagccaacctactacatactaaaatataacttacaaaataaattgaatatcatggttcctaaggaagatctgtcacaacttgggtttaatcctgtgtgcatcattcaatctgattttagctcagatgactggcagttctatctgacttatttcgattctgtctttcgactgattgaagaggcctggagtcctcctgctgaaggtgaacagtaagttgtcttctttcctgaattataacagcactttttaatatagtgtagtgaaaggatttcattataagccaattgaattctctttttctgtctcaataaagtattcctttcaaagtaagacattttttcatattttttaaagtataaaatacacaagttcattctaaaaatcatgttagtgccaaaatatgtggtgtgctaatttccacttatcctaccattccaaaaataactcttgttaatagtttggtgcctttccgtgagatttatttccatctttatgctaagataatttttctttttctcctttttttttttttttttttttttgagatggagtttggctcttgtcacccaggctggagtgcaatggcacgatcttggctcactgcaacctctgcctcccagaagcaagcgattctcctgcctcagcttcccgaatagctgggactataggtgcccaccgccgtgctcagctactttttgtatttttggtagagacggggtttcaccgtg

SEQ ID NO: 71555 - DNA, 1074 bp, Homo sapiens
gtgagcagaatctggtgttattaactttattaatttcatgtgttaattgttgttaccaatttaaggtaactagctactagtaaactgtgtaatgaaaggaattggcatttctcttctagtatgtgaacatctcaaagatacctggaaggctttcctcttcaaatacctgataatactcataaataataaacagcataggcatgctccctctttacattcttctagaaaaatgtataaataaccgacttaaatgctaggttgtattgtggaagctcagtatttcaagaacacataggataatgaatctttagcaaagaaatcttttgtaaaacaaactgctccgtaatgtacctccttggcagggaattcatattaggtctgatatttgacatggtggattgataattatgtgcccaattaacagtaatgttaatatcaatagtgcaagcaggggagaattagaatgaaacattatttttcttctttcagtctatatcggcacaggatgaaaacctctcaaaaacaatgtttctgccccttgctgagagaatggtcgaaaaaatggtgaaagaggacaagatagaagctgaggctgaagtgagtattttaagccttacttttgtgttttcatttttttgctagtgctacaatattatgttataatactatgaactgttgttttgttccagtttgatagctgggtcctcacttttggcctttgggtaaatctgaagccctcagcgtaggtctaatcactgacctgtttccagcaagtactctaggctgagatgtgtatagacgggagagatatagatggagaagatcctgttacctgcttcgtactgtcagtttcatctcatttgaagacatgctctattaaataactttttaaaaacctataaatgactgtctttttattattgaaaagtttcagaggttgcacttcttgttttttttctgtaaggttgaactttattatatgatcctggaacgtttgggaaagtaccaggaggccttggatgtcatcagagggaaattaggaggtaatttttaaacattttcttaaagcttttt

SEQ ID NO: 71556 - DNA, 1404 bp, Homo sapiens
tttaaatgcctttgggacagggacgcgatctttgaatctttgtcaggaatagatagtttcttctacttcataggacctccatgtaatttttgaattagattggcagtaggcaaaagattaaaaaacatatgaaaattacctgatggagtttttagcatcaattactagttggctaattatggatagagtctcaattatgcttgaataggtctattcttttttaaaagcatgttcttgcttttaagtatttgcatattatacatttcataatgaaagatttcagttctaattattggaatcttgaaggaaccatattattttcctaagctaagaagaatttttgaattatggcatggtaatcttttctgatattgaagtttaagtatattctctgggcatgtttatttgtttttgctaataactggttagtatggtatcttaagtaaagtttattgatgtacacttacaagccaaattttgtgtttgctttgtagtctcctagaactatattggattgcagcatattctggaaatgttggactttaattttagtaaattctggttcaaaaagtaaagtatcactcataacatgaaaattcacctttgtgattactgctgttgctaaagccatcaagtcactaggaatttacactaactgggatatgtaaatatattgctgttctcccaagaaactttttgtcgtgtatctagatcattaatccccttctgtatggtgttttctaaataaaatatttatggttctcttttaggctggcatggctctatataagattgtccccaaaaatccctactacttttggtctgtgatgagcttaattatgcaagtgagtatggcattcagaatgggattgaggtttggttttattttttatatagttattgtcctcagtgtgtcttctgaactggttttttttgtttgagacagggtcacgctgtcacccaggcaggagtgcagtggtgcaatcatagctcactgctgccttgacctcctaggctcaagcaatccctctacctcaacctcccaagtagctgggactacaggtgcacaccaccttgcctggctaattaaaaaaaatttattttttggtcaggtgtggtggctcacgcctgtaatcccagcactttgggaggccaaggtgggtggatcacgaggtcaggaaatcgagaccatcctgaccaacatagtgaaaccccatctctactaaaaatataaaaattagctgggcatggtggcatgtgcctgtaatcccagctactctggaggctgaggcaggagggtcgcttgaacccaggaggcggaggtttcagtgagccgagatcatgtcactgcactctagcctggcgatagagcgagactctgtctcaaaaaaatgttgtagagac

SEQ ID NO: 71557 - DNA, 1025 bp, Homo sapiens
tttcttttctatttgatctaccccatcctggttttgtgcctcatcacctcaccttttctttcttcctattttgtctcttcacagtactgctgagatactgttcctagaagagtatagatttataaatatcacttctctattctgtataggctccttttttaataccttacaacaaaagtaccttggtctacctttcaacacttttcctgctactcttaattgttttagccagacatcctacttgttttatcagcatacatccctttactttcttgaatgttttttgttcagactcatttttctcctacttcgcgttgatacatttacccattcacctcaaatatttgtagttttatatgtatcgttaccacaccccgcaccccccaccccccgccccctgccaccatgttatgtttgaccttcaaagtcatctgaaagatggctactttggaggggctttaatgataatgttctcctctctactttcccttaaagaaagaagaggtaagaaaatgaacaattttgccttccttggaaataccctaggatggtgttttatataggacatttatttttatatttagttttattattttgattttgagacagatttgattttaatttgttgcccaggctggagtgcagtagtgtgatcatagctcactgtagccttgacctccctgggcttaggtgatcttcccacctcagcctcttgccagtagctgggaccacaggtgcttgccaccaccctggttaacatacatatatatgtgtgtgtgtaaggttttacaatgttgcccaggctggtctcaatctccttgggctcaaatgatcctcctgtctcaacctcccaaagtgttgggattacagtcatgaatcatcatggctggcctaggacatttattttttatttttatttatttattttttggagacaaagtcttactctgttgcccaggctagagtgcagtggcacgatctctgctcactgcaacctctgcctcccgggttcaagcgattctgtc

SEQ ID NO: 71558 - DNA, 1075 bp, Homo sapiens
aaaggagaattcaggcagagcgaagagtttagaggcatagagttatgtatgatacatcccagagaatctggtggaactacaaatagtttgtggctacatgataaagtgctgagggaaagaggagacagaggccagatcctataaggtcttatatgttgtaaatgctatgagaaggcttgacctattccatgcttcatttaaacaccacctaaccaagagatgaatgatgattggatgaggcaaagcagatacttcttctataatgataggagacatctatttctgccaaataggaagaacattaaatgccattagaatgttcttgaagtataacttaaatcttatttctctttatcttagcggagttagttacaaaactttatgaggcagctgtgaagaaagttcccaatagtgaggagtatcactctcacctcttcatggcctatgccagagtgggtgaatacaagaaaatgcaacaggtaatttgatccccaaacctactgggctatgggatttactattagaggcaaaagtctctttcttgtgatttaactgcactgggtatgtgtgtgtgtagaattgaatttatggatttttctgtgtggaggtcagtcagttgttttccttatgtgtttaaagttgaactattattcaagatctttaaatgttttatttggaaataagttgattgttcttttgtggcctgatgttatgttttgtttggttttggtaattcagcttcagattgtcctactgcatcagattgctgttaaattttcagaaaatgagcagatataccagagcaaaaaatgaacaactatggaaagagtaactttaaagtttacatctaatttgtaaatttaaactgttgatagcctgctaagatttttaagtccaccagggggaaaatccttgttgcctgggatgtttctttttaaatttattttttgttttttgttttttggtttgaggcagcttatttggcagctaccatattgtagatattctttacatacatctgaaggagcctcatttgaacacatttgaattaggttgcgggtaaagctaacatctc

SEQ ID NO: 71559 - DNA, 1070 bp, Homo sapiens
tccagtgtgtctcccgggtgacagtcacttctttgctgagttaggacatttctcttgggtgcctggctcaggtaattattccactatagttcatagtttaggagttcctgaccccaggatggtgtgtgatactggtctgtggcctgttaggaaatgggccgcacagtaggaggtgagcagcagggtgttgtgggggagagcattactgcctgagccccgcctcctgtcagatcagctcttaggagtaggaacacaaaccctgttgtgaactatgcatgtgaggaatcgaggttggcgctccttatgagactctaactaatgcctgatatctgaggtggaatagttttatcccgaaaccatccctccctgccatctgtggaaaaattgtctttcatgaaatcggtccctagtgccaaaaaggttggggaccactgctctagttcataaatgaaaacttgcaggtcctcaatcaaaagtggtatttattctgacctcctcttggacagtgtggtagctttgtgagtctggtcctattttgcctcagaagtgacagggtaccttggtgagtgaagactatcttgcgtttctgtagaaaagtcacttggcacaacctatttttttccattctgaaaatatgaccatttaaaaagccctgacttactagaacttctctcaatgaatctagaacttccatcaccattggatggctgagaccacctctgccataccaaaaccttgctcataaccaaaacagtccctgttggtcttttgccctggacctgtgacattctggactatttttgtgttcagttttggccaagtgttaacaagcatacaaagctgggcacagtggtttggctgggtgaggtggctcatgcttgtaatcccagcactttgggaggccgaggtgggtgggttgcttgaggccaggagttcgagactagcctggccaaaatggcaaaaccccatctctactaaaaatacaaaaattagccaggtgtggtggcaggcgcctgtaaccccagctactcaggaggctgaggcagaagaatcacttgaacccgggaggc

SEQ ID NO: 71560 - DNA, 1042 bp, Homo sapiens
tgtgagccactgtgcctggcccaggctcaccttcttaaccactgtgctagaaactacctcactttgagctgaagacactgatttgcctgaggtcacacagatggtaagtggcagagaaaggactctgatttcctatttccccggggctgcatattctcatgcccttgccctccagtgtatattttcagagggcagagatatatatacaaggtgggtgatggaaggtgagaactgaatccagggttcatagtttgtgactcattacagctttgtgcagcagctgcctgcagacttttttttttttaaactaaaaacactcaatactttcaagaataatttgatttttaaaattgttcttgaggaccaaagagaatttctttggtcccatagttatttagaattaatagtgttttgactgtctaatgggaaacaccatgtccatttcacatcactaaacatcaggatatattaacaagttatattctcaaaactgaagtcagaattatgtagcttttgtaacatgtacatgggaagaggattagaagaggctttcttcagtaattctaaggcgattagtataaactggcaggactaggaaaagaacggtacagactgtccgtgaattcagcacttaagcacatttgacttttgaactccacacttttgttgtttaaatacattactacccccaaacaaccatggttccttgaattcagacattctgacaaatgaacaaactcatctatggtggtacttgcccaccagccaaaaattcaacaactatcagcattaattagtgtttactggtgggctgactgccctattaggtaggtaagattattgtgatcaaactgaagcctagagattaacttgctcaaggttgtagctaccaagttgtagagctgggatttgaacatagacattctcactgagagctcagctcttcaccaagttcagattcagtagcatcactgtctttgtacaacagtatttgtactgccaaggtttcaggatttattttacaattgtgttggaaaccttg

SEQ ID NO: 71561 - DNA, 1026 bp, Homo sapiens
atcgttaccgccgctcctagggagaccggagatctccccgaaggtggaagccggctccggcacgagggtgggacgccctgcctgagggaagattccctaccagagatttttttttatttacgggaattgggcctagagggttgtctgactaggtgggcttcggtgcataggagaaactgaggtccggagtggggaaggggctgacgcaaggtcacccagatcgagtcaggagcaggcccgagattccaggctcccaatccagagctgttgggtggagaagcagctactctggtcacacgtgggaggcggggggagggggtcttgggcctaaaatagcggtgaagagattgtgatagctcgtgtcagaggggcatgcagagctactggagggcttctcctttctgcagcttctctgtggttttctctgcagctttccttccctgtgctaagcagatccctctccacaactcttacctcaacccgcagacttgaagaccttgatgtcatctcatccatttaccctggtagtgaaaaatcacagattttgagtttgggagaaacccttttccaataaccgaaatgtgtaattggattggtcctttttgcatttcctttcctcttagatggttttatggtcttggtctatctcacttaatggtgaggaagcttcaaggtcagtggtttttacaaaagtagacatcgtatttatagacctcatgtggatgttactaaattggaggcttctctccaaggtgggaatcgttttgggagcggggggcggtggttaactttgtttctggccacagttagtccggcttttatttcataatttgtgtgatttttttttttactctcacatctcatttgattttagcaacaatcctatagctaaggtttatagatgactcattatgacagtcactggccttggccttttatatgggttatctaatataatcttcacccattctcaagaggtggctactgttttttcctgcccctgaaccctttaacaacaacaacaac

SEQ ID NO: 71562 - DNA, 1042 bp, Homo sapiens
gcgccattgcactccagcctgggcgacagtgcgagacactgtctcaaaaaaaaaaaaaaaaaaagactgaattggaatagttggtaggggacagggacattggagctttgacaaacatctgacttgctatgattcttgttatttgctcctgggcttctctggctggttttagattactaagtaatgtgtgcacaaaacaatatgatagttagggtggctgagtagtgggctccctctaatattttattttcctttatagaacattgtggcaggaacaaaaggggaagctgtgactcttaaataattaaatacattaaaaaagggtaggagaatcaagggttggaagagaagattgcagtagatactcttggctttccttgccctatactaaaacacacctctcctagatatgcatattaactgcctcattcctctgttttgtaggagactgagtgccctttgcggcttgctgtctgccagcactgtgatttagaactttccattctcaaactgaaggaacatgaagattattgtggtgcccggacggaactatgtggcaactgtggtcgcaatgtccttgtgaaagatctgaagactcaccctgaagtttgtgggagagagggggaggaaaagagaaatgaggttgccatacctcctaatgcatatgatgaatcttggggtcaggatggaatctggattgcatcccaactcctcagacaaattgaggctctggacccacccatgaggctgccgcgaaggcccctgagagcctttgaatcagatgttttccacaatagaactaccaaccaaaggaacattacagcccaggtttcaattcagaataatctgtgtgagttgtgcttgggattagggaactagaatggtatcaaaatcccaaggcaaatgggaacagggctttggggccagatagatcttgattatagaaacccgactgtagctgagtaacactgggaagaatacctctctttcctataaaatggaaataacctccattggattatagttagggttcataatggtg

SEQ ID NO: 71563 - DNA, 1027 bp, Homo sapiens
tgccttccagccaggcctccacctcccaacctctgtttctccatctgtaagaagggactgaattgcgcagtcagtgttcacagggttgttatgagggttgattccaggctcagaactgcgcctggaacatagccagtgctgcatagtaattactgttactattttcatttgcctcaggaaacttcttgtggaccacggacatggcagcctgcgtgaaggagcttgttttccatctcctggcagagctcctgcgcacggtgcacaccctggagcagaggcggcaccccgctggcctgtcctcctcaatcgccctccagctgaacccctgcctggccatgctgatggccttgcagtcggagctccacaagctgtacgacgaggagacgcagaactgggtctcaggcggcgcctgcgggggctccgggggggcggcggccggtgaccagggcaggttctctacgtattttcatgcactcatggaagggtgcctggctgtggccgaagtgaccctgcctactaacatgagtgtcacagccagtggggtgacctcagcgaccgccccaaatctcagtgactcgtcctcctcctcctcgtcctccccaggacagaccccacagagtcccagcctcctctccaagaggaaaaaagtcaagatgaagcgggaaaaggcctcctcgtcgggcaagcgccagtcttcccgcaccgtggactcggaccccaccgtgctcagcatcggaggcagcaagcccgaggacatgctgtggttccaccgcgcactcaccctgctcatcatcctccgccacctcaccaggaaggacccacaggggctgggcgtgacgagtgacgccatcgccgatgcctgccaggccctggtgggccccaccgcccacagccgcttgctggtgatctccgggatccccacccacctggacgagggcgtagtcagaggcgccatccgcaaggcctgcaacgcccacggcggggtcttcaaagacgagatctacatcccgctgcaggaagaagacac

SEQ ID NO: 71564 - DNA, 1018 bp, Homo sapiens
tctactaaaaacatagaaaatagctgggcctggtggcgcacgcctgtaatcccagctactctagaggctgaggcaggagaatcacttgaacctgggaggcggaggttgcagtgagccgagatcacaccactgcactccagcctgggccacagagcaaggctctgtctcaaaaaacaaacaaaaaattctttgcccattttaaactggcttatttgtctttttattcttcaattgtaagagcttttacaacgttctattatattaccttccagactgagttgtgttcttgcttggttataacaaaactgagggttctgttaaagcccgtagagctattttattttattttattttattattttatgtttatctggagagctattttagatgctaaatgtaagaacccagatgcagtggtactttttcctgaaaaacttctccctctacactcctcaggtctcacagtagtaacccgctctccagacagcaataatgtagccagcagtgctgttggaactgctctgccaaaatttgccatccgagggatgctgaaaacctttgggcttcatggagtcgtcttagatgttgattcagtgagtgaacagccattctgattaataagctattttatatatactgaggctgtcatacccagattcccaggtaccttaaaaagtgattatacagatgagtttctcttcaaatcagggacgaagacacaaagcaaaaatgctctaatgccaattgacttgcctgagctttcctcagggactcagatcagggctggcagtagatggtaggctctccagtctcaaagctgtggccgccttcagaccacaccacctctaccattattttctgtccgacatgttcaaactgttcctgcattatatctacccaagttcccagggaaaagtccccattgtccttgatgaatggatgatctgtcattgccatgatggtcatacagacacaaatcaaagaaataggctgggcgtggggctcacacctgtaatcc

SEQ ID NO: 71565 - DNA, 1027 bp, Homo sapiens
aaaagcacttacagtattcagtgctacttagattattgtagacatgtctgaaataactggtttcatgatcaaataagtttggaaaatgttgaatgtcccctgcttgtggagaggccattcgctttacccttactgaaggctctgaaaagtcctacagtagtctgttttaatttccctaacccaggatttcctagacttttctggagtgtggaccgctgttttggaggcacacctaaaacttctgtccagcagtcttgcatagtctaggaaacactgagctggatgttctccaagatcccttcagttctggattcatccagatactctagagtttctcaagaggcctctcctgctcagccactgttcttgacatggttcaggaagcctgagctttggtttctctttcacagaattgaagaactcacatgtggtgggatggtcgagcaggtccaggaagcctttggcgagaccatgacctctgttgtgtctctgtgtgctcgttaccctatcgcttgcgcaaatagcattggactcttatgtaccataccttacaccaggtaagtacggaaaggccttttgttgtatgtaagttaccctgcagtatagtcgattaagtgaaagtatttttaattttaaaaattggattttttgctttcattatccagagctagctatacaaaacttttctcctgaaagacacttaaggttcctatgtaaatttcttattattgagttccaacatgactaaatgcagccattagggttatattacattgtgaagatacagaggttcaaagaaaaataaaaggtccctaggaaattacttacatatttggcagaaatattttgcatatatacatttatttcctctcttgggtcacttagttactaatttgaagatgtcaagcattcattgaatccccttaggacaaaatacatgatttttttccatcatggcaacattgagttgattccatcgatttttgctgtatataaacaaaccagaatttgaagttccttgttaatg

SEQ ID NO: 71566 - DNA, 1855 bp, Homo sapiens
gccatgattgctccactgaactgcagcctaggtgacagagggagaccttgtctctaaagaaataaaaaataaaaataaaatacagtattgagaagctgagagcatggcatatatctgactgatttccattgtgatcacagagaagtgattcagccagacgtgatggaggaaatggtggtatcttgtgttattaagcacttgaacttggttgatgcactgcagtctctaataaatttccaatatcaagaagaacatgctgaagaatatgatttattatgtaaaattatgggagagacctttaagaaactcaatgccatggagagacagctgcaggtaaatgtctgataactgttggaaacaatttcttttatggaaatttaaagaaatttagaatgtgatctaatttttaaaattactattgtgactaaaattttgaatcatacttgtttttattttgcatctattttaatgtatttattagagtgttgcagaactggaacaaaaatggcaaagtgaagttgatgatgccatgcaggggaaactggagaacaacatgcctttcttttatgattaccattttaatgaggtgagcaaattgtatgatttgtcactggggtattgccatttagagagcaaaggtatatactgtgtgtgtgtgtgtgtgtgtgtgtgtgtaggtaaaataatgtcatttcctaaaatgttgcacactccaaaaatgtacccattctttaaaagaggttaaatgaaaattgattagatcaacatgcagtatacaaataattactcattaggttgtttttttaactgattaatagttttataaagatatataaagaagttgtcatcatggtcaaattttgctttcaagccttaaaaaacaaaaaataggcaaaattataagccctgaaagaattcccagaaagtagtcaatgccatttttaatcattaaaatatcaaataataacttacaaatgagtttcaagcatagaaatgtggaccaaaggtggtggtttttctctgaaattttctgttcattttaatatatgtatagtaaaacttggttcttgcagattctgcataccatcttttttttctttagaacaaaatgaaagaactagaacttttatgttcaatgaaggaagtctcctttgatgggaatgatcttgaaaacatggtcctatcactgaggttagtcgtattaataactattaaggctattatcaccttgatgctcaaaacacactgtaaaggtctagtctcttaatagatatatttttaaatgttgtgaatttactaaatattttagagttggaactcatttggtaaattggaaattttggttttagccttccaaagttagcataggcatttgaaacagaaaaaggagccagaagtggccagagtttctaacagtgttacttggatgaggaaacagggaagtaagcaatgttgattaggttacttttgcttagtttcccctgtgtcttctcttattctttgtaaacatttttttttaatagttgtttttgataagctagagaacaactcaatgcacatcagtctttctttatagggagaagttcctacaagaagtgaattctcttattcagaaaccctcacacccactggctaaaacaaagacgttagtgaagagtttaatgaaccgagccgagctgttgctgcatgtcaccatcgcagcccagtcgggcctcacgagaagcatctctgggacccctgctgaaacaccaggtactgctcaaagatagcccctaatcggcttctgttatatgaacagagaatatactctgttcatataagacacacagctatattttgaaaaattcactcttgg

SEQ ID NO: 71567 - DNA, 1042 bp, Homo sapiens
atgtttacaggatgctaaccctgtgggatttgcaaagtggccaatcttaaagatcctttacagtatcttttttttttttctgagtacctttaaatgagaattgatcaggtcttctcttggatatcaactgggcttcgcccttgaaaaaaagagggaaaaatgaaaatatatctctgcttcttgtcctggaaaaaggcaaaaaagaaaaaaaaaagcaagtataatatctgacaacaaggaaagaaaaaacccttaaatgtaggaatttttaaaatgtttctgattgccactgatatcaagcatttaaaagcctcagtgttatcatactgcatgctgtggaaaattaaagagcaatttaatgtttacattgtttttcctttccttggctgctaagctaaatcactttctctttttctgtttagaatgttagaagagaaggaagagccaggatttctcactggtttaaagattcctgccccatgggctgctggaaagactgtggaaacagtccaccccgtcagagacaactataaatttaaagaaacggtccatatcccaggagctcgctgcctgtaccttagatttgatagcagatgctcttcgcaatatgactatgacaaagtaagtaagaactgggttactattggttccacctcgagtaagctgattcttagatgcttcttatttttctttgctgctggtcaccattcttgactgatttctgtctgcagatatctctaaggagaactttcctaagataaagttcttatctttgaagggtagtgattgagggagttaaagaaacaccacctctgcagtctaagaacaatgttttaatgatatgttgaaagtgtactttgtaagctttcaggtgcttagatatatgagaggaaggaaatgttccttttcattctgcttaccccctgccctccctccgtgcttgaagttaccccagatgtgtgatgtccattcatctagaaaggtctcactgcccaattcttggggcttctcatgtatcttttgggaaaaggtggctttttag

SEQ ID NO: 71568 - DNA, 1023 bp, Homo sapiens
cgttagcatgttaaacctaaagcatggaccagttgaaagataatagattccacagttcccctcagaactgataattgcacatttcagttttatcagtaaagtaagttgggcctggggaaagggtctttagcaaaaataacagatggaacttacttaggagatcttggttcagagtaccatccaaattgctggtttatgagaaaggctgagtatgtgtgttagagctggtgaaggggacgaaggtgttgtttttatatgttatttataaaatactttgactttgtagttgggtgccatttgatttctataagtttgatttaaataatatacctagttgttagcattattactaaggtgatttgcttaagaatcaattatgtatcttttatttgtcatcttatactaattatataaaatttatccttttatgaataaaccatcaatattttattgttacatttttcctgcattttaaagactaaatgatgaacttttacactacattctgaagattgttgtacgagaatcctgtatcttaatcaccaagtgccaaactgtctctaaagatgattttcaaaagctcctttcaactgtgcctgtaagtaaaaatgtgtttaatgaaagcaaaattatatcaagcatccctgttttcattttattatattgacaggtgtgtgtatacatacagacttacaataatttatgaaaggccgggcgcagtggctcacgcctgtaatcccagcactttgggaggccaaggtgggtggatcacctgaggtcaggagttcaagaccagtctgaccaacatggtgaaaccccgtctctattaaaaatacaaaaattagcagggtgtggtggtacacatcggtaatcccagctactcaggaggctgaggcaggagaatcacgtgaacccaggaggtggagtttgcagtgagctgagatcgcgccaccgcactccagcctgggtgacagagcaagactccgtctcaaataataataataataatttatgaaagtccgt

SEQ ID NO: 71569 - DNA, 1050 bp, Homo sapiens
tccagcctgggcgacagagcgaaactccgcctcaaaaaaaaaaaaaaaaaaaaaaaaccttttcagacaagagagcagaatttataggccattttctatttattgtaagtcttttttttttttggtttgtttttttagttcagtgaactttttttctttttgcttgtttgagacggagtttcactcttgttgcccaggctcgagtgcagtggtgtgatctcagctcaccgcaatctccgcctcctggcttcaagtgattctcctgcctcagcctctcaagtagatgggattacaggcatgtgccaccatgcctggctaatttttgtatttttagtagagatggggtttcaccacgttggccaggctggtctcgaactcctgacctcaggtgatccacccaccttggcctcccaaagtactgggattacaggtgtgagccaccacgcctggcctcagcaaacttttatacaggaatacagccttaaagtgattaagtataatttagtgtccaagagagagctgaatggttggtctgaaagatctgtatgacaggggtgagcatagatgacaggaagttgttttccttccacagcacattatgcttcgaatctctttctgtggagcattaaggcaatgattgaaatctgatgctctgaggaaacttttggaggggatgggtatattcactatcttgattgtggtgatggtttcattggtgtatacatatgtcagacttatcagattgtacactgtaaatatgtgcacttgattaaatgttaaacctcaattaaaaaagaaaagaggctgagtgtgttagctcatgcctgtaatccccagcactttgaggggccatggcaggtggatcgccgaggccaagtttgagaccagtctgggcaacatagtaagaccttgtctctacaaaaaaagtaaaaacaaaattagcccgatgccctggcaagaacctgtagtcccagctatttgggagactgaggtgggaggatcacttgagcctgggaggtcaaggctgcaatgagctgagatcacaccact

SEQ ID NO: 71570 - DNA, 1016 bp, Homo sapiens
aatgaggctaggcgctgtggcccacacctgtaatcccagcactttgggaggctgaggcaggcagatcacctgaggtcaggagttcgagaccagcctggccaacacggggaaaccccatctctactaaaaatacaaaaaagttagctgggtgtggtggcaggcgcctgtagtctcagctacttgggaggctagggcaggagaatcacttgaactgggaggctgaggttgcagtgagctgagatcatgccattgcaccccagcctgggcaacaacttaacttttttgaaactctgtctcaaaaaaataaaataagataaaattaaaaaaaataaatgcaagaaagaaacaagtatttgaaaaaataaactgagcagagaaatcagtaaccatgcaatgcaggagaaatgcagatgttggactgatgactttaaagtcagatgaagacttaaagcagccattataaatacatttaaagaactgaaggaatccaagtttaaaaaaattaaaggcaagtatgatgactatgattaagcaaattgagaatttcagtaaagagattattttaaaaaacaaaacaaaacaacaacaacaaaaaaaaatggaaattccagatttgaaaagaaaaattcagtagagtggctcaacagcagatctgagctgctgggagaagaaagcagcaaacctgggccatagattagtagagttgttctgtctgaagagcagaacaggacacttggggagtactggtcacacatttgcagaatagaatttccttccctgtgggttcatctgatgctttctcatggttagactgaagttacggattgggggaagaataccacagaagaggtatccccttcacattacttctattccaaggtacatgatattgacatgacttattactagtgatattaaaaactgatcactttgtttaaatgatgtctgccagatttctccactattaagattccacttctccctttccacactctgttagtctcgaccacactgaa

SEQ ID NO: 71571 - DNA, 1023 bp, Homo sapiens
tgattaggttgtgtgatgatgcctataagaaattctcaggtttatgccacaaaaagtttatttcctgtgaggaattggtatacctgttattgttagaaaatgaacattaagtaatatactggactttctctttgccgtgggtggtaggaagcttatttctaagttttgggctcagttattagggctttttattttgcattaatgttaattggtcctattatacctgtgtttttaatgtaagccacttaaatcctctttggaagtaggtcacagataaatcagttactaagagctatctattttgtgagatttactcctcacacaggagttaagcaaaattaaaaattaaatgctggcctttgccgagtcccaacctagtgccttaccaaataaatctgtgggactagggttgtgggttgtcaacattagagagcatccttgcccttccactttgtagcagtgcttgtgagaaatatgtatacaggtagctggtggcatggtgactgaatacagtatgctctttttgcaggagcgtgttatgacacagtgaacaacatgctatggacatgctcaaatgactatatcgatcagtggtgtaaccctgggaatcaagccttccattatgtctgccagagacttggagtcagtcacattatcactgagcccaaaggtgaggtgcactcagggtcttgcaggaaaagattttcctctgaaatatgagagaataccacagcattagtaggtgaaaacatagcccaaccccagaatgtgtcaccagttttccctctttgaacttttgaaacctaaagtcctttgttatctgtaaccatgaaagatgagttatgattaagtaaataagtatgtaaataaatagagcttttgaggtggtccatagacttttttaaaggaaaattgttatgtccttcctgaaattgttggaactttgttgcaaaaattgattatttgtatttggcatgggattatttgctgttgtaatgttttgcattggtaatgacttaatta

SEQ ID NO: 71572 - DNA, 1035 bp, Homo sapiens
gacagtattttattttcacaggcttcttttgtatcaaaggtaagtggcaaaattgttaatagtttttatgatttgggtaagtggataattccaactgtagaagatactttctagaggacagttttttttgtttttgtttttgttgttacctaaataaacattttcatgacaagctgaaggcctgatctgggtttgtcccttgggagaaaatgaaatcttaccctaaacaatggaaatactaaaagaatgcttgttgaaaatatgtataatatcaaagaaagacctcagaaggcaaggacatatttagaatttggtagaaatgtgcacgctttggcagcacatatactagaatttggtagaaacgggtatctgtattctaaacatgtggtctcattgtactttttttttttaaaaaaaacatgaggtcttgttatgttgtccaggctggtctcaaactcctgggcttaagcaatcatcgtacttttatgtggattctttaacgtgatgttgctacattaaattaaaaattcaccagttataaactaagaaacttttcaaaagtaagcgaacattcaaggtgtctgtaaggttttggccaggggcagtggcttatgcctataatcccagcattttgggaggctgaggtgggtggatcacctgaggtcaggagttcaagaccagcctggccaacatggtgaaaccccatctctactgaaaatacaaaaattagccgggtgtgatggtgggctcctgtagtctcagctactcgggaggggctgaggcaggagaattgctggaacacaggaagtggaagttgcagtgagccgagatggctccattgtactgcagcccaggcagacaacagtgagactcagtctcaaaaaaaaaaaaaaaaaaaagtttttattccattaaaaactaatacctattgccatcttaataagcatatgtctattgaaaacatcttggtgaaaatggtatactcacaaagttgctaattttccaattattgctgtctttaggtttcttaccagt

SEQ ID NO: 71573 - DNA, 1145 bp, Homo sapiens
agcaaagagctggctttacagtatacgttttccatttgattgtaattaaaataatttttggcgttgactattttgggatatcattaaacatattttcttccttagatgactttggtgaaagtaatatttacccacttctccatcgtctttttccttagattttaacctttgagaccaagaacccgtcggaattagcagaacgtttgcgctctgtttgtgggaatcagagcaatgcctatgcccggctgctggaataccgcctgaatgccttgcgaggactgtggaatgcccagcgccagctggccttagaagaacagcatgaaagggaaagttcaggtgatgaggaaactttggccctgctcaaacgccagggcttgttgcagcaacctgagcaagcgcccttcacatcgaggatggggctcctgctggtcttcccccttattcagtcccagagtagaacagacccctctctctgtaacataactgctgaggtgctattgaactgccttcgtgactgccagcctttgagcttgaccaaggagcctgctgactgtctcaatggaattgaaactttgctgtgctcttggctagaggagacttctgacacaggccgacacatcccacataagcaaaaagaaaatgctgctgctgccctggtggctttggcttgtgccaggtaaggaaaatcgaatgtatcatttggtgaccttgtgactactgccacctgggttgggtgaatgaagaagaggccaagtatatttgatagaagtcttaacattcagaagtccttctttgctttcagtattgaatttcacagccttgacagtgcatgagatgctttcaccaaacttggcaccaggtgcctgagttggaaccaaagttcatgttttctgtttctggtataccatgataacatcttaaccagcagaaaatggagaatcaacccttgacatatctaattgtcccttagatggttagtgttttacatcaagtagttagcagaggatgttatgtctacttctcctaggaggatggtcaaaactttatagagctattaatttttcatacctgtctataagaagtacatcagcaagctagtgggctattattcacctggactcagtcacaaaattggtcacaaatta

SEQ ID NO: 71574 - DNA, 1036 bp, Homo sapiens
gaaaaatagaaccctggtcaaagggacagcacaaaagatgaaaactgggcaggggccacaacaagatggaactttcatggtaaaagaatttgaacagtaatttcttatgtattggagtcctcacaattctgacaatcctgctgtcaccagcagttatatgaagatctgggaaagtcaccatatgctggagaaagttttgcagggcttagccaaaactaaaaaatctagcaagaagtcagagtccattccagttttggcatccagttagaggctaaaactcatgaattaaagtgtggaaatttaatatcctcgttctcagttaggtttaagaccctttttacaaataagagatgttgaaaagtgagtttgaataaacacatatttccaagttggataaggtcgtgcagcttcagggtctaatttaattgataagtgatccaccctggatttgggctttagtaagagagaattccaccctcccatcatgatgtacttacttggctcgcatgagagcttttcaagtctttgttgattgcaacatgcaattcaatttggctatgattgctgtcttcattatgtgaaaaatggtagaaaaaaaatctgtagaaaggtttaagcatctattctaacatttgagagggtttcagtattctgcctttacttaaaagttttgtattggcagggcatactggctcatgcctgtaatcccagcactttgggaggctgaggcaggaggatcacttgaaccccaggagtttgagatcagcctagacaacatggtgaaaccccacctctaaaaaatgtttaaattagctaggcatagtggtgaatgcctgtagtcccagctacccaggaggctgaggtgggaggatcacttgagcccaggtggtggaggttgcagtaagctgagattgcaccactgcactccagcctggatgacagggcaagaccctgtctcaaaataaataaataaataaataaataaataaataaataaataaatagttttacattgaggttgcaagtctagccagtc

SEQ ID NO: 71575 - DNA, 1109 bp, Homo sapiens
tctgcaataaatgatctgccagtcctagtgtctggctttatgcaatttgttttcctttgtggatgaagtgggagtaagacttgttgctgtgaggatcagatgaagtggctaggatatggacacactttacttgaattggaaaacaagccatgtatccctaatctgcaaaatgtggcatgtcacacgtgtaatctctgaggtttagtttttgctcaagattgcaaaggtgacttgcttgatgctttctttgcttgagcacacatctcattcattaaatggtgtctccttttttgcacacaggatgcagaagcataattgaccttttccaagtctacttagcagaaatgaaaatggaatcatataaatacagtattatactttaaaataaaaaggctgtagcaaaagtttggctgacatagcttgcttctagtaatctgaatggcttatttaaataagttggatctatggactctccacagcctagatattatcctactgaagatgtgcctcgaaagctgttgagccacggcaaaaaacccttcagtcagcacgtgagaaaactgcgagccagcattacccccgggaccattctgatcatcctcactggacgccacaggggcaaggtgagagtacctgtgcttggggcgcttcactgcagctgcctggggtgcctggtggcaatgcgtttgcacgctaggtgtacttttcctttatttacctatgtttggggcaaggggaaatgatctgcaagatacaacttagttgttgcaaataagaagtgtaatccatggtgatttattagccatttcctgctgttgattatgttacacatgttcatttactcaaaaacgtgtttatgtctggagtactaccttagtagcttgctgtggttgcttccagaactgccgagctgtatacatatacatgtagaaatttcctttacccaaatttagatgcctgtgattttatgaattcagaagtcagtttttaattgcagaaaactaattattttctttttaacttacagagggtggttttcctgaagcagctggctagtggcttattacttgtgactggtaagaaaatccttggattgtgatgttctgtga

SEQ ID NO: 71576 - DNA, 1311 bp, Homo sapiens
ttttttttttttttttcttttttgagaatcttgctctgttgcctagagcgcagtgtcgcgatcttggctcactgcaatctccacctccagattcaagtgattctcctgcctccgcgcctcgactggctgtcattacagacacgcaccacccacgcccggctaccttttgtatttttagtagagacgggatttcaccatgttggccaggctggtctcgaactgccaacctcagaggatcctcctgcctcggcctcccaaagggctgggattacaggcgtgagccaccgcacccggcctaggatttactacttttttcttaacggggaaatactacattccccatgatgccccagatccggaaggaagtgagactcgcacttcccatgattgcttatagaccggaagccgggaccttaattctctttcccatcttgcaaggtaagaatcgcgggcctgtctgcaagacttgagttcaggactcccaatccttcgccatccgaacctggagggcatccagtcgacacctacaggggtcggacatgtccaaggctaactgagaggccttccagacgcttcatttttgttgtttgggtttgcggcagggcacaaagagggtgaggtagaatgccgtagtggctccctccggttcttcgccactctcttgggctgggggaacgaggccctttcggggacccgtagcagactggtgggtgttagaggaagcggggagacggcgcgtgcactgtgttcctggtcctgggttccagaggatgacactgagcctgtcgcagccacgttggggttccgcactgaagccaaaaggtttcgcgtctcccagcgtccccgaccggaagtcgcctcttggtctttgcgatctttttctctggctcaatttgggctgattccgtttgtgtccgcaattcctaaatcgagtttcttgaaaagagacactggtcttaagggttaagacgaaaggtactgaaagtaagggatttcaagttctggtcttggtgcttctaacctgtggacacattctgcatctaagttttctaattcgcaaaacagtaataaaaaataatggttgtacggacttctgaccgctcagtatttggcaaaaaacctaataggtgtgaggtagtttcaaattctcaaaaaaaaagtttatagtgtattggggagacaaaccccaaatgagtcatagtgaaggttggagtagaatgggtagagtttgagaggaaggcctgtatcttaccgggggagggattgtagtctggggagcccagcccattcatgtacaggttcattattgtc

SEQ ID NO: 71577 - DNA, 1047 bp, Homo sapiens
cagacaaacacatgactaaatagggcaatttcaggtagtaataaattctaggagggaaaaaatcccacagaaatgtgaggatgggagaatgcagttagttttgataggtggtttagagaaggtgatcgtgtgagctgacacctgaatgacaattagtagtctgaattttgttttgcttaattatcaaaataactcctcttgggttcggcttttatatgcatccagtaattaaaatgtaagtatattcaatgtactgatatctctcagcatcataggtaggaaaactaaggcattcagcaattaagtgactcctcccttgatcatgtagcagtgatagtactggatttagattttgaggttgcttctctgcccttttctgcctttgtgaaaccaacaaagctgcctgtattttccaactcttccttcagcatgtggtacctcctttacatctgtttttgttgctctgaaatccatacgcgacgatgagctgagaggggcagaaaattgagcttgttctgagactggaggcttttggtttatctcttgcaggtcaagtacattttgtcctgggctctccctggtggccacgtttgtttatctcctgcgggagtaaataaacttgccttgctgaaaaataacagttctgtgtctttgcagtggaaactgggatgtctttattaacgttaggtcctgatgtaaggccaagtttttggttagagttgctcaagtgcagaggccactgctaagatgacttacccctcgtgtccatggtcaatgtggagactgttatgagtggcacatgatgctggaaaagcagagccaactcatgtttgtaattgtcctagcaggccgtggtgtactttgttaggcagccacagaacaatagagaaactcagcttattccccttccctctgggaaacacagacagtacttgccatccaacgccaatgtttttaaggaagaaagaggcaaaaagtgatgttggcaaggtctctgggagttgtggaccccaaccaaggattggagaccctgaaatggattcagat

SEQ ID NO: 71578 - DNA, 1040 bp, Homo sapiens
aatagctatttcaatttctaactatatattacttatttatttatttatttttgagacggagtttagctcttgttgcccaggctggagtgtaatggcgtgatctcagctcactgcaacctccacctcccgggttcaagctattctcctgcctcagcctcccgagtagctgggattatagacatgtgccaccacgccaggctaattttgtatttttagtagagacggggtttctccacattggtcaggctggtctcgaactcccaacctcagctgatccgcctgcctcggcctcccaaagtgctgggattacaggcgtgagccaccgcgtccggcctcttaactattgtttgaaataatgtagagacagctccagagccatgaagaagtgtatgaagaagcagtgttagcttaaatgacatacatgtcacaattgcctatgtgaaactatcataattatgcatgagaagtatctatcctgcataacctccaccaataataataatgttaataatagtgaaaactaatgtttattaagtccttactgtctccagcctctgtgctaaatactggttactaagtttccctgaaaatactattctcatctgtttgttcttaataacaggatagcataattgtaagttgtaaatgaaataatacagtttatgtaataaaagggtaaaagagaagaccacctaccttatcttctgttgctgatctggatggatgtaggtggtgtttacctagtttcacctttggcagttgaaactactttttttttttttttttttttttttaagagacagggtgggccaggcgcagtggctcacgcctgtaatccccgcactttgggaggctgaggcggacagatcacttgaggtcagaagttcgagaccagcctggccaacatggtgaaaccctgtctctactaaaaatacagaaaaattaactgggtgtggtggtacacacctgtaattccagctacgtgggaggctgaagcaggagaatcgcttgaacccgggagtggaggttgcagtgagctg

SEQ ID NO: 71579 - DNA, 1040 bp, Homo sapiens
gtcatccaggctggagtgatcttggctcactgcaatgtccgcctctcgggttcaagcgatttttgtacctcagcctccctagtagctaggattacagatgtggaccaacatgcctggctaatttttgtatttttaatagagacagggttttgtcatgttggccaggctggtcttgacctcctgacctcatatgatccacctgccttggcctcccaaagtgctgaaattataggccactgcgcccagcccaaaatttcttggtttgaaataattttggaactcataagaagttacacatatagtagagagaattttcttgtaccttctctgagcttcctatatacccaatgataacatcctatatacccatagtatatgatcaaaactaggaaattgtgaagatggcattttgagacatcaggcagtgttcacgttactgttttgcttacctgggctttaatttttatgtgtttttttttcaatcattgaatgaacaaaacttggactaggctggggagtaactgatttgaactgttttttcctgaagcagtccaggacttatgtgaccgtggtctctttttcttctagttgatcataccagggttgtcctacacgatggtgatcccaatgagcctgtttcagattacatcaatgcaaatatcatcatggtaagctttgcttttcacagtgttttctgaccatacatttctagcctatttttgtattttaaatccttcctcatgtcctgaaagtaactttaaggtgtttgaaggattttcttcctaaatttctagcctgaatttgaaaccaagtgcaacaattcaaagcccaaaaagagttacattgccacacaaggctgcctgcaaaacacggtgaatgacttttggcggatggtgttccaagaaaactcccgagtgattgtcatgacaacgaaagaagtggagagaggaaaggtaaatcacagaaacttcttttctgctaaactgtttttaaagtatcagacatgtcagattggccatgtttaggaattgaataaatga

SEQ ID NO: 71580 - DNA, 1023 bp, Homo sapiens
acggtttcaccatttggccaggttggtctcaaacctctggtctcaagtgatctgcccgcctcggccacccgaactgctgggattacaggcatgagccactgcgccccagctgattctttacagataaacaaacattgactctgctttgacatgtgcttggatcaggtaactgcaccagctgcctttctcctcccacttctgcctggtcctccgaatgcctgcttttcttatttgaactcttctgtccttttctgaaaacctaacagatgcgaaacaggccattttccatgttggtggttattaagcaagacttgaacatttgtttgttgcttgtttaggcttttatttcagagttcacagaattaactttctttttttctgatctcttccagagtaaatgtgtcaaatactggcctgatgagtatgctctaaaagaatatggcgtcatgcgtgttaggaacgtcaaagaaagcgccgctcatgactatacgctaagagaacttaaactttcaaaggttggacaagtaagtatattgtcgtattctagagactttgggaactgttgatggtgtgtaggaattcagggtcttgccgttactcatgtttgcatacatgcatgcattcgctcactcattgattcagtagccatttattagcttccttctatgtgccaggtacagtttaagcagtactggtacattgtgaacaaggcaggtagtgttcctgccctcatcgagcctagggagatagacaatttaaaaacaaataactggccaggcgccgtggctcaggcctgtaatcccagcactttgggaggctgaggtgggtggatcgcttgagccggggagttcgagaccagccctgggtgggagactgggatagggtgacctgagtggctacaaggtctgttaggaggcctccgcaggggcctatgttgatggcctcctctccaagtatccacagacttcagcagttgttcttttttgttccttcctttggaatggaatattatataaaatggca

SEQ ID NO: 71581 - DNA, 1031 bp, Homo sapiens
tgtcttggaaaaaaaaaaaaaaaagaatgatactatagtctgtgtttatatggtggggaaggttgagtatcaaaaaaataacaaagaggaatgaatgtcttaagtgaatgcctgtttccccatctgcttcctcttctgctgggaggagagacctggatccctagaggtttcagttgcctccagagctgagtgccacagggatgcaggggaatagggatgttacctgtcgctggtaattcagagagatgattcagggtatagttacctgaaagaacaaattgccatgccagacgtcttggttcttatgacagaggcaaagagttgcctccaggattgcccaaaaggagacgagttctgggaacctcacgaagaggacctttcagtggaacctggggagattctcttcctctccattggatttaggaaagcttagaaccgggtgattcctcaacctcttgatttatttaattcttttctggtttttcttggctctactccaggggaatacggagagaacggtctggcaataccactttcggacctggccggaccacggcgtgcccagcgaccctgggggcgtgctggacttcctggaggaggtgcaccataagcaggagagcatcatggatgcagggccggtcgtggtgcactgcaggtgacagctcctgctgcccctctaggccacagcctgtccctgtctcctagcgcccagggcttgcttttacctacccactcctagctctttaactgtaggaagaatttaatatctgtttgaggcatagagcaactgcattgagggacattttgatcccaaggcatatttctcctagaccctacagcactgccattggccatggccatggcaacatgctcagttaaaacagcaaagactaagtcagcattatctctgagtccaccagaagttgtgcattaaacaacttcatcctggctctgcagtttctccttattcttcatgatgtttgctttgtagctgttgactgctttgtaggtattgaggtggtgggggtgtg

SEQ ID NO: 71582 - DNA, 1080 bp, Homo sapiens
gcattaaacaacttcatcctggctctgcagtttctctttattcttcatgatgtttccttcgtaggtgttgactgcgatattgacgttcccaaaaccatccagatggtgcggtctcagaggtcagggatggtccagacagaagcacagtaccgatttatctatatggcggtccagcattatattgaaacactacagcgcaggattgaagaagagcaggtaccagcctgagggctggcatgcggattctcattctcttgctaggcctcttggatacgctctccttttgagcaggaggacaggctctgatagacaactgtttgatttcggaatgggaaacaaactcccaactaaaagggcctctggaaactgtcaattattctccacttctcagctctgatttttcactgcagaggagcttagggaagggcaccatcctatcagcctggcctgccagattgaagaactgccatgcagaaaggttctgatgttctcaggctcatgtggcaagcgtaaaactcaaagccttgaagtttctagcctgttccagccttgatccaggccatgtttatcctgattccatcctttaaaacgaatgcctcactcttaatagcgcacggcagtttgaaccactaatttggtcgagttggaaacagtgaaatttcaattttaataagctgtgcataatgaagaggaatgtggaattggagcctttccatctgaagctattcataacaggcacaaagctgagttaattaggaatatgctgagatgaaggaaatgaggagagctgctcttttgggggctgtgcttctctccccaacccctcaaccccattgccatgctgcagatggggtggtgtctaaacatcagtggcgagtgcctgcattactctgctcgttgccttccagagaactcagcttctccaaatgctgagctcttttcagaatgggacctgccaccagtatttgaaagatttctagcctagcagaacagcagccacgttatcaaagtttggttggccaaaggaaggtacttgctaattagtttagtaggttttcagtccgcacagacatacgggat

SEQ ID NO: 71583 - DNA, 1038 bp, Homo sapiens
tgcttcccaattactcatttcctcagataagaagaaatcatctctacaatgtagacaacattatattttatagaatttgtttgaaattgaggaagcagttaaattgtgcgctgtattttgcagattatggggattcaaattctagtaataggcttttttatttttatttttatacccttaaccagtttaattttttttttcctcattgttggggatgatgagaagaaatgatttgggaaaattaagtaacaacgacctagaaaagtgagaacaatctcatttaccatcatgtatccagtagtggataattcattttgatggcttctatttttggccaaatgagaattaagccagtgcctgagactgtcagaagttgacctttgcactggcattaaagagtcatagaaaaagaatcatggatatttatgaattaaggtaagaggtgtggcttttttttttttcttttttccagccgttgaccaattatagttcggctgttgactgagaagtttgtggtgggaaaacgtttgccatattttctttgcatttgaataattgtcttgtacttagaaaaaaggcgtctatgaatgaccagtgtttttggtcgccaaatgttgctgacaaacttatcccaaaactttagtggcttaaaaaaacctgcccccaactgttagtcaatctgagctgggctcagctgggctgttcttctgccagcctgcaggtggccactcatgtggtcagcaggtcggcggagagactgggatggctgggcttctctctctgcctgcagtcctgagtctctccttcttcgtgtagtctctttcagtggcctggctggcagggtagctagacctctcacatgcagctcagagctcccaagagctcaaaagcagaaatggccaggccttctgaaaacttaagtccagaattgtcacagtgtcccttctacttccctctattgatgatgatgatgatgatgatgatgatgatgatgatgatgatgatggttttttctaatcagaagaaagctggggtatg

SEQ ID NO: 71584 - DNA, 1344 bp, Homo sapiens
tgaaacttatggtcatctctcccactgaaaccaaggtcttttcaaatgtggctaaatggggatgaggagacacgggtaggactttcttggtgtgtgtgcattctttaaagagccaagttgcttcggggaaacagccaggaaaatggtcaagattatttttagaggttattttattggggattttaagaactaataacatcttgagttatttttaattcagggggatgtggaaaggtttgcaattgtcaagtgttttgttgtagcttagtatccataagggaaacttagactatagacataactacaaagccagtgcagcttttgttttctgtatgttgttgggggatcaactttcacacatagcaagcacatggcctccctgatgtcaggatgcctttgttaggatctgtatttgcccttaattttgttgaaatcttttttccttcttcctcttgaaaagttccaaaatatagtttattgtatctttcatcactaaaaatttgttcctttttcactatgggcagttcacacaaggcaaaaactattgaacagttggttttagtgtgttgtataactttgctgtatatcaaactaattttgacaagttttcatcctaagcctcaaatcatgtaattaataatttgcctgtttatttatgacctaattgtgattcttttattaataaaagctaatgggaaaaggatccctgattaagctgatgactagacctacaattaattttcctgcagtatatgaagtattgtaccagagtattaaaagatatgtaatattttattgataaatctatcctttaaaaggaatacgttttaggatgtcatcattttgatgtgaatcatgtaaatgttgataatatgctgtttattatacatttagtgtttcaagagattcacttaattgcctttttgcccacgtatattatgtagtctatttgcaactgttcttaaaaaaatgacattaaaagaatagtttatgtagagaaacattagtggatgttaattgtctccccacctatatttatgggtgttagcgcaactgctttgctagttgcaaagctgtattatcagagtaaaagtgtatttgtaaactgtatgggaactaaaaattaggaataaaaccattttcttatatgatggcatttgtcgtttgcttcatcagaaatgtccaggaaaaaaatgggattattggtcactccacctctcacactggcaaaatactgacatttagcagctcttatctagaagtgacttggaacatagaataaaggcatgagttcctgaagaattcattgagtgtttcctgtagaaatagctttaggagataggg

SEQ ID NO: 71585 - DNA, 1038 bp, Homo sapiens
tcttgagtaggagaatataatttttgttgatttcaaaattaagatgaggaactaattggtagtggaaagaactcttagattgggaggcagattctagactttagattctaaaaatagctgttaagttcactgaccatatggactggggtcaggctattctttctgaaccctttaatgaagggtacattctgatataatttgtgatcacacaagtaatacagaaatacattcttataaaaaatgagatttacaaataaggctaacatcatctttgaccacaactccctggtgtccctgaagtatcctgtcatatgatagatttatatatttccagatgatttgtatgcatttgtatattaacttacagtattgttttgtgaatgcatttcttcaaagactgtacagatactatcagattgtatcacaacttgccttcttcacccaacattgtgtcttggagttctttccacattaatacatatgtatttctgatattgttaaatagcttcatggcatcccataatacagatgtatcatgacttatttagtcattttgttgttattgaatgtttaggctattttcagtttttccctattacagaccaggttgtaatgaacatctttgttccagcctcccctcaggcagacactgagaaatggagtggctgtctcagaattctgtcattcttttatttatttatttatttattttagaatttctttttgtttctttctttcttttttgtttgttttgttttgttttttgagacaggttttggctctgtcactcatgctggagtgcagtggcgagatcttggctcactacaacttctgcctccctggctcaagtgatcttcccatctcagcctcctgagtagctgggactacaggcgtgcaccaccatgcctggctaatttttgtttttggtagaaatgaggttttgccttgttgcccaggttagactcgaactcccgagctcatgtgatccacctgccttggcctcctaaagtgttgcagttgctaggctcatgcctggca

SEQ ID NO: 71586 - DNA, 1062 bp, Homo sapiens
gaagttgcacagctttactgataaaaagtttctcaaacagttacagggaggagagtggtttcttataaaagttttttgcattcagctgcaatctggcaatccactcagacttccctctccacagtggagacagctttcttcttttgcttactgaacttttgctccaagctcacgtttgtgtccatgttccttaattttcttggatgcaggacaaagaaccttgggtactaattcagtgagaagctgctacattaaggtgcactggcaagactgcaacagtattggggattatggctgaggaaattggaacacagagtagttaagtgacttgctcaaggtcttgcagccagcaggtgctatttgctttcaaaacatatgattcttcactgcagaaatggtgagcccctagcctggccacgaattagcaaactgtttaccagagctgggattcagttccctatttctgaaatgggcatcgcccaggacagtggttcataaacttcagcgggaagtaggggggagggtcacttgttaataatagggatgtaggatttcaccccagaatctattttaacatgctgtgtggataaataagaaaccaccatcccagaagatctcagctctctgtactcacatttgcaccctgggttctaggtttttgcttctctctctctctctctctcattctcaatctcaactcttgcacattcagccacccctcccctggccaggcaggcctggactcacctttaccaccttggacacacacacagggtaggagctacctcggaagcacctttccttcaggaacccacagatgatgtcaatggcatggttgatttgcatgcggaaacacgtgtctggcaagagatagtcttcaatgaacttgtccagagatttggctggggtatttctgagatccatcattgacaggagagagagtggcaacagaactgcctcccagacctgtttgcttttatctcttctgctgactgagcttggactgctgttggtttcgtttcctcagaagggaggagctgtctttgcactttccttttgcaa

SEQ ID NO: 71587 - DNA, 1363 bp, Homo sapiens
cttgtagagttcctagttattttaaagtctgtgttcggtctttcagcatttaaagtttgtaggtttattactatttctcttctttctgttggtcataactcttagtgttttgtttccttgtgtgcctggttacatatgtgctggtcattgtatttgaaaattatgtgtgaaataatttgaggttttggattatgtatattcctccagaaagaatttcatttgcttctgtgcatttcttaggaacattacaagtccttcttctcagttaattttcgtagtatctttatcagataggtgctattacaaccactcacttagcagatgaaaatcatgaggctctgagagtctaagtcatctacttagaattggacaatggtgaagccaggattcaaacccacatcaataagaatccagcgctcttaacaaggggccagtacacttttttaaaaaataaaaggctagatagtaaatattttagactttgtggactgcacagcctctgttgcaactactcaaccctgcctttgtagcatgaatgcagtcataaactatacataaatgaatgagcctggattcgttccaaggaaactttataaaaacaggtggcaggctggatttggcccatgagaagtgtagtttacacaaaagttgagcaaaccaatttttttctgattgtttttcctcttctcagtgtaagaagaagcttgggaagctgccacctcagtatgccctggagctcctgacggtctatgcttgggagcgagggagcatgaaaacacatttcaacacagcccagggatttcggacggtcttggaattagtcataaactaccagcaactctgcatctactggacaaagtattatgactttaaaaaccccattattgaaaagtacctgagaaggcagctcacgaaacccaggtatgctatccccacatggcttagctcccctatgtaaatgaacacctggatacaggtacagtgccttggaaatggaggaggtgggagggctccccacttagtgagaatctcctgttgcccatcattgtactgggcattttactactgccatctgttttaaacacctacctccaaccctgtgaggcaggcactatgccaattattttacaggtgagtaaactgaggttctgagaggtaaggagcttgtccaacccttaacagaaaatgagtaaaatagctgcagtttgaactgaaataagaacagcagcaacaacaatgatagtaattgctcccaggtattgaaagcttgttgtaagactaacacatgctaatataatagtaaaaattattagcaatattactgatatgtatgttatgttctagtcgctgtgctgagcatttc

SEQ ID NO: 71588 - DNA, 1112 bp, Homo sapiens
aagtgaacagggatgcagagcgaatgccagtttcagccaactccaaggacagccctggagctggaatggcctttagagctgccccatggtgacagaggtggccaggcttctatacccctacgtggatcactcactgtgcttgggcaccttgggaaagggcatggctttgagcaaaaggctctctgcagctgaggcaacccctaaaagggctgacggctgaagtctgtctgctgaccactgtcccagcagctggggcttgttagtccttcctcaaagggggatccagatggcatgtcacagtgtctaccgtaaatgctcactgaatccagctgcaatgcaggaagactccctgatgtgatcatgtgtctcaccctttcaggctgaaagcaacagtgcagacgatgagaccgacgatcccaggaggtatcagaaatatggttacattggaacacatgagtaccctcatttctctcatagacccagcacactccaggcagcatccaccccacaggcagaagaggactggacctgcaccatcctctgaatgccagtgcatcttgggggaaagggctccagtgttatctggaccagttccttcattttcaggtgggactcttgatccagagaggacaaagctcctcagtgagctggtgtataatccaggacagaacccaggtctcctgactcctggccttctatgccctctatcctatcatagataacattctccacagcctcacttcattccacctattctctgaaaatattccctgagagagaacagagagatttagataagagaatgaaattccagccttgactttcttctgtgcacctgatgggagggtaatgtctaatgtattatcaataacaataaaaataaagcaaataccatttattgggtgtttattaacttcaaggcacagagccaagaagtacagatgcatatctaggggtattgtgtgtgtatatacattgattcaacaagaaatatttattgagcacttactatgtgccaagcatagctctgggcactgggaatatagcaatgcacaaaagcagacagaaatccctgtcctcatgaccctgcagagccaagacttccagaattt

SEQ ID NO: 71589 - DNA, 1191 bp, Homo sapiens
agtatttatgagagttttatattttagagtcttatgaatgatatgttgattcttggtcccaaggacagtgtgacaatgtggcaatgtaagtcagtatagtcgaatctttaatccagtgatttaccttggaggacagagctgtccaatagaaatacataatataacacaagccacatgtatgatttcacattttctagtagccacaattaaaaagggaaaagaaagagatgaagttcatttgatttaactcaaatatatttaaaaattgtcatttcagcacacaattaaaaaaattatcagttggcaagaacttggcattcttttcatttgtactaagtctttgaaaccaagtatataccttgcactcacagcacatgtagatttagactagctacattttaagcatttgatacatgtggctagtggctgctgtgtcacacagggaggttctataatttttctcagagatatggagaaaggataaatcaaggatgcttatttcagaattattagtaataggaaaaccatctaacattaagatgttttgcacaaatgtcaactccatgaggacagggatttttttatttaaaaaattctggaagtcttggctctgcagggtcatgaggacagggatttctgtctgcttttgtgcattgctatattcccagtgcccagagctatgcttggcacatagtaagtgctcaataaatatttcttgttgaatcaatgtatatacacacacaatacccctagatatgcatctgtacttcttggctctgtgccttgaagttaataaacacccaataaatggtatttgctttatttttattgttattgataatacattagacattaccctcccatcaggtgcacagaagaaagtcaaggctggaatttcattctcttatctaaatctctctgttctctctcagggaatattttcagagaataggtggaatgaagtgaggctgtggagaatgttatctatgataggatagagggcatagaaggccaggagtcaggagacctgggttctgtcctggattatacaccagctcactgaggagctttgtcctctctggatcaagagtcccacctgaaaatgaaggaactggtccagataacactggagccctttcccccaagatgcactggcattcagaggatggtgcaggtccagtcctcttctgc

SEQ ID NO: 71590 - DNA, 1068 bp, Homo sapiens
tcaattgttttgtttctcgtagccaatgttggtgtcaaatttaaaaaattgatttggcaagaacacataatggattgtgctgtgtgctctgtactgtctcatgcctggaggcacaccatgtttggctgtcccttctgctaacactgagattaaactgtggatttggtaccaggaatggtggctcatgcctgtaataccagcactttgggaggctgaggtgagaggattgcatgagatcaggagtttgagaccagtctggcaacatggtgaaaccccgtttctactaacaaattttaataattagctaggcgtcgtggtgtgctgttgtggtcccagctacataggaggctgaggtgggaggatcatttgagtctgggagattgaggctgcattgagctgtgattgtgccactgtactccagcctgggtaacagagtgagaccctgtctcaaaattaaaaataaaaaaataaaaataaaccctgtggatttgggaggtgacatccccccaccccattatagccttccccatcatttcatctaatggtttcacccattgataatctctgcctaaatcatttattttattgtaggttgcaaaattaaagccatcctcatagggttaacgtgaattctggacagaaatattgttgtaattaagcattaatcatgctgcactttggtccacttccttgtaactgaatggcaggagcactagatactgaccatttacatccccattgttcctataggatctctgacattagaatcataaggcttttggccaggcacggtggctcacacctgtaattctagcactttgggaagccgatgcaggcagatcacctgagctcaggagttcaagaccagcctgagtaacatggtgaaacccagtctctacaaaaaaatacaaaaattaggtgggtgtggtggtgtgtgcttgtagtcccagcaactcaggaggctgaggtaggaggatcagttgagcctgggagatggagtttgcagtgagccgagatcacactgctgcactccagcctgggtgacacagctagacccctgcctcaaaa

SEQ ID NO: 71591 - DNA, 1077 bp, Homo sapiens
atcgtctctgcctcccgccctgggggtaacagccccgcttccccagcccagacgtccccgagccgctcgcgggcccccagcgggagccgggggtggggtccctaagcacccgcgttctcaccgcctctcttcgtctccggctccggctccggctcgcgctccagcaccgccgcctcctgggctccccccggagtgggagggagccgcggtcccgcctccgcgcccgttccctcccaggcccctcggccgccgcgccgagctttccgcgcgtggacagactgcccggccgacggacggacgcaggagccggctggcggccgccgggatctcgcgggtgggaggaggcctcggccgtgctccgggagggagaggggagggggcggaggaggaggaaggggaggagacagatctcggccctgagcgccaccggcgctgacacgcgagtctcggggcgccccaaatcctcggccaggccctcccgagaccccaaggggccttctgaccccaagcagagcgtgaggcagggagtgggatgtttaggagtcaccggcttgaatctttgtcatctttatttccagtctcccagtccagggcctggcactgaataggtgctcaataaatgcttgaatgaatgaataagatccagagactgtctaaagaaagatcttgaagcattcagagctagcctcctttcctcctctaactattcctgggggtgggagggtgctgacaaggcctgattcagactcagttggaaccgtggaatctgaagagtacagatgaggagactgaagccagagagagtaagagccaggcccaggatcacaaaagcttagagcgatgcccagacaccaaccccgatctgaatctcctgccagtacccagttcccagccctgagcccacttcccccaaagcacccacctgctccaggtgagaggggtgggaccaggggaggggaccctggccaggaggtgagatcctggaggaagagaagggcaggccctctgccatgtcattcacagccacctgcaaacaactggtgctcaataaatggtgggtgagcattggttggatgg

SEQ ID NO: 71592 - DNA, 1027 bp, Homo sapiens
catctgcaagcgagacgggcaacctacttggcacttggaggagtgggaaagaggaaaatctgggcttgatggagagggagtggagattggagagcaagcagcccccagggtggaggccaagcttcgaggggtccctggggaggaccctcaggccaggaggaggattctcaacatcagcgttggccagctctgcagcaaaggactctgggagcccgtcagggccagctagcccaggcctccctctctccagggctctatttaccaggtatcgattttcctgcctgtttactggtagttattaaaggctgtgtccctggagtccttttgaaacaagattggaacctggagagcaggagtaattagggcagctgctgtcctccccgctgggccctgcaccccgcagcgcccgccgctgcccgcctgcccatccgtccgcctctccggcccaggctggccatggaccaggccgagggggtgggcagctggttccttggtgacctgcctggacttcgatctcaagatttctaagggagcagtggtggaaatgctccttctcctccgcagtggccatggcctagattttcagccagaacaatgggtctaagaaggggctggagtttcttcagcctgggaaagaggctgggcctcaggctggtggcccagagcagaccacaccccactctggccttcagggcaccctgctgtgctggccacagggtctgcgtcccccaggcagttaggggcctgtgacaaacatgggctccgtgcctctgcctcggcctgtttttgtgtctctgcctttgttgtcttccccttctctctcctccctagttgcttaaaaatgtttggcagaaaaattccaggcttcttccagctgaactggagaaaggggctttggtcagtgtcagctggaggactgcacaagctgggcccctgagaccgggtgtgggggcggccacagccacagctgccagtgactgcttcatgcctggggcagagacagggtgacagcaggatggagagagac

SEQ ID NO: 71593 - DNA, 1014 bp, Homo sapiens
agagtactggaaacctccctaccaaaaagacagagacccgccccctcacacacaaacacacatgtcctgttgaactcatgcacgcacacccacgtgcctgtacttgcccccaggctggaagagaagagacagaaagaccccatgacccccccatgtggatccccatctgtgtctcagttgcatctgtacagccttgtctgcaaactggaggatgcggggcaagcccttaggggcctgccagggctcggggggcaaagagggactcgggaaactcagtgtaccccagatgcctcacccattccgtgtcatcacccatgtctgccacccactgattgggcaattgtgggcccatggggtggaagcccccagatgactgagcagttctacaaaagaatggccagcacgagcggggactagagggtcctgattttgtgtctgtgcctcttcatctctctggactctgatctccttctcccttcccatctccaggccttctgtctgtcccagataaaggcgctgttctcccatcctccctaccccatcctctccaccaaatcgctcccaattttgagagccaaaggctggcgcttctgacttcaggagcgaaaggaggaggcctagtttgggccgatgtattttaaagcagagtggacagcagagagtcaatttccctttcgttgggagtgggcagtggggtggctaattgtcttcggccaaccaggggcctgttgcccaggcaactcaccagctccgcctctgctgattggctgccacggtgggagtcagccaagatttaaagggatgccagcgattgctcttttcaaaacctaccagtcccactgtgggtggagaaataaatggtctttctcctcctcgcctggtcttttcctgccaagagaggggtgggtggctctgttcctgggggctgcagtcagccccgttggggagtgatggcttgcaagagaatgacttcagggtccttgcctcgggctggaaggggtgggggcggtgaag

SEQ ID NO: 71594 - DNA, 1082 bp, Homo sapiens
gagctgatgtgaagactgaaattaccctggactacagatggcagtggggtagtggtgggacagttcagggctccagatggagggggacagttcagggctccagatggaggggaagatgctccctctgggcagttctaggtacccagctcctacaggggtcactgccaaggccaagatgccccaggaaggtggcacacgccccggggagggcattgtttcatgtgtgactacaacctctgaataaacacaggcgcagactctcaggctaaatatagcctggcaagtgtgagaggtgggtggggagctggtttggggggagcaagatgcacccaggatggaggggcacccttccctgagtcacctctgctggtgctggggaaccagcgttacctttagatgggccaggccccggattcacatggaggggaaccatactctacagtttgtagagggcagaggttggaggtggggaggtgcacacaggatggactctggagcccatcagactgggttcactactgagcctcagtttcctcatctgaaaaaatgggataatagcacttacctacccacatggagttgtttgaggactaaatgtgatagttcaggcttggtttctaatacttagtgagggctccttggtagctggtgttgaatggcaggagagtgtggtgaagaacagagagttcaaatccttggctgggcgaggtggcttatgcctgtaatcctaggactttgggaggctgaggcggctggatcacttgagattaggagttcaagaccagcctggccaacatggtaaaaccccatctctactaaaaaaaaaaaaaaaaacacacacaaaaaaacctaaaaacaaaaaaagcaaaacaaaaactggccaggtgtggtggcatatgcctgtaatcccagctacttgggaggctgaggcactagaatcacttgaaactgggaggtggaggttgcagtaagcagagatcgtgccactgcactccagcctgaacaacagagcaagactctgcctcaaaaaaaaaaaaaaagaaagaaaaaaaaaagaaaaataatcaaatcctgcctaagtc

SEQ ID NO: 71595 - DNA, 1022 bp, Homo sapiens
accatggacaaaactctttctccttgtgcctcattttcctcatctgaaaatggggataattacagcacctatatcagaagccagggtcttgacacatttttaattttaattgaggcaggacatagtggctcatgcctgtaatcccagcattttgggaggccaaggtgggtggatcgcttgatctcaggagtttgagaccagcctgggcaacataatgaaaccccatctttacagaacaacacaaaaattatccaggcatggtggtgcacgcctaaagtcccagctggtcgggagggtgaggcaggagaatcgcttgagcccaggaggcagaggttgcagtgagccaaaattgtgccactgcactccagcctgggcaacagaaccagaccctgtgtcaaaaaaaaaaaaatgaaaataatgttaattgaatttttaagttaacacaatgcccagtacatggtaggcgcttcataaatgttagtgcctgtgcccttcagggattgacagctggattaacttgagccgagtggacccagatgcagaagtgcagggtgagatctgcctgtcagtgcagatgctggaggatgggcagggccgctgccttcgctgccatgtgcttcaggccaggtatgcttaaggtggaggtggtgtggagggtggtctgagaatgagcaggagtcccctgggtctcccctgctgcctggcgtttgggacctcctcagtcctggggcacttctgggctggcagtcaggttccctgtgtggacaaacagtccaagctcactgggttgtaagttcctgggggcaaaatcctgttgagtccccagggactagcagcaacagaccagacactcaggatgacaggtgacaggtgagtgtggaggtgtagtcattaaattgtaactgacaaatacccaactcatactggcttaagcaaaagagctactttattggcttatatgactgacatgtagcttcaggcatggctgggtccaggtgttcaaacgatgccattaggaatct

SEQ ID NO: 71596 - DNA, 1048 bp, Homo sapiens
cttgggtgtgtgtgtgtgtctgggcctctaactgggttcatgtggggggtctctgagtgtgtgtgtgtctggattcccgtgtgtgtgtgtgtgtgtgtgtgtgtgtgtgtgtgtctgggtctccaggtgtctgcctcctgtgtggcccgaggaccccagccccctgcacctccttttgcaggacagctactgtctggaggagcctgggccccttctggggggaggagtacacggtgcacctgcctctggatttccaccagctggccttctacgtgctggatgaggacactgtcgggtttgtggttggggaaagtggaatgtgtgggttagggacccaagcctgggcacctgaggggagaggggatgtgggtccacagcccacgagggtgtgccctcccacccagaccttgacacctgcccccacttctcttggggcggggcaaaggggcccctgactcagaccttcacgtgcccgccttcctgcaggcacgacgacatcatcggcaagatctcgctgagcagggaggcgattacagccgacccccgaggtgggcgagggacatgggcagagggaggagggggccatgcccagggtgggcatttgcaggggcatagcacatggcacggtgaagcacagagccttcagtggaaacttatttctcttgttgcttttgtctttactttttgtttgcttttaattgttgttgttagagatgaggtcttgctctgtcacccaggctggagtgcggtggtgctatcatagctcactgcaatcttgaacctctgggctcaagcgatcctcccatctcagcttctggagtagctgggattacaggtgcacaccaccacacccagctaattttttcagaaatatcttatagatacggagtcttgctatgttgcccaagctggtctcaaactcctgggctcaagcaatcctcccaccttggcctcccaaagtgttgggagtacaagtgtgagccactatgcccagccttgtctttagtttttgagcagttaatttgtttgcctagttcaacattcagat

SEQ ID NO: 71597 - DNA, 1711 bp, Homo sapiens
cacgccccaggcacccctgcaggccgagtccgcccggaactcaagaccaagcagcagatcctgaagcagcggcgccgggcccagaagctgcacttcctgcagcgtggtggcctcaagcagctctctgcccgcaaccgccgccgcgtccaggagctgcagcagggcgccttcggccggggtgcccgctccaagaagggcaagatgcggaagaggatgtgaggaccaggacccagccccgtggctccttgattggccttagggtgggcatcagcagacgttcccgtgcaccactgtgtgcctggccctgtgctgggcactgggggcactccctgcaggagccatcatctgtgaaaaggagcactgtatggccacagaagggcagcagctgcgtcagcctaagacagagacatttgaacagggccttgaagggtgtgcaggagttcgccagcaaagccaggcaggccaagacttgagttggcaactcagctgctgctgcttccatgtgttctgggttcagaggtcatggctgcaccggtcagagccctgagtgcctcagggtttggcaatggaatttttaatgtaataaatctttattgagcactgctggtggccaggagtgcggtctacttggggaactggaatggagagacccaggtactaaaatcccagctaacgtggcagaggagttgcgggtctcctgagggtgagttctgctgccttgtccatttagcgatgaggaaagtgaagctcagagcacaaaccaggtgccagaggcgggagttggtcccccttcctcccactggacatggttgcagctgggagtgggctgggggaggggaacaggatgcccagcccagggggcaaggacacagctgctcccctctggctatgaagaggttaacgcggcccctccacacctggaggtcagaacctggcctgtcctctgtcttcttgccacccaccccctgtttgaggttctgagaaggtcaagggcagccccagcagctggattctcaggctgggcccctcacctggcagagtccatagtggagggggccttggtgatctctcatctagcatggaccctgttctgagacctgacaaagagttttttttcatgccccaaccaccctggcagggagggcctggtctgatctcattttagaggcagttgccccacacatagccccttgaccttcccatcacctcctcatcagggcctgcatttatggagtgcttgctatgtgcccctcatggcaggcccacagcactctgaacaggcacagccctcccatcttcccaatgaggaaacggattcaggaagagccactcagtccacaccccattggaaatgtgggccctcctatctcagggtctctcaggggttccctctcccgctgctcacctgtgtcagggctaggaggcaggggctgcaggctcagcctgacccaggccggccagcatggcagagaggtcctgcatgaacagcttcacctgggggggcccagcacgaagtcacatcccagccccagagtcactgtccagcccccacccctcaacacgcgggggaggccgaaaggtagggcggggactggagatcccctcattaaaagaacagtgatgatggtggttcccagaggtggtgactgagatcctaaaccgttctgggttttgaaagcctcaggccaaccttcccaactgctgcgtgagc

SEQ ID NO: 71598 - DNA, 1041 bp, Homo sapiens
acagcaggtgtgatggcccctggctgtgctgtccccttgatttgatcacacaccacagagatcttgaccccgtctattctttttgctggcaagtctttctagacagggctcaggacccattcgttcaggactctagcgtctggagagtgtatgtgactcaacccagggtcacagctgggtagggggaggggattggaaaccctccaggaggcccttgtccctgagccaggccccagtgctggcggcagtcctctgacctccgcactcccttttgagacctggactgcagggagaggtgaggagggatagggaagaagcctttattgagcgccaactgcatgccagacatggctgcactgctttcctttaatgctccaacaacctgacaagagggtcgggtgaggagacaggccccaagcggcagccggcactccaagggtttccctccacggcagccgtcccaactccctctcctgcagggaccgtaagaagaagcggtttgtgggacagtcaggacaggaagacaagaagaagattaagacagagagcggccgctacatcagcagctcctacaagcgagacctgtatcctgaggggcgtggctggggaggggcggggccgaggagcttcagcaggagcagcttcaattaagtggaacctgggggcgggggcgggggcggggaggagggggcggggctgagcggcttaagcagccgcatctccaatagatgggacctggtgctgggggcggggccgagcagcttcagcagcagcatctcgaactagtgggacctgtgctgggggcggggcccagcagcttcagcagcagcatctccagtaagtggggcctgtgctgggggcgggcccagcagcttcagcagcggcatctccaataagtgggacctggtgctgggggcggggccgagcagcttcagcaacagcatctccaataagtgggacctgtgtgctgggggcggggccgagcagcttcagctgcggctgggataacggaactctgtctgctggggcagtgtggggagg

SEQ ID NO: 71599 - DNA, 1469 bp, Homo sapiens
gagggcccagtgggcccagccccgagccgcccagcactgcaggagaagcagcctgagaaggaggaggaggaggaggcgggagagagtgtggaggtacaggttccaccctggggaccctggacctggggtatggggaaggggtggctaagtcccagcagcccatgaggctgtcctaggatctttgagcagtggatggaggtggatgcagtcagcttcccatctgcagagtcggggcatggttcttgtccaccatccctcgtttaaaactctggggccagatctttagcctgaggagctgtgcacgacatgacaccctcagtggggtccggggcatcaccagccaccaaacacatcagggcttctgcagtgagacgtgtaggtctccactcagagggaggaccatgaagtgtcccattcacctggtgggtgggtcctgggcctgtgcgtcccccaggatgtccctctctcatgttttgtttggacagagggttcagtagccaagaagaccagttggagacccctggcctagtccatgttgttcagagcaggccaggcgcagagaggggcagggccggctgtcacatagcctggggtgcggagctggaatggggagttgggtctccctcggccggcactctcctcctcacccagctgtcctgcctctgctggtccctgaggcaggggttgcactgtgtgtgcagatgaggaaactgagggtcccacaggagacactgtcacccagctaagaaatggcaaaatgaagctttgaaagtccccgagaagccactggcccctcactgtggccaggctggtgggtagggaggcagggggaagtccccagggggcagcaggcatgacactgggccttggtctgtgctctgccaggacattttctcagaggtcgtgggccggaagcggcagcggtcaggacccaacaggggagccaagaggcggagggaggaggcccggcagcgggaccaggaattctacatcccctaccggcccaaggactttgacagcgagcgggggtgagtggctggctgggtcctgggtggggcagttgggtccgctgggtcccatcaatccaattatgtctcccactctccctctgcagcctgagcatcagcggggaagggggagcctttgagcagcaggcagctggcgctgtcctggacttgatgggggatgaagcccagaacctgacgaggggccggcagcagctcaagtggtgagtgatcgagtgagccgcccctccatgctcggggtgagtgaccgagtgagctgctcctccgtgcctggggtgagtgatcgagtgagccgcccctccctccatgcccggggtgagtgagtgagtgagccgcccctccatgcccggggtgagtgatcgagtgagctgcccctccaggcccagggtgagtgagagagtgagctgcccctccatgcctggggtgagtgagcgagtgagcctc

SEQ ID NO: 71600 - DNA, 1028 bp, Homo sapiens
cagatggcctgtggcctggggtcacacagtgacaacggtggtgccaggactcagattgcactcctgacccccagcaggaccccagcagggattttcatctgagcttcttatagcttcttaacctgcagccttggctctgacaacctctcttgagatgcaccttgttctggaaccatccctgctggctcacagcaggtcctatggggcagccattccctagcacttacagatggctcacaaggggaagtgacatgcttctggtctgttagaggcctgaagagctggctttcctgagcttctttccctccttcccaactgttgactcccattaggcaccccatcttgtgcatatggaaggggatgcacaaaaggaaagacctactgaggagtgagtaagcctgccagccagctaggatcaggagaggagctggagagagtgtcatgtttaagagcaccggttttgaagtcaaatggacttgggttgacaagctatgccttttcctagcatgtgaccatgggctggttactcaccctctctgggtttttgtttgtttgtttttgaaacagggtcttgctttgtcacccaggctggagtgcagtggtgcaatcatggctcactgcagccttgacctcctgggctcaaacgatcctcctatctcagcctcctgagtagctgggactacaggtgcatgccaccacacccagctatttttttttattttttgtagagatgaggtcatgttgcctaggctgctctcagacccctgggctcaggtgatcctcttgcctcagcctcccaaagtgctgagattacaggcgtgagccacggtgcctggcctgggtctctctgtgtttttgtttggttttgtttttgagatggagtctcgctctgttacccaggctggggtgcagtggtgcaatctcggctcactgcaacctctgccttctgggttcaagtgattctcctgcctcagcctcctaagtagctgggactacaggtgcccaccaccacacctagctaatttttg

SEQ ID NO: 71601 - DNA, 1091 bp, Homo sapiens
caagtgatctgctactttggcctcccaaagtgttgggattacaggcgtaagccaccacgcctggctgtgggctgttagaaagcagaaagcacaggaatcgagggatgtttgtaatagctcagattcataagatgtagtatctcctgctgttcatctaccacccttcctaggtagtaggtgccacgtctgttttacagatgggcaaagtgaggaagtgacaggttagagtttggcaatgattccatagtagagctgggatcagaatccagtctcctgcctcattccatgccttatctcacagtttatcccttaaagggcagcccctttaagggagaaagtttaaggatgccgctattaacactcttgattctcggagagtttgcttttcagtgcctttgtctccattgtcatttattctttctgaagtttgtgattgtcagaaaggcctccctgggctagtcctggcccaggactaccctggctcctacaggtatcccaagggtgctgcagaggagggctaaaattagggatttgtgcccaaagggtttaaggacgggagctgatagagatccatggaacctgggttctagttggggctggtagttctggggttagttgctgggggcactgtgggtggaaggcagctttgttgctatctggaacaacagaaggagtgaattgaggtctgtagttgagcccatctcttcagaggaactctgttgttaccattcttttgcatatttcagcttgtatctcttgtcagggcaatgcctttgcctcatacctcagcactggcctttcctcagttccaagccttgggtctgtgttcctggggatggggtgtgcagccttgcctggacatttggttatgggaagggaaaccaaagagacctgttctatcaagctaaccccttctctcctctctaggatggaagaccagtttgcagccctgcacgaaaatcccgacatgtgagtttgtggattggggatgactccctgagatcccttcctagtggtgggggtgtaagagaactgtggtggtggccctggccctggggtcacctggcctgtgcaccctcttccagaattat

SEQ ID NO: 71602 - DNA, 1445 bp, Homo sapiens
gcagtaagacctcatctctacaaaaaaaaaaaaataaatacaaaataaaaaaattagccagatgtggtagtatacgcctgtagtcccagctactcagaagtctaaggtgggagactcacttgagcctaggagttcaaggctgcagtgagccatgcctgcactgctgtactccagcctgggtgacagagtaagaccctgtctcttaaaaaaaaaaaaaaaatgtacttacttttgggattgagattcaaaccgagacagtctatctgcagaccccactctaaacttctgtcctggcccagccaaaggagaacttactagcaaaaaagtgacgtgatctggcggaagcatcattggcttgaatgggggagagagggcaacagcacaggccccttccctgccccctgtggtcccactgtgcctggagtgacaccacctctctgtccttccctcccagctgggacctggaagacccctgcccaccttccccacctcggaatgcacctcggatgtggagccggacacccgggagatggtgcgtgcccagaacaagaagaagaagaagtctggaggcttccagtccatgggtgggtgcaacttggcatcagggactctgcgggagtggcagctggaggtcaaccccgcctctgcactccatcactgatgtccactctgggcccagcactgtggttgggtagaccggggtagcagatgtggtcctccagtcattcagggccttctagtggggcagcgggcctgacacaggagagggcagttagaacaggcctcaggaaaggcaatgcagatgcaggaacaggcaaagacagtcggggacttattgcctgcagagggacatttcagaaggagggaaaggatggaatgggtgggtggtgtggggacacctggctggccagaaataaagcctgactctgttactctttacaaatcagtagcagctggagcaaggatttaaatatcaagatgagtgctgggtgcgatgactcatgcctgtaatcttagcgtttggggaggcagaggtaggatcacttgaggccaggagttcaagtccagcttgggcaacaaagtgagctcccatccatgccctcaccaccaagagggacaagagtccctccccacacccgggtgattctgaagttcattccagacatcctcattgtgtccacacacacttccaagaggcgcaggaccttaccacgcctaaaacgaaggcacagcttcttagtgtcacctaagaccccgttagtgttcagagatccctgctgtctcatgacatcaagagtgggttcacatcagaaaatcagataaggttcaggtgccccagtcagatctgtctcctaagtctcatttcacctttcagtttgtgctttattgcttttttttttcccttgctgtttattgttgatgaagctgtcatttgtcctgtaaag

SEQ ID NO: 71603 - DNA, 1052 bp, Homo sapiens
cagcccggaatgcctggggccccggacccccggcagcctaggccgtcccggggcaccgcgcgcggacggactcacccgaggagccggcacaggctacgtgtgaacggcccgcgaatccagaaacccagaacccagcactttgcacccagcaaccagggagcagccagcagcactgcggacgcggcccggaccattcgcgcccgcggatggggggagtccgcccaggggcgggcgccacgctcctgaggcccaggaggtccctaaacatggagagggtcctctggtgccactcactcaggtgcgtgtgtactaggccgccgagggccgcaggcactggcgaaagctcagcggaggtcacgtggtcaccgcacctcccccccccccacgcagttggtgcgctcctcaggccacgcccccttctgcgttcccagcgcgcggcccgaatggcggccgacaagggcccggcggctggacctcggtcgcgagctgccatggcccagtggaggaagaagaaagggctccggaagcgccgaggcgcggcctcccaggcccgcggcagcgactcggaggacggcgagtttgagatccaggcggaagatgacgcccgggcccggaaggtaggcgcgtggggctgggacgcatgttcgggcccgagacccggctccgggcagcgcctcgaggcctcagtttccccagctggggattgggctccgcagagtgtggggagggaggctgccgacccgaggaccggtcttgggaccgccggcctgagcacgtgtctcggggcttgtcaggctcagggttccgcggccagagccttgggatcccggggctggagcctgcgggccttcctgccgggttttggtcgcgcgtctctcattggctgcctcctgctcgtggggcggatcctggctccctttcgcccaatgaaaagtgcgggtgcagaagatctgactttgagagtttggagcgttcttgggaggttgaattaaggggaggccagactgcgtggcttgagacagtgtgacgcctccaaacctctgggaaacgaa

SEQ ID NO: 71604 - DNA, 1028 bp, Homo sapiens
agctttataggtgtgacctacacatgtgacttcacctcagttttgtgatccgtaaaatggacaaattcgaagctacttcacagtgctgttgagaggattaaatgaaacaatgcttgtaaagctctttgcaggaggtaggcatgggatccacgctggctgtcattgcccccacccccatcagtacacataggaaagtgcctgtctcccctaccaccatagtgtgttttctggttggtgcctaaatagacacaggtgtcatctctccttcaccgccagagtcattctgtaaataattgccagtagcccccctttcaccaccattatgacaactaaaaaaaagccaaagaaatttccaaaatgccccctgaagttgacagctcccctttgagagactggttgagagagaactaaacccttgggatgagaacttcagacactaccggtcttcctccattagcacttctgtggctcaggggtgctactctgacctcctctcacagggagcctcggaagcagggcctggccggcagagcacacctgctgtcaccagggaccacaggcagcatgaagacccccgtggagctggccgtcagtgggatgcagaccctcggccttcagcaccgctgccgaggtggctaccgggtcaaggccaggacgtcatatgtggatgagactctgtttggcagcccagcaggcacccggcctaccccaccggacttcgatccgccctgggtggagaaggctaacagaaccagaggcgtgggcaaggaggcatcgaaggccttgggggcaaaggggagctgtgagaccaccccctcaaggggcagcacccccaccctcacaccaaggaagaagaacaaatacaggtaatggggtagggagatgcaaatcctgtactcagtgcagccacctggattccagttacagctctggtgttcacctgctctgtgaccttgggcaagcatcttgacctctctgagccagtttactcatgtggaaaataggaccaattattcctacctaggggg

SEQ ID NO: 71605 - DNA, 1043 bp, Homo sapiens
catcatggccatggcagcttccgggctgcagctggggtctggtttcccactaaggctgaagtaaggaaccataatctctgggctgacaccccaggctgcacgctcctcatggaaacaccatctgtgagctggacacacacagcccacagccctgggtaaagagatttattcgtagagcgttcccttcaatgtggcttcaaatactttttaatttattaaataaaaacatgaaagccgtgaatttagtgctctccatctcgggccttcctggcctggtctctgggaagataagggtcaggagcgggctgggtggagagctcatttcttgcccttgcccttctccttgcctttctgcttgcccttctccttgtcctttgctttgcccttgccccgcttcttcttggatctgagcagggagcgcaccagatagcccttccatagggcctggatgagcgtggccgcccgtaccatgcgcaccatctcctgctctgcctccatccttttcttggagttgatctcccgctcttcccggatctgcgcaaactctcccaccagcactttgtgcctccgcctgagctcctccagcgagatcttctcctccctgtgaacagcgtccagatcctccaactcctcctggggtgaggggtggggctggggtcaccacacatagagtgcctcctcccaccctcctccctgaggcccccttacccttcccaaatggtcttctgccccagcgatgcccctaagctaagctgttcagcatctctcggtcccagtgacatggatggggagaggggatgggctccatcctagctctaggaaggacccaactgaaataatttcaggaacaggaaaagaacatgggcttgtgagttgggcagacttagttttaagtcccagctctgccacacctcaactgacttcacctttcgggccttcgtttttcctcatctgaaacatggggacgattccgaagccaggggctgtttctaggattaaatgacccgatggacacaatgtactggacatgatgccaggcacac

SEQ ID NO: 71606 - DNA, 1007 bp, Homo sapiens
gggtctgtctaccctattccttatagcccttgtagggcgactgatttcattgacttctcatttttccttcctgtgtttcttttggtaaagataagtcgatgtatttatgttttcttgtttcctcccttttgtacacattagagagcatactatttgtactcttttgtacttgcttttttcacttatcaagagaaaggaaaacatttgtaaccagctgtgctaattcttgccattatcagtacacagcatggaggttgatttgaagatgacgggatgtccatgtgagcatatgaagggactgccaggcttttcttctgccaaacggtgtctttttgctcttaagcctgggtgccaagtgaatctctctcctcttccaatgcagatggcggcagctatgccatccacgactcccaggcccccagtctcagctctgggggtgagagttccccctccagccccgcacacaactgggagatgaattaccaagaggcagcaatctacctccaggtgagtatctccagtcaggccctggcagttgtctgcacctgttggtggggtggggcagccaagactctgttaggtgcccagaaattcagttccagcatcagttcatgctgctgctgctcgtgtgtgagcttcaggttcataagatgggctgacctgactgtgctcataggggaaaactgctgtgcaccagcttgtcttcagacccctgtttagggctgtgccaacccccacaatttccggagtctggccactcggccttccctgccaccctccctcttctcagggcacactgagaggccacgttctcaggagggaattctttacatactgaatgcggtagctttattcctgtttaacttgttgctgctttcctgtttgctattttaggaatttttttttttttgaaaaatatatttttggccaggcatggtcgctcatgcctgtaatcccagcactttgggaggccaaggcctgcagatcacttgagatcaggagttcga

SEQ ID NO: 71607 - DNA, 1019 bp, Homo sapiens
ggcaccaggggtctcaacatgttgcccaggctggtctcaaactcatgggctcaagcaatcctcctgccttggcctcccaaagtgttgggattacaggcatgagccaccgcacccagcccctcccctcttttttaagagatggtgtcttgctgtgttgcccaggctagactcaaagtcctggctcaagggatcttcccgccttggcctccggagtagctgggatgtcaccacacctggctgtctctggacccttttagtctttggttcctccgagtggtttttaagaagcagcaaatctcttgagcccatcagcaggcaggagtgagacctgaccaccgtgagtttcgcgaagatcattttgattttccagcatcttctgtctctggcctgaatctctcctcgcctgcctggggccttcctttcctcccctgcccgcggctcctctttggcgttggatgggtctccaggcttacatgcccacactactctcatcttttcaggaaggcgagaacaacgacaagttcttcacccaccccaaggatgccaaggcgctggcggcctacctctttgcacacaatcacctcttctacctgatggagctggccacggccctgctgctgctgctgctctccctgtgcgaggcccccgccgtccccgcactccggcttggcatctatgtgagcgcacatgctcctcatacggggggctgggagccacggctttcagggcaagcgatggaactccaaaaaggaacattctgggagggcaaacactgcaaacggacttaaaacagagagatacgaggtggtcatagaggccttgggagcggaaatgcctgggtgtccctgctggagtgaatggccttcacccagtctctctgggattctgcccaccagtaaattccagggaggggaagtgtcccaggccctgctcaggaccagtgcccacaccttggctccgggtggggagggcacccagtggacagtcccactactctgtctccagcctcaaaggagaag

SEQ ID NO: 71608 - DNA, 1062 bp, Homo sapiens
gcggggcaggtgcggggaggggtggtggcgtctatggaggaaaagcctacccccttggcgtgtgggggtggcctggggctgctcctgagtgtccgcctccgtcccgccccctgccacccttcttcactggtgagctccattgcccccgctccccggggcacatgggcttctccccgctctttcccaggagcaaggccttgctcctgtctgagcctgcagctctactgcaaggagatgtggcctggccctgctcctcttcgtggaaggaccccgcccagccggtgtcctggggctgccaccatcccttccctcatgcatgaatcacctgagcccagctcagggttggtggcgcccaagggagtggacgcaggtggaggagaggccctcacctgtcttcaccgcatggcgtgtggaaggcggggccggcatgttctgagggcgggggctgaggcgtgcacctgtgtgtggaggtgacgggtgtcctcctcgctcaggttgtttaagttgaaggagcgctaccgcaacgtgctggacaccatgttcgagctgctgccccggatggccaggtactgccagcccccaccctggcctgcaggtccaggtgccgtgtggcagtgccccgtgggggcgggagccgagtggcagtcgggggaaaggagttccacaaaggactgcaatcgagggcctgacggggctccaaggagcctggaatcttgaccaccacaggtctcctgggcaccatttttctccactgacctgtctgacatatttagtagggagggcagggagctgtcaactcgcttaccacctgtgtctacattcacaggtaaggggtcacctgtgagtctaccttcacaggtaaggggtgaatctctgggaaaggggcatttgttcatagcgtcctgacttgagctgtttttcaccccagagctgccccacgaggccccttccccgcaggcactttccagttggtgaaccgaccaggggcatggccctgcagtcagccccacgggtccgaggaggccggggctgcagaggagccgttccctcctgccggccccg

SEQ ID NO: 71609 - DNA, 1078 bp, Homo sapiens
aaaggggtcactcggggggccctttagtgaaggacaaaaggttatgctcacaaacaaggggtgagggttgttcctgcctgggcctgttagagagctgttatgcgcaaacctccagacactagggaaagatttcattgtcatttttgcctctggggccacattcaaaattcccagcatttctgggcctgtgacgggggtttcagtaccagctgggtgaggctggcagccctgccccttccagcctggatgctgtgggctgtgtgaccttgtggggtgggcggggcagggggtggggtgcagccctcagcaccccttctgctctcttctccaggagtggtatgaggagcatgccagggagcaagagcagcagcgacaactcagcagcagtgcagcccccgccgcccagcagcccccaggcagccgccagcgctcccagaccgttacctagcccagcgcccgaaagccgtctcttctatgcaataacacaatagtattactctactgcgatgtacggaactgcggtgtgtgtacacatactcacgtatatgcacatatttatatacaggaagaaaaaagacagacaagatggggcttggtttataaccaccttgccctgtcttccttaactccagaagccagtttggtgaggggtgggggtgcggccaccaggtctgagctcttcctactgtggaaggctccagaaggcccttcacaaggagacccctcacctggatccagtcgactgcggggcttgcccctcatgtgggctggcctccatcggccacgtccaaagctgtcactgctactgcttcaggctcacatccccccgacctgatggcgtgcccgccccctctccctgcggcccatgccacaggtttctgtgttttgctttagggacagaaccacttaggaaggaaagaactcccggtctccagggtggtatttcagtgtctgtgataatgtcacgcaacacctcttcggggaccagtgcccaggatctaatggaagcggaattggggcaactgggcccatgtggccagagctcagttagccagtgccgggcggccacagattacac

SEQ ID NO: 71610 - DNA, 1003 bp, Homo sapiens
gtgcattgttgttgagggtgcattgttgttgaggctggattgttgttgaggctgcattgttgctgaggctgcattgttgctgaggctgcattgttgttgaggctgcattgttgttgaggctgcattgttgtgttggccacagacggggcggggcctgtgacgggcagtgactcagcctctctcccctcattcttccacagctggagccagacggactgctggtgtgggtcctggcaggcgccctggggctcagcctcgtcttctccctggtctcagtcccattgcagtgcttccagctcagcagagtctatggcttctgcctgctcctcttctacctgaacttccttgtcgtggccctcctcactgaatttggagtgattcacctgaaaagcatgtgactgaagccgcttagtgctgtggcctcactgcaggcaggagccccgcccctcctgccgggggaggcccagggaccggagcatttctgcaaggcccttgtgggcacgagagtgcggcccttgctgctggagatctgaggtcactgctgtgagctgggagaactgctgtgtacctcttgctgccagcacccaacagccttgccgtggggaccttggaaacctggctttgctctggacaaagggttccagagagaagctagaagtcccccttgaatgacccccagagcccctctgagaagggctggagtttgggggaaggggatggctggatgtgctccaggccatgctggaggtacccccgaggcacaggcactgcccgttccccttgcctgggcttcaggccttctggcaccttctcaggacacaagtggctgcccaaccctgactcagagaatgagggtggcttggacccctgggaatcaggccgccgagggctgagctccagagccgcaccatctgccacaaacagaattcgagacatacttaattttgaatttctccttgccacgttaataaagccaaaagcagcgggtgctattcgtggcaac

SEQ ID NO: 71611 - DNA, 1066 bp, Homo sapiens
aatatgaagcctctggaaccttcatatttgttaatggagagtggacttatttgggtacctctcagtgaagaggctgggtttgactgtcaggttcatctcatggagcgatgccatctactggtaatgcctggctggagggagctgcctggaaatgcagttggatggaagtattgtgcttgattagtgatgtctgccatgaaggtggaagagggtggtggtgttagtggttatagccattcctatcctagttccacagcaacaggctggagagagtcttttttgtgtgtctctctttttctttcaaatgtgactaacttgagggcaggggctgcattttaaatttttctgcccccatgaagtgtctaggacagggctgggcagataggaagtgtctacctgacatccaaatagtccattgtaagtgggtgttgaggtgctgggaaggtatcagctccctttctctccctttgcagatggtgtctatgagataggcggcctcgttcccgtctgggtcgtggtggtgatcgcaggcacagccttggcttcagtgaccttttttgccacatctgacagccagccccccaggcttcactgggtaagaagcccgggttctccgagatggggggggagggatgctgatgtctcccacacagatgtcctgtctgcatctctgaggcactttgaccagtttgatcaggagtcacacaaagacaggtaaccgaactttaaagctgcttttgagagtgtttgtatctatacagggtttttttctttttttttttggtaatagcttaattttgttgagatgtaattcacataccatacaatttacccatttaaagtatacaatttaatgttttttattatagttacagagttgtggaatcatcacaatcaattttagagaatttcatcaccccaaaaagagacctcatgcccataagtcactccccatttccccaccccccacatagcccctggcaaccacgactctactccgcgtctctatgggtttgcctatcatggacattttatataaatagaatcctacaatatgtgatttcct

SEQ ID NO: 71612 - DNA, 1216 bp, Homo sapiens
gatccatttctgttaaacaaaacaaagtgtgtaataggatatatatacaaatataattgatctgagaaatgtctgtaaggatgtgcttcaaactaattatggtgggaccactggagagggggatttacggagggcagggataagaaagcggaatttagaaatcttatgtattggtttttttaaaaaacaaatatgtattcatgaattacttatgtcaatttcaagcagacgtttatttttaaaattaaaagtgcatccatagttggcacccagagggtatggtggccttggagaccaggctgaagggacattatgtttagctgcttagatgggcctagtctagttctcagggaagtctctgccgctgatgtccccctccctgtcttcctgcagtgccgcaaggtgtgtggcctgaatgtctctgaccgctgtgacttcatccggaccaaccctgactgccacagtgatggggggtacctggactacctggaaggcatcttctgccacttccctcccagcctcctccctctggctgtcactctctacgtgaggccctgccctggggggctggtgagaggggctggtgtctccagctggacttgactctcccttcctcgcccgctccccacccaggtttcctggctgctctacctgtttctgattctgggagtcaccgcagccaagttgtgagtttggctctgggctccggtctggcttatcaatgggaggaggggtcccaggaggctgacattcggtcaccctcagtttgggggaaggataggggtccggggccggttactacggaaatgcttcccgtccgctttttctccgtagtttctgccccaacttgtcggccatttctaccacactgaagctctcccacaacgtggcagtatccttttgtccagtgtcctgcaccctggagggagggcagttgtggggaggctgggagatagggtcatgtctatccccgtgtggggaagctgggggatagggtcgaaggcctgggtgggctgcagctgcgatcctggcccgccttgacatgctccccacatggcgtcaccttcctggcatttgggaatggtgcacctgacatcttcagtgccctggtggccttctctgacccgcacacagccggcctggcccttggggcactgtttggtgagagcagccccagtgaggggggcggggaaagcagcaggagagggtgcagggt

SEQ ID NO: 71613 - DNA, 1010 bp, Homo sapiens
ttctgcaatcccgcccactgcccacttcccacatgtatctcacccacctgccccagaagcctgagactctgaatcttggctcaagtcccaagtcccttgcagccctggcattctggcctcaggctgggggccaggtgggactgggtaggttttcatgggttctcaggaagaagggcgtatctgatctgcacgctgaatgggcagggccttgggcccctccagcgagactgtgcagaacatggtttctccgtcagcttaactttgctgccgggaggcaggaaggcagttccttaactagagtcttccagccccttttgctgtgtccatgggttttcagtaatgttgtccccctttctcactcccaccttgcaggccaccggagccgccagctgtttggaactgagctactgcagaaagggaagtggagagtaagggccaggccccgtgggggcagatggccggcagaaggctgaatctgcgctgggcactgagtgtgctttgtgtgctgctaatggcggagacagtgtctgggactaggggctcgtctacaggagctcacattagcccccagtttccagcttcaggtgtgaaccagacccccgtggtagacgtgagtatcccggtaggaacctggggttgagtggggctgtgttcctccaatcgataaatatctattgagcatctactatgtgccaggcactgaccgcagcctgggatataccggggaacaatagagacaaaattcactactctcaagaagctgacagtctcctgaacagacagatcaagaagtaaacttatacactttgggaggccaaggcaggaggatcacttgaggccaggagctggagaccagcctggccatcgtgtcaaaaccccgtatctactaaaaatacaaaaattagctgggcatggtggcaggtgcctgtaatcatcagaaccctgaggcaggagaattgcttgaaaccgtgaggtggatgttgcagtgagccaggattgtaccactgcac

SEQ ID NO: 71614 - DNA, 1018 bp, Homo sapiens
tggcgaaaccccgtctgtactgaaattacataaatcagctgggcgtggtggtgcgcgcctgtaatcccacctactcaggaggatgaggcaggagaatcgcttgaacccgggaggcggaggtggcaatgagccgagatcgcgtcactgcactccagtctgggcgacatatggaggttttgtcttgtctcaaaaaaaaaaaaaaaaaaaaacttggggaagtgtgctaaaccgggtttgcgtaggtggaaggggcggccgggctctttaaggtgggtcccgccccgtaggcctcccctcgcgccagcccctcccatcccggaaaggctcagcccaagcccggccccgcccgccctcggccccgcccatggcagagcgcagtcacgtgacccgggctgcggggcgcagcattgtgcggtcatggtgggccagatgtactgctaccccggcagccacctggcccgggcgctgacgcgggcgctggcgctggccctggtgctggccctgctggtcgggccgttcctgagcggcctggcgggggcgatcccagcgccggggggccgctgggcgcgcgatgggcaggtccctccagcctcccgcagccgctcggtgctcctggacgtctcggcgggccagctgcttatggtggacggacgccaccctgacgccgtggcctgggccaacctcaccaacgccatccgcgagactgggtaagggttggcttatccccacgcggggccatcgggggagggggatgcgtgggcgccggacctcgcctgttcccgggaccggcctcttgccgggtgggaacgcccgtttctctgggggtcagctactcccgaggctgcagcaccgccctgcgggccaagtaccctgtttgggagctggctactgcggcatccctcacctcatggggccagtcccttgccttcagccagtggtgacagtacttctgtccccaagaagccagttccctaccaccgaggccgcagtgcctgcatctggatcaggtccatggctg

SEQ ID NO: 71615 - DNA, 1784 bp, Homo sapiens
ctgaggttacaccactgcactccagcctgggcaagagtgagactctatctcaaaaaaaaaaaaaaaaaaaaaaaatttttggagccatgactgatgaagtactgccacttggtggcagcatgcctaggctgtgcagcagcccccttgaccttcccacaggtgacactggagaccaccattggcaacaagaacccagccctgtggaagtatgtgcggcccaggggctgtgtgctggagtgggtacgcaacatcgtggccaaccgcctggcctcggatggggccacctgggcagacatcttcaagaggttcaacagcggcacgtgagtgggcttctggccctgtggcttcccctgcaccaagagatagaccaacctcccctttaacactcacactcctggggaccagatgtggcatccgggccacacaccccacgccctcctttgtttcatacatggggagactgaggctagggaaggaaaggatttgcccctcccctgcaggctcctcagcctaggaaggggtgccttggtggcagtacaggaagagcacttggaacctgaagactctcaaggggacagtggggagggctgtttgaggaggtggacgtgggtgggtggcagggcctgtgagccagagacactggaactgggcagtgcagatcttacagcatccggcagaggagctgacctagggagccacagaatattctggaacagtcaagcagcatgacgagagaggggtttgtggatacctggtcatgctgcagcgtcagggtgtcagttgaatggctggacaaccccaggcccacttcctgtaattcctagctgagtgggacactgcagggtggggaaagctggggaggtggctccaggctctgttcagtcctcccttcccctgcccggcaggtataacaaccagtggatgatcgtggactacaaggcgttcatcccgggtgggcccagccccgggagccgggtgcttaccatcctggagcagatcccgtgcgtaccctgggagggaggggtgggggctcggggcagaggggactgccagggtgaaggcccagagccgtgctggcgctgtgcaggaagtgaacgatctcaggagggtgtggctggaagagaaggtgtccctggtgggggctgaagttcaggacttaatccatcctccaggcaatggggagccatcggggctccccgagcagggcagtgcccacaggagccccttttctgatcacctccaccccatctctcttctcggtctcagcggcatggtggtggtggctgacaagacctcggagctctaccagaagacctactgggccagctacaacataccgtgcgtgccttctcactccgctccccgtcaccctccagggcatccacctcactccttgcccagctccttcctaggcaatgtttttaaacccacagaacaaagaatcccagcctacccccttttctggccaggagagcccagacagtttggcagtgtagttgcatggcttaagtcagcatccatgtgacctctggttctaacacccagagcagggtggtgtggggtggccaggctcagggactggcccctgccagggtctctgactggatctgccttactgggctgtacagctgtcacctcctgaggctcacttactttacctgcattttctcatttgactcttaaaattgccacatgtggtcactagagttcctgttcccatctcacagatgatgaaactgaggccctgagaaagtacctcactttcccaagcttcccctgttggc

SEQ ID NO: 71616 - DNA, 1048 bp, Homo sapiens
ctgcttcccgggttcaagtgattcttgtgcctcagcctcccaagtagctgggattacaggcacgtgccaccacgccggctaattttttttttttttttttgagacggagtctcgctgtgtcgcccaggttggagtgcaatggctcgatctcagctcactgaaacctccaccttccaggttcaagtgagtacatgcctcagcctcccgagtagctgggattacaggcacacaccaccgtgcctggctaatttttgtatttttagtggagacagggtttcaccatgttggccaggctagtctcaaactcctgagctcaggtgatctgcccgcctcggcctcccaaagtattgggattacaggtgtgagccactgcacccagcctgaatgtcgtagttgtaagtaataatgtcctggtgtgactgcccctcccctccctggccacagccttggctgagtgaggccagtgggggtcatgggtgaccatccttgtccccggcaggtccttcgagactgtgttcaatgccagtgggctgcaggccctagtggcccagtatggggactggttttcttatgacgggagcccccgggcccagatcttccggcggaaccagtcactggtacaagacatggactccatggtcaggctgatgaggtaggtgccagttgggtggtgggttggggagagggaggccgcaggaacacagaacttcctgtgcgctttttgtaccaactcattcaaactttgctgccagccccagagggccagcagggggtggtcagatgttggacaccagtgcagcagctcggtggccgctctccacttgggccctgtcactgtcctcatagctaaggggaggatgctagacatctgttgagtgacctgtactgctaggcactatgcttggtaccaggagcaacaggtagaaaacctgtgccccactgtcctgtctcttgggcggtgcagaaatccatcaagttcttgcactggtgtcaatgtgtaaagatggctgtgttccaagagaggctatccaggaacaaacgggtgcct

SEQ ID NO: 71617 - DNA, 2080 bp, Homo sapiens
gtcccacgtgggaccaggtgcccccgttccagtggagcacctcgcccttcagcggcctgctgcacatgggccagccagacctctggaagttcgcgcctgtcaaggtttcatgggactgaagttctgtccctgctctgctgctttcgcccctgctgaccctcgtcagggtcacccccgtcccaaggccaccggacttctaactccagcccctcctgggggcttcgttctctgatctggggtctgagtcatctcctcctagagtgggtcacgaacctgatggggctcagaactgaccccctctctcccccgaggtgggtgggcaccgtggcgtctcttctgccctgccctaaatctcccactctctgtttctgtctgtttcctactgctgctctctcaacctcattcccacctctggggccccttcctcgtgcttctccttcctgagggtttgggaaggtcctggggcagactctggggctcccatggggtggaaggagcctgttccagcacccttctcccagctgcattcccacgggtggccctggagctggtgagctttgtctgggcgttgtcttcggctggcattgctcctcccagctctggcccctctgctccctcaggaagcagtcccctcgtctccctttctgggcagcttccttgaggacagaaacttgaaaacaaacacaaaccaaagtttctggccatctgtggctggagggttctgaatgtcctctctccatgtcaggcagagggtcagcccccatgcttctgcctcaggccccaccccaccccaccccaggcctgcccctcacctcagggccatacccacagcgccctgatggaggaaccagaccgcaggctgtgccaccattaaacaagagcggctgtggccccatgctgtgcttcttggggtggcagggaaggtggggtcagcgctttttctcctctcaggtttgggttctgcgccatcccccatgcagcctcctgtgcagccctctgtctgtccttctgtccattcattcatctgccaacatactcacccatcatccatctgcacagccttccacccacccatccgtcttccatcatccatccatccatctacctatccatttatcatccatccactcacccatccaaccacccatccaaccattcagccatctccatctgtccattttctttcttcttcttttttttttgtttttgttttttctgagtgggagtttcactctattgcccaggctggagtgcaatggcataatctctgctcactgcaacctctgcttcctgggttcaagcgattctcctgccttagcttcccaagtagctggggttacaggcatgagccaccatgcctggctaattttgtatttttagtagagacagggtttcaccatgttggccaggctggtctcgaactcctggcctcaagtgatccgcccgtcttggcctcccaaagtgcttggattacagatgtgagcccccgcacctggcctcatttgtccattttccatccacttacccacccacccatttactcatccagccattgactcatccatccacctatgagatcagacagggagggatccttttttgtattggtctgtataccacagcatggcttacgaagttcttatctatctatcacccatccacccacccatttatctacccacccattcatccacccacccatccaactacctatccattcatccatccacccatctgccaacgcatccatccatccacccacccaatcatctacccactcacctatccacccatccacctacctatttgtcacccatccacccatccatccatccaatcacccatccaaccatcaatccaaccattttcatctgttcattttccatccatctacccgtccacccattcactcctccatccacctacctatccatttatcacccatttacccatccatccatccatccttccaaccatttatccacccatccaaacatttccatctgtttttccatccatctacccatccacccattcactcatccatccaccttcctatccatttatcatccatctaccc

SEQ ID NO: 71618 - DNA, 1050 bp, Homo sapiens
atattattagtagagacagggttttgccatgttggccaggttggtctcgaactcctgacctcaagtgatttgcctgcctcagccttccaaagtgccggagcaaatgaaaatgggcattatatatgtactagatcccagtttcaaaatgttaaaaagaaaaaaagttcatcttaaagctggagaaataaaatcataggtcattaataaatggtaatcgactatgtgaatgggtggttgcaggaaatgacaatacagtagaatgtagttaaatactcactatgctcactatactcaccaatactggaagagttagaaaaggtatccaccataacaagcagagtgcatctgggaagacttcctggaagaggcagcctatgagtgggaataagcaaaaactaagttatctgacttggggagagcaagaaatggtggttgggcataaggggtagagtcttgataaactaggaggctgtgtgaccaccatcatccccctccttaggtaatggagaatgtcagaattatccaggaaggtgacttctacgtcagctcagagaagccaggaccagatcagacatgagtcccagggcatgggcctgcaccaggctaggcccacagggggcttaaggcactggtggcaaagcagcctgggttcaaatcccagctgctccttagctgggcaactctgaactggttacttggcttctctgggcatcagatccctcctcacccaggaagtagggcagatgacagggctctgaggtcaggcatgtgcagaatctggtgtatggaaggtgcttcataaatattaaatttagaataggatgtgatttctttctttttttgaaaagttttgaaaggtaaaggccattagcttggaggcagaagacagacctccctgactgctgaattcctgccggcctgaaattggagcattccaagctcctcagatgagtcataagccaccaagattgtgagcctctgggtgagtatgagtagaattagatacttcctttgtggggctcagtgcaaaatgcaaatgagaggtcggcg

SEQ ID NO: 71619 - DNA, 1026 bp, Homo sapiens
gtaaactgtcagttgtctagaaggcctggtggggcactgaaagccactggaatctggggaaaggtagggggtgggatggaagccggagcccccatgggggcaggatatctgctttccagacggaacacaaaggggctaagctcagtttgaatcccgtcccaggaggagatggggaggaggagggagtttgctaagaagcttctggcttggatgggctttgctttgactgctgcccatccgggtaccacattccagagctgaaacctcagctggctcacattcctgcctcttcagagacttatttcccctcaagggcagagggaagaggtgggcagtccccagtcccagccacgcagttctggacctaaagagattgggtttggattccatatcaactgtgtcctgtgtgacttcgggcatattacctaacatctctgagcctccatttcctcatctatgcaatgggaatggtaacaccgtctttgagagttactgagaagatgcaactgatacctagagtggtgccctgcatgtaatgggtgcttcctcctaccgttattgtaattgtccctcagtatccatggggaattcattcaaggacacccacccctctcccaccacacacagagatatcaaaatccatgaatgctcaagtccttgatataaggcatatactatatggaatagtattttcatgtaacttacacacatcctcctcatactttaaattgtctctagattacatataatacctgatgcaatgtaaacactctgtaaatgcttgttataccatattttttgcatttttaaaattgtatattggcatttgttattttttttaaatattctttatccaaggttgggtgaatccacagatgtgaaaccatggatatatggagagccaactgtatttcatttatcacgtggaatggtcgtcttttgtctctactagccattcatggactccttgggagcaaagactgtgtcctagacctagggccactctggaggcacctgccaccttgt

SEQ ID NO: 71620 - DNA, 1468 bp, Homo sapiens
caaatagagttgcttttgtgataaaagctaattgccattcaggccccataagaagaaagaaaatagctgctttagtgttagtttattttatgaccaggaaagtcctgaagtctgagataaaagtgtttgtaaaatccttaccacaatactatgagccccataaatgggagttgctatgagtcccataaatgggagcttccgaggttactggctccaacttgggcttctgatggccttgtctggaagatttgagcccaaatggaagaaattgggtctagcaaatcctgggagaagttttgagggtagttagctaaaccctaggatcttctgctttctagtaattcaggtcccctatttctcataagagaaagagtgggaaaatactaatgaaatagccccaaacttcccaaggtgggggtgcatatgcaggggaaggaaggggtgaccatcctttggggctttaaaggctccttttgctttaaaaaaaaaatcaaaatccccttctccagcttctcttcattctttttttcttttccttttctctttattttattttattttattttattttattttattttatttttgagaaggagtctcactctgtcacccaggctggaatgcagtggcatgatctctgctcactgcaacctctgcctcctgggttccggtgattctcctgcctcagcctccccagtagctgtgactacaggtgcgcgccaccacgcccggctaatttttatatttttagtagagatgcagtttcaccatactggccaggctggtctcgaattcctgacctcgtgatgcgcccacctgggcctcccaaagtgctgggattacaggcatgagccaccacacctggccgcttctcttcatttctttgactttgttacaccccctcctgtcttagggccttggcacctgctgttctcttttcttgaaatacccttccctgcccattttacctaattggtgtttactcatccttcagatcccagctctgatgtcctttcctggggaagcctttctctatagcctgacttttccctccttagacacactccttcgtgccaggttgtttgtgatctggtaacatcatctcctccactgggtgataaaccccatgagaacaatgagtaatggtgtctgttcatttatcaactcattcattcattcattcattcactcaacaaatatttattgaggacctatcatgtgccagaatggatggtcagggagaccaggaagcaggaaaaagggagattcttataagaaaatgaatgcaaaaaaaactgtgactgggcaaagtgagtgagggggcgagagtgagagaggggaggagtgggaagagctgagatcaagggggaggttggctttaatacaaaaagtaaagggagactgtctcagtcagtgagtgctacaataatgctgcaaaacaaattaccccaacattccgtggcttaaa

SEQ ID NO: 71621 - DNA, 1055 bp, Homo sapiens
ggactgacagaggaagccagcctggattccaacctcgctcttttcctggagggccaaggggccccacacgtcctctcctgccaccattgatccccttggagttctctgcctagaacccgagactttcataaaaagcagaaagactgtgggcttaggtgtgactggggttcgaatcctggctccaccgcttcttagctgagtgacttcagacctgcctgtccgtgcctcagttccgtctcctacaagaggcagcataccacctgcctgtggggttgctgacaggagtggagccatggttcatgatggtacctaatcaggaggtgcttgtggggctaagcccaccatgccctttcctacctccgtgcttttcttcatgaccctgaatcccctctcctcacagaaaactcctctgcattcttcaaagcccaagtcaaatagtcctcctcttcaaagccacctctaattgtcattccctccacgcctcctctggaatccttgagctttgcatctgttctattcacccaccacttatcgagcacctgttgtatgccagccatgtactgcaccattagcctggcctccaagaaaacagaaacaacttctacttgtctccccagccgttgtccactgcttggtccagcctctctgaagggtttcagcttcctccaagccaagctctgacctgctgtgaggaagcagcacaggagaccctttctctcttttttctcaagggaatcctttcccctgcgggtagaagatggggaggggatggccagggaagcaggagagtttctgggggtgcgagggaggcagccccgccatggtgatgctgagactaactctagtgtttctctctcctcctcatttcccctttgattctctcccctactccttatctttcttcattgccccatcctctctccacctccctctgtatcttctctccctccgctctccccaacttccctctcttgcattctctcgcttctgttctgtctccccgcacccttgttctgctcatctctcccctctccctccttcctctgtcatttctc

SEQ ID NO: 71622 - DNA, 1023 bp, Homo sapiens
ttttaataccctcacacaccctaggcgtgtagatttcatcaccattcagtaactgcagaaactgagaggagcccagagaggtgaagcaacttacccaaggttgcccagccaggagcagcagggtttgatcctggcagctcacccacccagcaccctgcatctagcaccctccaccctgtacctcaggcctctccactcagaatccagccctgggcttcctggcccagtgcttttcccctccccggactgttcacgcctgcctcatcccagggttcctttcagaactcccttctccccttatcagccacgctcttctcccccggcttgcctttcctcaacgtctgcttccagaacaaaaccccaagaagcgctttctcttgtcctcccgacgcacccccccgcccccccgccctttctccctgcctgcgcctttctccctgcctgcctgcgcctcccatgcagggccgacagcgccagccagggaagggagagacacaggctggcattctgtcaaggaattaattgaaaaataaaatcattaggtgggaactccagaaatgcaaaaatggtggttggaggttggtggggaggggggcaggactggggggttgtcgggggatggctgagctttttgtcaagttaatttctcgggtattgatgtttggtgacattcacttgttgtttatcttcgggtgcagctgtaatactgaaagaaaatgcacagcttgtttcgtttatttattttacacctttctccggttctgcattatgtttgtttggtgaaaacccactgaggcttttgatgtcggggaagtgggatttcagcagctgttcgctgcaaacagggtgctcctcaaggaagcagggccagcgggaggtgcggggtgtcattcggtgggaactcggggcctgacatgtcctccagggggcagttgggggcccagcctgaaccctggcagatatgccaggcccaggagcacggaggctggcttatgatacatgagtacatagttggcaggtaaa

SEQ ID NO: 71623 - DNA, 1047 bp, Homo sapiens
tgttcaaagcaggcagagaagccagcagggtttcctcctggggccttgtctggcctggcaggaagcccagcttgtattcaaggtgcagtgggaagctcccagaagatttgaagagaagagtctcaagacccaattcacactgtcagacctcatcccctgcattgtagaggggcaagaatggagggcagaggtcccatccaggccaataagggccatggagcagaggctgtggaggtggggaagcaggtggattgagcattttgggtaaaggtagagccagccagacttgcttctggaaggcaggagaaaaatcaaaactggtgcataggtttttgctccaagccactcacgggatggtggtgctgcatggtgagcagaggcccaggaagctgggaaggacaggtggctgggcgggggtgttctgaacgtgttgaagttgagacacctattaggactcccctcgatgtcaggcagatagatctatgagttgggagctcaggggcgaagtctgggctgagatataaatttggaagtcatcagcagacagatgatatttaaagcctgcaagagttaaccccccctccccacttccataacttaatcattcacaggacagtacattttcaaaagactggagaccaagagagcccgttatccccacgtcagcctttgcgaataggccaccttgatcttgcccatgaaaacataatcatcgggctttaaaactcacagtcaggaaagttcaagcaaagatgtgaagccacagaatttgttattcaaaatatcctttggtcgtggttccttccatccacctggagacagaggttttctgtaagcttcccattttcattccttcacctgggtccttcttgctttctcctgaagacttgactgtagcagcccttcctccagaggtgttgaaggcctcagcaggaggcgggcaaagagggaaactgtcccggattgccatagcgggtcctgacaggaaaggccgagactgggtggggtgtgggaatatgtgggtgatttatccctgacctctttgaa

SEQ ID NO: 71624 - DNA, 1085 bp, Homo sapiens
aatgacacctcctccaggaagccttcgctttccctccccctccacaggtatcagtaatttctccatcctctactctcctcttctgtcaccgtgccttcttgccacgttgtaacttatttctttacgatttgttatcctctctggacccgtgccttccccacatgggggctgtgtcgtgctcatctctcttagtgatcagttcttccctgggtcccccgtgcccagcatagtacctggcacatgccaggctcccagtctcagactggggaatattcgagctgaggcaaatgtggaaccagagaaatgaaggctaaatacacagttgcaagctcacaactcaataagaccccaaatcctgatgtgcagaaagagagcctgtccttatcgacaaccattgacaagcccaaatgcgcccgtcggcaaatgtttgtgtaagggactctccctggagtggagacgggggcccatctgccccgccacccccatcccccaaccccggggccagccgaggagtgcaggctcagcggttctgccctgccttagagagaagcccccttcaataaattgagttccaaagacagcactattgcctcgccacagtggaaagacttagctggcagcatttctgtgggattgactgtctccacagccacttaccagccaggccaaggcccagacaggggcagatagaatgataacagtaacaaagacagttcttcatttgcctacatcttcccattcactccctagcagctctatgagatggacactattagccccatttcacagatgagagaactgaggcctgccaagcactgcagtaatttatgacgactactgtttattaagcacttactgtgcatcagggggccatcctcacaccggcatcatctcagtgctcacagcaactgtagcagctgtaggcagtgctatgtctactcagcaaggaagtggcagagctcagacttgatctccagaccggctgtagagcctcccaccccacccactggccccaactatgttatactagcaaacgtcactcaagaaaaaactcctggccaggcgcagtggctcaggcctgtaat

SEQ ID NO: 71625 - DNA, 1026 bp, Homo sapiens
aaaagttagcattgtagtgttattgaaattatgaatgaatggataaccaattactcttggaattgggaacagaaaaatgtttcattgttcatcccagtgaattgatctcttgttgccagttggttaggtgcagagacatgatctgaacactctagtgtccaaaggcatcatgtctgtgtctgtaggatgtcacttgcctgtccctgaagtccagtacaggcactgaaatctcttcacggttctatcatgatacacatgtatgtacacgtattaaaaattagactgtctaaataaaaacagaaaaacctgaaattgtcctacaaaaagagcaaatcctctccacccccaccccaccctcaacacacatgcacaggtatatatgcccaaatgtatccgagaggcagcagaccctaattagagaaactgttccattaaatggactcttactttagtccaaatttcaggttccaggatacctgtcaggttcacttagacctgtagatctttttcccagccaagcccacctgtggttgaaatgctgctggttttgatgcaatttacctattggagttagtcattttgctacttggccaccaaggttaaatgaagcttctggtgctccttggcatgtcctgtgagtctgtttacctgggaatgggatgtggccagaggctctgctcaggtaatcatagaagtcaaagcaagaggttgctcagtgaagagggaagggctactacagctggaggctttgtgcacagtcaagcctcagctggtagcgtagtgattcagatggtcagtactgtaatctgcaggagtggtggcctctaggattgtgcagtattcaacctgcacgaccaaacatggccgccctgagagtctatcagattggtgtttctgtttgcttttaagagacagagtgttgctatattgcccaggccagtcttgaactcctggcctcaagtgatcctcccacctcagcctcccgagtagccgggattgtaggtgcgagccaccacacctggctag

SEQ ID NO: 71626 - DNA, 1045 bp, Homo sapiens
aagccaaggcccccccacccaaggcatgggcagggtaatagagagaccatctagctctcagaatgcaaaggcagatgaagtcagcttcacctaaacacattgttgaggcttcggtgggatccaggactgctcgggggacctgcagcaccatggcctgcgcgtgggtgaacatttaggattctagacactaggtctcgttcgttcattctacacttgcacaagggtccaagagtgaagcctctgttagagttgccagttagcatcttgcaaggtaatctgtggttacaaaatcagccttgtgttttggagatgagaaacaattatctttgtgtggcatctaccttctttgctctcactctgtagtttgaagaataagaagtcatgtggggaacttcagatatctttgtcctccttttcccctctgtttgttctaaatcatacactagtattcagttcataaacagatgtggtgtgtggtgagctgggatctgaggcagagaccaatcctgccagtatctgggaagcaggatcttagctatgatctccgggtatcctgcacagcaggaatagcctggcgagatggggtcatgacctggggggaggtttcccatttccctaaacctcgactgatcagtcgtccctccaggaaggtacatatccttagcctctcggtatgtctgcttgtttaaacatgctctgctttttaaaaggagtccaacttaagaactgccagattaaaacgggcttgctaagaagagcgcatgttgatcgggaaataatatcccgctgaaatgacagtttcacttggttctgcagtatatttaggatgacacttatccggggaaacaaaagaccacaagggaagagagagcactttgtgtgatctcatgtattatatttatttttagaagacagggaattagtgtccactgaacataattacatgtggtgactcttctccttgccattgttctgatgagagttttcttaaaaccctggaaacgtaagaccttcttggagggccgtacctgctattgttgttcac

SEQ ID NO: 71627 - DNA, 1101 bp, Homo sapiens
atggggaggcttagtgatttgctcaaggcaagcttcatgtgtaataggtggtggtgctgggctccagcccaggtattgttgctgttaggatagacacacgtaggggactgggaaatgacacccatgacctgtgaggttggctcacagctggtgctcaccacattcttccctggggccaagtggctgcggcctaccagagaccgacacttctcctgtcctcaggtcccctgtctgagctccactaccccatcgacagcctgaccaagaaacccaagggttttgcattcatcaccttcatgttccctgagcacgctgtgaaggcctactcggaggtggacgggcaggtattccaggtgaggccccgtcctgggctggccaggaggctgtggggctcacatggtcgggaaaggctggtgtgtgtgtgtgtgtatgtgtgtggacacgggcgtccactttgtgggcctaagaaaatgtgcaatggcatgctaagtcactgcctcactcaagccactggagagtaagaagtcgtgtgagggcacggtctgatctgttctggtcactgatctgtggcacctacacctctgtctggcacttagcaggcactgaaaaaatactccttgaatggatgaatttgctctccatctctatagataccaccttagaagaggagtaagaagaaaagaattttgacagggacctattaaaatggccacagtggaataaaagaaacttctcttttcccagtgttaccaagtaatatacttagcatacatcctcaagccccaggctgcctcatcatcaccctttttccttttctcattcattcattgatttattcatgatttcttgatccccttgttgccatcaggccagacctggccccaccggcatggacctcacattcttactcactggtgcagggacaggatgcgatgcaggcttgagaggcggggagagggctgcgggtgcggggttatacactgatcgaagttttgtgtgtgtagctgtgtcaggtggccccctcacgacatcaggatcctgtgtcaggtgggaagagagtggccacgttctacctgacctccctcccaccctctggtcagg

SEQ ID NO: 71628 - DNA, 1046 bp, Homo sapiens
aaaggaaagtgcatgggcttgaggggctcaatgtgggttgggatggcttgagcaggaggagacagtggaagaagcccacgcagccagccctgatgaggagcctggatttcaccctgagcattcagaaacccctggagggtattaagcagagactgaccgtcctgtacctactctgtaaagtgtcacagaggctgccgtgtagaggactaggaagacatggctggtggcagggagccaggagctcaatgtgtggcacagagaatatcaaagctgcagtagccctgccccgttttggtattgctaatcagaggacttatgggggatgctgggcacaggggccatggacacggtgggcatggtgcctcaggcctctcactaggaggaccatctaccatttgctacctctgacctctggtttgctcatagctgtcgctgatcccagcttccctgtttttccagaagaggcaagcctcgaaccaaaggcagctgtgcagaaggagctgtcggacatggattacctgaaatccaagatggtgaaggctgggtcgtcctcttcctcggaggaagaggaaagtgaagatgaagccgtgcactgtgatgaagggagtgaggccgaggaagaggattcctccgccaccccagtcctgcaggaaagagacagcaagggtgcaggccaagagcaagggatgccagctgggaaaaagagaccaccggaggccagagccgaggtgcgtgtgtatcccgcaggtgatgagggaggaggtgcgctctcctgcttgcccgtggtccccacagctcctctgttaggagagcggaatgttggggaaagacgcagctctgcagtccaaagccttcccgatcttggccctgccgcttgctcgccgtgtgttctttctgcgtttcttttctgtttttatttttattttattttattttattttttgagacagagtctcactctgtcacccaggctggagtgcggtggtgcaatctcagctcactgcaacctccgcctcctgggttcaagtgattcttctgcctcagcc

SEQ ID NO: 71629 - DNA, 1031 bp, Homo sapiens
tgagaaccacagctctacctcatccattcactcatgcatttagcaagcactcaatgatgctgggagtttagagaaaaaggtgatgcctcagcccctgtcctcatggagcctgctgtctctgggcaggcagggggctgacaggtcagcaggctgctttggctcagtgacatcagtgctatgatagggtgagccccagggactgtgggagaacaaagatctatagccggaccagggaggagtcaggaaagcttcctggaggagtgggctccactcaggtcactcgtgtatttagtgacttcgtaaaaacatctctaatgctttgttgagaaggaaaaaacagatgatggataaatatatatatgtctcgtgatcctatatagacacaatcgtattcctctatccatacatatatgataaatgcatagaaggccataggataggatttgtaccaaaatactaatcattcctctccatgagtgataggaattggagtacatcttttttaacttccattgtacttttgtatattatttgaattttgtaccgtgagcatgtcattattatagagataacaagcctattttggaagtgtgcacaaaagggattgtaactggccaggtgtggtggctcctgcctataatacaagcactttgggaggctgaggtgggaggatcacttgaagccaggagttcaagaccagcctgtgcaacatagcaagactgcgtctttacaaaaataaaaaaaaaaattagccgggcatggtgacatgtgcctggagtcctaggtattcagaaggctgagacaagaggatcacttgagcccaagagtttgaggctgcagtgagctatgatcatgccactgcagtccagcctgggcaacggagtgagaccctgtgtcttaaaaaggattgcaaccagatggcagctccttcccccaggggcagtggttggttgaccagcgtcagccttaactgtggctgggagtggcttgcggtggtggatgccccagtaaccagcgctctcaaagtcctc

SEQ ID NO: 71630 - DNA, 1121 bp, Homo sapiens
agatctctctgcctgcggcgtctccacctgcagtccccggactgcgctcggccttggcgcctgggtagacagaacatagcaaatgctagggacgcgggggaggatctgaggccagcagagaaagcctcagacacccaaagccccagtcttggttccagaccccgcgggagagggaaaccccggcgtcagcttggtggtcgccctgcgggccccggcgtacgccagcgctgttggaatttcctctcccccgcggtttccctcgcggttcagatcgggaccagaacgcgatcagcttcagtgccccgccgcaggcatttttaaatagagtattgcgtcccccattcagcctctctcttcctctaccggggaacaaaggccccaaaaccgcggtcttagctgggacgggtgtcccaggacacacaagagggttggccggggagggggatgctgaaataaaagctgtccttttacatagcacgacagatgcacaaagaaatttgaacgttctcgtattaaaaaaaaaaaaaaaaaaaaaaaaaaaaaaaaaagcctgcggcacactccaaaatccggaacatcccctcagatttctgtaaatccgggacatatgcgccgcaggtacgtacaccttcagctgaattaggaaagggaattacagtggatcctggagcccacttcggtttgaatcctggctccataatttcccccagaggatcttgggtaagtgatttaatggtctatgcctcagtttcctctcttgtaaaacagagataaagatcatatatcgtttatggggttaactgtgaaggctaacgggggtcacttttatggggtgcttcaccgagtgcctggcttgtgcacgtgtcccttgtatgccaagtatttatattattcttgtttcgtgtactttgaactccgacatctgcaacatatacttcttgattatacgcatcttgattataaaacaaccaaatgcatctacatccggaactgtcttgcgcatgaacttctaaacccaaattggaagagacagctacagatggagcacgcacagctacacgcaaacatacacatatccttctaacacctgcagctcctggccccagaatgcagacacccaa

SEQ ID NO: 71631 - DNA, 3066 bp, Homo sapiens
tacctgaacagacaaaaccttaagggcacctcaaggcatgatgcagagaactggcccaggccagggtgcctgcatcttaaatgctgcttctgccaattcccagcttagtgcactcctgaactcctgcggcctacctcggcttctcacctggaacaccagtgaatcatgctggacgatttctttgtctctgtttataacaaatgccctttttccctcccccagccccagtttccttttgcttaagatcttcactgtctgttttttttgttttgttttgttttgtttggagaaacttctaggattggggtgggaggatgggggttggggaagaagaaagatttaaaaaattattcctactaatttatgtcctccggcttccccttggttacctctgtggggtaaactgaatctgtatccccatttaacaggtgcaaggagatttcctgggggctgcacacactgtgtgcagcatattgcaggctttcactcatttaatatctacaaagtcctcaataagtatatgaattacttatgatttccctgttttttcttcctataaggaagctgaggcacaagttaatcaaagtctcttggcctagggtgacacagctaagatttgtacctagagatttctgagtgttgacttctctcctgcccccacctatctccccccccaaaaaaaaaaacacaacaacaacaacaacagaacataccagggattcatggcttgcccaatgttggagggggagaagagaggagagggatgagataagctcctcccacccggctgactcgctgtgtgtctcttttctcaccccagggcctggccatgtcccctttcggaagcctgttcccttacccctacacgtacatggccgcagcggcggccgcctcctctgcggcagcctccagctcggtgcaccgccaccccttcctcaatctgaacaccatgcgcccgcggctgcgctacagcccctactccatcccggtgccggtcccggacggcagcagtctgctcaccaccgccctgccctccatggcggcggccgcggggcccctggacggcaaagtcgccgccctggccgccagcccggcctcggtggcagtggactcgggctctgaactcaacagccgctcctccacgctctcctccagctccatgtccttgtcgcccaaactctgcgcggagaaagaggcggccaccagcgaactgcagagcatccagcggttggttagcggcttggaagccaagccggacaggtcccgcagcgcgtccccgtagacccgtcccagacacgtcttttcattccagtccagttcaggctgccgtgcactttgtcggatataaaataaaccacgggcccgccatggcgttagcccttccttttgcagttgcgtctgggaaggggccccggactccctcgagagaatgtgctagagacagcccctgtcttcttggcgtggtttatatgtccgggatctggatcagattctgggggctcagaaacgtcggttgcattgagctactgggggtaggagttccaacatttatgtccagagcaacttccagcaaggctggtctgggtctctgcccaccaggcggggaggtgttcaaagacatctccctcagtgcggatttatatatatatttttccttcactgtgtcaagtggaaacaaaaacaaaatctttcaaaaaaaaaatcgggacaagtgaacacattaacatgattctgtttgtgcagattaaaaactttatagggacttgcattatcggttctcaataaattactgagcagctttgtttggggagggaagtccctaccatccttgtttagtctatattaagaaaatctgtgtctttttaatattcttgtgatgttttcagagccgctgtaggtctcttcttgcatgtccacagtaatgtatttgtggtttttattttgaacgcttgcttttagagagaaaacaatatagccccctacccttttcccaatcctttgccctcaaatcagtgacccaagggagggggggatttaaagggaaggagtgggcaaaacacataaaatgaatttattatatctaagctctgtagcaggattcatgtcgttctttgacagttctttctctttcctgtatatgcaataacaaggttttaaaaaaataataaagaagtgagactattagacaaagtatttatgtaattatttgataactcttgtaaataggtggaatatgaatgcttggaaaattaaactttaatttattgacattgtacatagctctgtgtaaatagaattgcaactgtcaggttttgtgttcttgttttcctttagttgggtttatttccaggtcacagaattgctgttaacactagaaaacacacttcctgcaccaacaccaataccctttcaaaagagttgtctgcaacatttttgttttcttttttaatgtccaaaagtgggggaaagtgctatttcctattttcaccaaaattggggaaggagtgccactttccagctccacttcaaattccttaaaatataactgagattgctgtggggagggaggagggcagaggctgcggtttgactttttaatttttcttttgttatttgtatttgctagtctctgatttcctcaaaacgaagtggaatttactactgttgtcagtatcggtgttttgaattggtgcctgcctatagagatatattcacagttcaaaagtcaggtgctgagagatggtttaaagacaaattcatgaaggtatattttgtgttatagttgttgatgagttctttggttttctgtatttttccccctctctttaaaacatcactgaaatttcaataaatttttattgaaatgtctttgggccttgtgttaaatgttttttctttgggaacctttcctgaagatggacagtcaggggagggtttagtatcttcttgttctgagtttacccccttcccttcgcctttaaataattaagaccgcccccagcgaaccaaaatgagatgtcactcaagttacaaagctaaaaacaaaagtcccttacttgagcgaag

SEQ ID NO: 71632 - DNA, 2334 bp, Homo sapiens
atatgaaagagggtctcccctcccccaccccctttcaaagaatttctaaaatccagaaaatcacccccaaatttttaacctatccccttggggcgggcattaaaaaataattgctaacagctaaatatatttttattccaattaatttgttagtaaaacgattacagtaaagtgcagcatgaaataaccacttcctcccaatcttagccaccatccaaaatttgggtatgctggggacagacagcgttgtgtttgcaggattggacacccggttctccctatataaggctggcagtccagctgtctctgactagatccagcctcttctcctgcttttaaataaaatttcacagcccaagcaaatgccttttcctaatgaaaccccatcttgaataaatgcaactgaagcctccttcctttctccctaaccctctgccacactcttcagcccagttagagggtcaaggacaaagcttgggtctatgtggctgccctggggcaagcagatttcagtgaattagcgttgtccctgggcagcaggcagggtgtgaggtatgtgtgtgccgctttggaaagggtaagggaaacaaagaggggaaatgtatgttacattctgtaacctgggtgtgggcttctgccacagaaaacagctcaccctgcagtccatgagggtgtttgatgaaagacacaaaaaggagaatgggacctctgatgagtcctccagtgaacaagcagctttcaactgcttcgcccaggcttcttctccagccgcctccactgtagggacatcgaacctcaaaggtaaaccatgtcacctttgtgatcactggactccagtccctcgtggcctggaagagttgaagggggatggggcaccaaccagggcacttgccctttaaaagctagaagccttctaaacatccttaaacagaagccagagttcaaaaagggctatcaggtgtgtctccccttccccgctaaggcagtagaaggagagcacagaggcctttctcccagatccttatttggctggtggggaggggaggtgggtgtctgtttgcatactacctcttggcaagcagctttgaaaacttgcttgaagcgcttctctcttttctctctgtctctgtttctttctcctcccattctctccaaccaacagaggctccaactgctgacttttcactgtctttgaactctaggttacaatgtgttggactgggtgggggggaagcaagggactctgccacctggaaccgagaaggtggcctagaaaacatccagctataaagcaacaattgacctgggagaggaggtggagcactggggatctgcggtgggggtagagctgggggaggtgggtgaggagtggacaagatggctcaaatcccccctcagttacctgtgtttaaagagcaagcagtatttatttggaaagacacacacacacacacacacacacacacacacacacacacactctcaacgggaagaaacctgttttttagtgaaataaaatgcaagtcctttatgtcttcaatccatttaagctttaaacataaaataggatccctttttcttttcttctggtggaacacccacagagggtgtggtaaaagcgaaaaaagaatctatgatcgtccccgggctgtgagccatctgtccgacactcatctctctctgcagggactggggcaaatacaaacggttcaactgagtactggtgttgaaggacaggtgtccgttctgccattatcaattcagatgtcagggttcttgccaaacaaatccttccagagtaattcacaaatttgtggaaggtgctgctctctgtcattcactgattttttgatagtaattagaatatgttccagctgtgagttttaatgttactttttacttttaaaaagttaatttgcaatcgaatggggagatgcatgtgaaatctgccactgtaggaactcaaaaaaagaagtaaaattcattaaaataagaagagctactgattaggggattgtccatctaagggaaagtttaaactctgggtaaatactttaaattcataatcgcttattgaattttccagcaatgttgttgggcacgattatccccattttgcagatgacaacactgaggtgcagagaggctaaggggctttccccgggattacacagccactaagccacgagctgggattccaacttgggaactggagttccgttggctcatactggagataacgcccttctgccttggttttttccttcgcctgtggtagatttatgtcccagcgagggtgagagcgacgccgaggccgagagcaaagaggagcat

SEQ ID NO: 71633 - DNA, 1046 bp, Homo sapiens
aagtatggtgtagcctagttaatttccttaaaggtaaggaggtaggaaaagtacttgtcctgggtatactgatagcggcaagcatgtagcagtggggaaagtgaatgatttccacccgctcttaggataagtgcctgcatctcacttctaacacttcagagttggatcctaaaaaaagggatttttctaaactatctaataaataattgtttcaactcaccttttttctcttcggccatttccagtgtcccggaaaccttttgcaaaagggttgttgtctatttttaactgggttatctattggaagagacacaagcaagacagagacattgttctcattttctagaatgttttgagggtgtttttcccaactcaacaagtctagagatgtgactgccaacagaagtcatatagatatgccagggaaaggagataataaggaaactgtggcagggcttgtatctcctatatgaggccaaaccagggatttggggatgaaattattcaaagaaattcttttctttgggcagccaacagtttgggtttagacatggaagtgttgtcaaagtcatcaagagggaaaacctgtagatcttaaaattatgctttcattttgatttttatacagtgcaattaatcataaattatagcatactcccttcacacacacacacacacacacacacacacacacacactccttttccatgaatccaataaatgatttatggggtttcactacccttgtgcgggagtgagtgcgggagtgagtttaattttttttttctttgcctggggggtggtttgaggaaattacaatattgacagttacagtactgaatgaccactggaaacatctgttttcatttatatgctctgccatggccattaggtggagaaggcccatggcctttttgtctgatcaaaaatgctacattttattattacattaacaacttcatttcacaggattctgggtctagagggcacatgcattttgcactttgagaaaaatgctatagtgtgtaatctttcaaatcccttcc

SEQ ID NO: 71634 - DNA, 6005 bp, Homo sapiens
cgcgcgctccccagtggctcccgcccgccctctgatcatgttgacatattcacaggacaggcagtagtaccgatgcggcgctgcgacgttacagtttccgacaccttctttttataactcagctctatcccccagcactcgacctgtgaaaaccacgcctatgcagcaacacaattggtccgaaagcgtcaaagagccaatcaagaggcctccggctccccgcagcccacagcgcagcccgaccttctagagccgccgagcagacgcccggtgaattctagaggcggcggagggtggcgaggagctctcgctttctctcgctccctccctctccgactccgtctctctctctctctctctctctcccctccctctctttccctctgttccattttttccccctctaaatcctccctgccctgcgcgcctggacacagatttaggaagcgaattcgctcacgttttaggacaaggaagagagagaggcacgggagaagagcccagcaagatttggattgaaaccgagacaccctccggaggctcggagcagaggaaggaggaggagggcggcgaacggaagccagtttgcaattcaagttttgatagcgctggtagaagggggtttaaatcagatttttttttttttaaaggagagagactttttccgctctctcgctccctgttaaagccgggtctagcacagctgcagacgccaccagcgagaaagagggagaggaagacagatagggggcgggggaagaagaaaaagaaaggtaaaaagtcttctaggagaacctttcacatttgcaacaaaagacctaggggctggagagagattcctgggacgcagggctggagtgtctatttcgagctcagcggcagggctcgggcgcgagtcgagaccctgctcgctcctctcgcttctgaaaccgacgttcaggagcggctttttaaaaacgcaaggcacaaggacggtcacccgcgcgactatgtttgctgatttttcgccttgccctctttaaaagcggcctcccattctccaaaagacacttcccctcctccctttgaagtgcattagttgtgatttctgcctccttttcttttttctttcttttttgttttgctttttccccccttttgaattatgtgctgctgttaaacaacaacaaaaaaacaacaaaacacagcagctgcggacttgtccccggctggagcccagcgccccgcctggagtggatgagcctctccatgagagatccggtcattcctgggacaagcatggcctaccatccgttcctacctcaccgggcgccggacttcgccatgagcgcggtgctgggtcaccagccgccgttcttccccgcgctgacgctgcctcccaacggcgcggcggcgctctcgctgccgggcgccctggccaagccgatcatggatcaattggtgggggcggccgagaccggcatcccgttctcctccctggggccccaggcgcatctgaggcctttgaagaccatggagcccgaagaagaggtggaggacgaccccaaggtgcacctggaggctaaagaactttgggatcagtttcacaagcggggcaccgagatggtcattaccaagtcgggaaggtaagcagtgggggcctcctcccctaagctgttggagagttttttcctccctttatttctctgctcccagaacagtcggttggtcggttattacggcttggacgaaaagttagttcccctagaaatgtatgcacagacttccaggccctgccccggtggcaggaaatttcagcttacctgggcatctgcatgggtcttgcatttggtctgcatcctgggttccctcccgaacagacagaatttttcagtggagcacagacatccctgcagggagcaggaaagaaaaaaaaaaaaggcactctactgcaagaaactcactcttcaaaccctcctggaacatccttatttctttgttgatgttgtgttgtctgttttattttgttctcagagagaaaaacttaaagccctttccttttgtgtgggtattgggaggcctgacaccattccccggccctttctgccctccagtctagcctctgggtctaaaggggcctgctgctgccctggtcagagagaaatcgaagggcattttggtttgtttgcccacactacttcacgtgtctgtaacccaagggcgagttcagcaggcaattttgcataatttaagattatgtttgcagacttaaggagccagtgaggagacacacaccttttttttaatgtgtgaatattatcaaccatattttacataatgtttaaaggtccttgcctgaccaaaacctgcctggaagagaagatcctgtaatagtcatttaaaatcactgattttttttttgtaatagcattgaagcctgtaaaggcataaagttgatacaaaaataaaatccccttcatgatatcttaagcgttctgtctccttccaagctaaatgaggccaaagtttggcataaaatcctcctcaaactcacaagacatttagtcagttttccagcaaagtgcttccttgcttccttttaagtcaagactacagaatgccaacccttctgtgaaattaacagcaatgtggtggcacagtcttgcggttttggactggcctaagaagtgggggaatgtgttagcagctccacgggcagatcggttatcaggcccaggagtgcaccgaagtctgcaaaattcgttctgggaactcactgaagtccagtttcacttcgcccacagcgggattgctattctgcagcagggaggggtgcaacttgacgttcatttccttgataagtttaacattttctcatcaatgggtggtggaaaattctagtcttaactgaccgcgctttacaaaaatcttaccccaacctgtttagatctagatacccacagaaaaagacatgggcaagaatttgctctcaggagggcaatctgtaaagtcaagcaaggacaaaaaaaatattgaagaaattgttagacaatgtagagaattgcagtgccacaatgcatttgttttgaaccttgggacgtctaaatatggcgaaactgagaatatttaatacgttagttgtggaagaaaacgattttgcaaccagttgcctcactctgaaacatgtaagcttatcagtcacaatataaagtcttagacttggtttcaatattatgtgatacataggaaatcaaacccaagattacgggtggtttatctttctttttcttttctattctttcgttttataggcgaatgtttcctccatttaaagtgagatgttctgggctggataaaaaagccaaatacattttattgatggacattatagctgctgatgactgtcgttataaatttcacaattctcggtggatggtggctggtaaggccgaccccgaaatgccaaagaggatgtacattcacccggacagccccgctactggggaacagtggatgtccaaagtcgtcactttccacaaactgaaactcaccaacaacatttcagacaaacatggatttgtaagtttcattgctctcttcagtaaaattttctcctccttcactcagtcaaaggcagtgcttcccatttcatgagtttcagcccagacttctcctttgcttctccctaagcatagcaaacttgtcctcgtctggaaaaaggattcggggtgtttctctccaaataatggaaggcctggcgttctaaaagaaatggggcaagaaaacttaccggcttgtgttctatagcaattccagctctttggtagattcctgacctgagagtgaagttaaaaaccattttttaagagctaaaatcaatttcaaggctatgtattcctaaaggatttgttttgttttaaaatatcatacttctgttttgaaaccagtgatattattttctcaggagagtttacgtttcggagccttgactctgttggttaaatggtgtgaatacatttttaaaaactcgttcttttactaaaaaaagaattgggcttaggtgggagtccggcttaccctaaatgaggcttagatcttcagaaaaaaatggtttgtgtgttgggagtgtatatatggattcagtgacagtgcttagaaacttagaaaactttcattgcttgtagatatcaggcaaaggaccttttgcgccttttcctacccctccccaacatttcaataaaataaacagcgtgataagcaaggagtaagcagaaagattaggcccaggaagacgcgaatggcgcggaaatatcttcagcgggcaggaattgcatttgaagcccttgatttgattaaggcataaatattcctctctagagttcagcctttcagggctttaagtggattgggctcgtcaattagtgggcgcttaaagtactgaatcattttgtaaattaaaatgcatgtttttctctatcttttaagactttggccttcccaagtgatcacgctacgtggcaggggaattatagttttggtactcaggtaggctagggttcaaggtatgaatgatccttagatggtgagggtggggggggccctttggcaactgaggagcaatttggattctccagaagataacatctgtggagcgaaacgtacccagggggtactccaaggaggtgggctcggtacaagcgtggtaccctgcggtggggaagatttcagcctggcaggggtcctaagatcccgtttgttctgctaaatccttgttttatgtatgtctcctcttccctgcccctgcagactatattgaactccatgcacaaataccagccccggttccacattgtaagagccaatgacatcttgaaactcccttatagtacatttcggacatacttgttccccgaaactgaattcatcgctgtgactgcataccagaatgataaggtaaactcaaggggctttcctttttaatggtgatattttgccttccccttaaaagctgctttaagtcaggatgagaaagttacaagagagtggagacgagagtcttgagttgtcttttgtgatttgtggagcatttggggggaaaggacaatgacacctcgaggagacagaaaaacaccttgactaggtaggaacaatgctgagcaaaaaaacgccatactaattttgccacagagaaactcctagaactgctgtcattgatgccacccactcctccccccctcttgggctttgtcctgtctgttttaaggttcatcttcttccccttggggaagaaggatcaagaagtcacattcaaaaggaaccagctaaaaatttaaggcaaaagccatttgggatcctgggaggagaatcctagtagagaccagcttttctcccctagccagaaatcctgagtagctggtctggtttttattaccttttatgctgctgtgttatgatgtgtgtgtgtgtgtgcatgtgtgtgcatgcatgcgtgtggttggaaaaacctaccctgatcacagggtcatattaatcgagttgtctgaggcttttgagttggggtggccaaagtcaccacttcatttgaattccccccctcccccaggcctgaatctggaggttagaaggatccccaaaagggaaagcacctgatatctagagctatggtggcctgaaggtcatgggcacagaaaaagtgacccttactgctgattcaccagttcccagattggctgttagcagttatggggtgggaggagggactgaagacccctgctctgcaatcctggacttcaaagagagtccattttacctgacaacacacttcattttgaactcactgtcattgtcactgtccttgggtcctctgtggacttcatgatggggatgttccagctaaatttctttagtgtgaataccaaaacatgatcttctctccctgtgaaacctgaagtcttcaatagagcaatttattccaagaacatgaatccaaccaagggtccccctttccacctctgagtaactctgtg

SEQ ID NO: 71635 - DNA, 1060 bp, Homo sapiens
ttcacctggagagcagtttgggtctgggcaaaagcctgtcaactgtatgcaaacatatttgcctgaatttatctttcagccctttcacagtgtttgggtttctctaggcaaatgctgtgctttgatactccttttctttgcggtgtgtgtcaataagcgttttgaaatgtacccatgtggtggtcaggtccagtttgctgtagtcttggaactgtctgacaaggatgaggaacaaaagtgaatctgcaaatgggcatctgagaggctggcagcatttggaggggtaggttacagggggtcacaggctggctactcaaagtgtggtcctcagcttagcagcattgaccacccaggagcttgttagaaatgtggagtcttggatcccaccaaagacctcctgaatatcactgctcttgctccagggaccccactctaagaaccactggattggacgagaggtgagaaatgggttgcatcttgaaagccaactctaatcagtgtgttagctactgggaccgctgtgttaagtagggttctgaggttgtgtgatgcttagagaaaagaagtactgcactcttttagtcttgtgtgccactggtataagacggagacttagacaaggcgttgctatccctggattttctgagtgctgtcttaggattcctttatgaaactggagagaaggagcgaggaattaggtggagctccatttcctaaggacgggggggggggggagttaagaaattagccttgccaaggacttcatgactaaaacaccaaaagcaatggtaacgaaagccaaaattgacaaatgggatctaattaaactaaagagcttctgcatagcaaaagaaactaccatcagagtgaacaggcaacctacagaatgggagaaaatttttacaatctacccatctgacaaagggctaatatccagaatctacaaagaacttaaacaaatttacaaaaaaaaaaaatcaaacaaccccatcaaaaagtgggtgaaggatatgaacagacacttctcaaaagaagatatttgtgcagccaacagacacat

SEQ ID NO: 71636 - DNA, 1075 bp, Homo sapiens
cttgtattactgcaaagcttaggaggttttctctcttaggtctaggggtcaagatcacgtttgcttgataagatgaaccaatgaacttccccgtcattttccgtgagcccaaagagtttatctttcatgacaccaactttctattgggctgagactgaataaaggactgaagtaggcactcacgaaatgtttgtcaaatactgatactgttgaaagagtagaattagttgcacctcaaaaatctgaaataatttaccagtaaattcatcagatcctgatgccttttggggaagcggtttacaaaacaggaatttttttttttttcgtttttggttgatttggggtttccatttcttttgttgattttgttaatttagatttttacaggaaaaaaatgagtttttcaaatgtattacttaatgcaatggtgcagaatacccccttaattttgaaactttttggtgatgtatgctcttttccatttctagcaatattaatgcttttattccacctcgattgatttttctagcagtttgattttttttttttagtttttgtttgatttttccaaagaaacagctcatggacttaacaattctgctgtttgtaccttggctttgtcttcttattctttttcctagtttccttgagagttatgtttcattttgcttgaattttaattgcctgcttagttaatttattttcacttttgatgatataggcattatagcctgggggcttctggatgtgttggccctcctcaaattatatgcagaattcttcatgtgcatttttttttagggagacagtctttgtatcagattctcagagatgtcaaaccctaaaagggataaaattgcttttatcgtttgagatgtcaaacgctaaaagggatgaaatctggcactagatttaagttgattacatcctacaagtcttgatgcttaatgttttcatttttatttttatactcttggttctttatttcttttttgatccgtttttgttaaggaaaattctcttaaagtctctcacgctgtaatattctcctatgctacaacataatcttgcattc

SEQ ID NO: 71637 - DNA, 3229 bp, Homo sapiens
atttttaatagagatggggtttcaccatgttggccacctggtcttgaactcctgacctcaggtgatccacccccacctcggcctcccaaagttgctgggattccaggcgtgagccactgcacctggcccctaagtgtttgggctccagtgcctactttacctgcagtccacgcaagttcctactggcctcactggcggagctcaatggccatgtgtggctgctggctactgtactggatagtccatatctagaaggaaggaggaacatgagacaaaggatgagggaaagagcctggggcaagttaaggaatgcctttgagacctccttcctgctaagatctggaatgtattagaatctgagaaccagccttccctcttgaggctcacgcccctgctctgtgtgttctctttggcaggtttgttttggagcagtacaacgctctgtcctggctcacgtgcaatccggccacccaggaccgtacttcctgccttcccgtccactttgtggtgctcactcagttgtacaatgccatcatgaatatactttaattggaaaagcacttgttctctctggctcagttccttctccctgcaacctcagtccaaggaacctgctacactctgcaaataacccacatccttttcttcagaccactctccacagtcctgcactgtgattccttctcagcaggcacatgtcaattctgcagtgttcattaccagagtgactccttgacacttctctcatggacctggaaacttccataagtggtgactttcagccagtgcggtggtgtgtgtagccccaaccactggtccccaggaagtggtggtggttgatggcttttcagcgggaaacagaagagacagtgtccttttgcacaagagtctgtgttttcagcctctgtatacaattgagggcagtctagccctttggatgaaatcctcttagttactggtgtatggcctgtgggttacctgaactccataatctgggactttttaaaaataagaaccagctcaagtacatggtttcatactggggtttctgtctccctagtgttcccatccagattagcatgagtgctttggttgacttcaaacctgtgtgtcaatgcagaaggtctggagacagcttcattttgtttatttattttaatttgttttgtcatatggtttttgtgactttatttttttaattcacaaggaccaggtacagtagctgaaacccaattcagatccaccataggattctttgactacatacctctgtcctagaagccggaaaaggagtaaaaacacattggggagatcatgcctaaaagtaatatattcaaaaccacccagcagtaggttttgttaacaacaaactggattttaaaagttctgccatgttaagtggccagcatttcatgaaggataacatttttatacagaaggcagtcaagctcaactcagagccatggaggcaagtaccttaattagttttatatagtcacaacggaaatatattttctagtgaattcttattggaagccaggtctctcctctcattagatcaaaagggacttatgtacatacaacaattgaaagtgtttgctcatgaaatcagttataaatatggtgaattttttctggaccataggaatattatttcaaagaaatattacaacttaaccattaaattagtacttgaagttgagcctttgtggtgggactttttaaaaaaatgcctttttaaagcattaatggctaattgaagtattttatgactcctcattcctggcccagagggttgtctttgaaaccctgtttctaacccttgtgttgtgtgtttctgtctgaggacagtgggtgtgtactggcctcccgggagccactgtgaccaggcctttgagctcttgtcatctgtggagagaatcatgcaaattttaaaagttcttccaagagacttccatgtcctggttattaacaaaaaaggaaaaatgtaataattgatatgattttgtaaaagtatttttcttgaaataatctaaagtttaaaacattatattaaaaaaaaagttgtgtggtgggaatgtgaaagcagagaaataacttgtaaatggataattttgttctctgtaccaccagttgaagggggggttgactttcgcaatgtataggataaaaaatctgatatatcaaaccatttgtatctaatgtgtacagtgtaaaattgactttaaaaatattgcagtgctattttttcttaatcagaaaggaaaattctcaaggccttttgaagagcataagaagatgaagattgtaaacttgtataaaattatcttggtgagaagacaaattgtaaagtagatatttgtaatcttttaccactttggggttgcttttttcccggaattcatcagaactttgaattttttttttaaatgggctgtttttaatgcaggggcttttcttccctagaaacccaattctaagcagaaaaagaaaaaaaacacaaaaaataaaaaacccctacaaaaaaactttaaaaaaaatggcagcaaagggtagttttcatctggtgtcttttatttaagttttttaagttaagaaaagctggtgacatatttatacgtttttgtgcaaaaataaatgaatggcaatagattttaaaaaatcttattatgtacttctgtgtgaaaaagtctgtataatatttcccttaaatatgcattattttacttgtgagttttttactgaattaatctgaaatgtacaagccctggatttgctacagagtgagaagttattttatttttttttatttttaattttggaaattctgcagaaatcagaactcttaccatggtttgaacaaaaaaaggggaaatggggaggggaaaagggtgggattgtccagcatgcttgtatgtatatttcagaaccttttttaaatgtaaaagctgtacatttctgggaagttctgaatttcttttgtttccttttttccttcaagcattttgcagtgagcttcttttatatatagcaaacaatttgaaagaatacaaaaatatgtgaagttcatttaaaaaaataactacagtatagcgctggtacagtacactaaaagactttgataaaaagaaacaataataaaaggcctccattttaaatgtcattcatatataccttgtggatgagagctatatacttttacacacttttttagaggaataaattattg

SEQ ID NO: 71638 - DNA, 1053 bp, Homo sapiens
agattgtaatctttccattttagtttgttacatcataatgccatgaaatagatcttacatcccttagaaaagaaacccaagcaaataaatctgtacttacttgactgaggctgtcagttttgctggtatcttctctatgtgtgcagcaaagacgatgctggccccgcttacctttctcagtcacctgttgttttctgtgagatgctgccacaaaggggatcactcactgcagtgtgcagagtgaactgatgaaagttcatttttcaagctttaagataaatgctgatcatgtttttgggatttttgtttttcagagccagggtgagcgtcttctttctagagaagcaccagaggagctaaagcagcagcccctggcccttgggtattttgtatcaactgccaaagctgagaatcttccccagtggttttggtcatcgtgtccccaggctcaaaaccagtgccctctcttcttaaaggttggtttggtgtcatattagaagtttgcaaggaatgagtgatttacgcttaaatttaattttggttagaaatttcagttttagtcaccataatcttattctgttccttttttctcttgtatctacttatactctgaggaaattttaattacagttgtaggtggagagtagaatttaggaggacccaaaaccatgtcacaaagaaatgaatcactgtagcccaaggaggaaacagtggggcccagagggtaaatctaggatggatgcatggggttcaatgtgatggtctttctccaagtctatattgcatcactatcagtaaagttaagcctgtgtcgaaggtataataaccagccatcctcttcttcccctgccagggactcttcacattcttcattagagaagagtaagagtcagctaaaaacatcgcacatttacacttgctccttcctttatatttcttggaaccttttaatcccaattttaagggttcaaaacaaaagatcccctacttgcagtttatgttaaaaacagcaatacctagaatgaaatccatctcttgcccacagattggcaa

SEQ ID NO: 71639 - DNA, 1074 bp, Homo sapiens
ggggtcctttgtagtgatgccaggtaaatttcttcttgtcattgtcattaattacatatcacatcaattcagtccactcaaacttaagtccgcagacaagggtagaattgtcttcattatatttctataagggaagattgtatttggggcttaaagatggaaaacattcgataccttccatgcggagtggtttgtgattttatcatgtttgttgaccatagctcgggggagagactaagttctgaatatcattgagatctcatagagtcatggctaatgactgttacctgaccccagtttgttgttagtatatgaagatcaccctccaaagaactatgaaagtagacaccagaatgatgcatatttgaatatccttttgaagacatgcatttggcagaatctctcagcagcctcgaagggatatttctatagtctctctgatacggttgaagatgaatgggaaggcaaacaaggataaagcagttagcacagtacctggtacacagtaagctctcaatagatgtaggtgtcatttgtggatggccaaaacgtggccacagaatttcttaagaatctggctggtttttgaaaaccagtaactgagcgattttatatttttataacctatctttaccatccagatatttcttgaatcaaatgggggaccttccccacttattccttataaaagtcaacagtattgtggtgtgagaatggggttacttgtcatcaatccagtgagagacagatgtcctcattagactataggttacctctgttgccgctaccacttgggcagttacgtaacttctttgtgcttttgtcctcatctataaatggggatcatagttcctaccttcagatgctgtgatgatcaaatgcgatgacttgaatgaagagtttagcacaaatgctggcatgtagtaagcattcattaagtgttataacatgtattgattttatggtcctatctctataggattgttaaccgtttagaacagtactttataaattgtgaacaaccagaggaggaaagaaagtagggtgtttatttttagaaatacttcttacgta

SEQ ID NO: 71640 - DNA, 1021 bp, Homo sapiens
tgtagcattatctcattgtagtttcaatttcccacttgcctaacaactaatgaagttgggccaatgcagtttctaaaatagtaatttcttttaataaggaaatactggcttgattgagtttcccagcttacatgatttaaacaatcattttgttatgtgtcctcagtactatttatgtgtctctagtactggagagagagagagagaaacgatttactaccattactccctgtgggtcccctcagtgtcgttctggattttgttgtaatcattaagttgtatggctttgtactgatattgattttggttttgatttcagcggcccagcccaatccagctttactcccctccctttatattggccccaatcaaagacaagcagacagagctgggagagacgtttggtgaggcgagccagaaatacaatgtgctcttcgtgggctattgtctgtctcacgaccagcgctggcttttggcttcctgcactgacctccatggggaattattagagacctgcgttgtaaatattgctttaccaaacaggtgagaagacttgatgtttatggtgcatgtaaattaatgctgtaccgttcctcaaatatgaatatttccagttttctatgtaaatgaagtgggtacagcatggataggttctttggaatttctagtgtttgtcttataagtgataaataactctgatttatctagggaccccttccccttccccatttctttatttgttaggtcacggaggagtaaagtatctgcacgtaaaattggactacagaagttatgggagtggtgcatagggattgtccaaatgacatctctaccctggagagttgtaatcgggcgacttgggcgtcttggccatggggagcttaaaggtgagaaatttttgaagaagtatttgcagaagacagaggaaaagggctcagctattgtcattaactgagctaagggagaaaatgtttaaatttgtaagaattaaacagattctattttatgattcttttatatg

SEQ ID NO: 71641 - DNA, 1024 bp, Homo sapiens
ttcctttcatcagtgaatgagtatgcttattttcactgcacctttgacagctttatagtgtaatgattttttaaaaaattctatatagatgaaaaacaatgcttcggatgtttgggtttcgttttaatgtcactttaactgaagctatcttgtaaaattaaaagattgaaattaaagttatcagagtacattgctgatagttttccattgttttgaagtctgtatcctaaatgattaggtaataattccaaaaaatgccatacacactgtgtaattataaaaagaaatataataaaattttggggccatggtaatacctgtaataaattgagatcttacccctaaagtgggaacatggtagtttctaagtgacagtataacttgaccaacataatcgtacatcttttgaaattgctggtgatagagaattttatgtcagcggaaggaattaggatttaattatattatgtgtggcacagatatattttaaggctgaggttacctctccccattgtggtaaggaattcatgccgtttcctttttcagcttgcttgttagtgtgttagatctcagtttctaggtttttggtttttgttttttttttgtatttgtgtctttagattgtgccttgccagtacatgctgcagacaatgaaggatgagcaagttttctacattcaatacttgaagtccatggcattttcagtgtactgccagtgcaggcgaccactgcctacacagatccacattaaatccctcacgggatttgggcctgcagccagcattgagatgaccctcaagaaccctgaggtaggtattggcaggacagaaacttagaaaatttatactaaaatgcaagctagaagaggtattttatctaacccagagattggctggttgcttagttggtcttctacattgatataagagttgctaggctggatgtgttggctcacacctgtagtcttagcactttcggaggctgaggtggaaggattgcttaagcctaggagtttgagaccaca

SEQ ID NO: 71642 - DNA, 1050 bp, Homo sapiens
gtgcatctccatgtttgcagaatacataagcatgactgtggagatagtattttgggtattgtaatcagagtattgcagcctgaaagcataatgtttttacaagtgaccattctagattctggttcagtccgacactgcagaatatcactaaagtcacctctttgcatgtattctttcagcaccttatttagccactctgcagcttgatagcagcctattgataccacctaaataccagaccccaccagcagcagcacagggacaagctacgccagggaatgctgggcccttagctccaaatggatcagcagctcccccagctggcagtgcatttaatcccacctcgaatagtagttctacaaatcctgcagcaagtagttctgcatctggttcctctgtgccaccggtctcatcgtctgcctctgctcctggtattagccagataagcactacctcttcttcaggattcagtggtagtgttggagggcagaaccccagcactgggggcatttctgcggatagaacgcaagggaacataggctgtggtggagacactgaccctgggcagagctcttctcagccctcacaggatggacaagagaggtatgttattcactaattgagatgagtggcttcagctcagaccctttctctcttcttcttctgcaccttttctcccttgacctcatgattctgtgaatcctatgaagtgctctatttctcttctcaaaagaaaggggcaatggtcgatctaaagctgcagtgttaaaaatttgagacttcttataaattattatgaattataaactttattattaaacttacttactatcaacttaattagtaacaactttgtacaacataaccacagaaaagaaaggggagttgaaaaagatacctcccattttagaggagtacattgccattttccatctgccctcgatgctctctggcttggtttgcctgtattttggtaaggtgataaatgttactcttacctttaatctgtaaacattctttagggagcctgtgtgctctagaattgagccc

SEQ ID NO: 71643 - DNA, 1620 bp, Homo sapiens
tgatcttactgaacctttataaacaaattctgacttacttaattaagagtcctcatcagtgaccatttaattagatgatttcaaaaatacttttaagaatgtcttgtgaacatggagtgacatttcagatgccagaattaagaccagtgcaccaggaatttcaaaattgtaaggttgtgggaaaaactctctagcacctttctacactacaatgtcattttaggttcggaagaatctcctgagccgttgcccatccccactctgctggtaggctatgacaaggatttcctcaccatctcgccattctccttgccgttttgggagaggctcttgttggacccatatgggggccaccgtgatgttgcctatattgtggtgtgtccagaaaatgaggccttgctcgaaggagccaaaactttcttcagggacttgagtgctgtatacgaggtgaggaagttactgtgaaaattgctttttatgacttggatcctctgattgtttatagtgatgactaaatttcaagacaaatgtcttgaaagtaaatctcagagaaaatttgcaaacaggtggatgaagaagagaattgaattggccaatttttctggaagcaaattgctttcccatctttgctttatatttgttagatttagaaaacgttcccctcccattcttaccacacgtcttaaaatcccatcagttctctcttctccatttatgtgctaaaagttgaagaatattgctcaccaggggaaagtgtggctatgtagaagatgagctttaccaaaagagcacatctactctttgtatttatttactggatggattgagggacagggtgagtaggtgagagttcctgacaacagtgtaaaaatgtgtcttttgcaaatttctgaattgaaacataagtttaatgaataatgtccctgttgtgttttaacatgacatcttaatactgaaactttgatactgattaaaaatataattcctataataatgtaaaaaccaggcagataattttacatctttagtatatgaattcctgttgctttaaaaaaaatagaatcatgtctgtctttgaagaataagtgccacatttcttatgccaaagtatatatgcactaagttctttgtatctgatacatctaatgtctttgtattcagcaaaatgaaattaatatctgtaaaatatttagtactatgataggcatgtaaacattatgaaagtggtttttaaataagattccaagctgaattgcaaaatattccaaaacaggacattcatgatctataaatgtatgagtaggcacggaatagtaaatttacgttgttgctacaaagaaatgaggagatgctaacatgatgtaatgacatcaattaagtcactgccttggatacattcatttctgaacagtgtctggtcagggcatatataatactattaaatcataattaacagaaaatttgtgtaagcagttttaaagcccagccatttccttgaatggaaccttcaacataagttacaaaatgtaaaaagcactgccagatctttttaagagggtacagacagacactcttttaaatttttcttaatgacttcactagggttgcttattcggcagt

SEQ ID NO: 71644 - DNA, 1783 bp, Homo sapiens
tctagctaatttagtgtctgcacttatggttgaagttccatttagtagttaacttttcaaattacattgaccaaacccagtaccatgttttcttataaaaatagtaaaagttccttcaagaggttaggatgaggatgcttatatgtggaataagtagaaggaaagtgctgtgttgaattattcttcataccttactttcttcttctctacacactgcactgacctttgtatcttcttttttttttttaagagaaaattaaatataccagtgtatcccagtgatagcagaaacaaatgataagaaatacacagtacatggctggggtgatcatgtgtctagttcagcatctgtgacatgctgcccttcctcacttggtgccttctctttttgtagtaacgtgcctagtgttgggagcctagcagatccagactatctgaacacaccacagatgaacacacccgtgacgttgaacagcgctgccccagccagcaatagtggggcaggagtcctaccatctccagcaacccctcgcttctctgtccccacaccacgaacccccaggaccccaagaactcccagaggtgggggcactgccagtggtcaagggtctgttaagtatgatagcaccgatcaaggatcaccagcctccaccccctctactacacggcccctcaactctgtggagcccgccaccatgcagccaattcccgaagcccacagcctctatgttaccctgattctctccgattccgtgatgaatatctttaaagacagaaactttgacagctgttgcatctgtgcctgcaacatgaacatcaaaggggcggatgtcgggctttacatccccgattcttccaatgaggaccagtaccgctgtacctgtgggtttagtgcgattatgaaccgcaaacttggctacaattcaggactcttccttgaagatgagttggatatttttgggaagaattctgatattggtcaggctgcagagaggcgcttaatgatgtgtcagtccaccttccttcctcaggtggaaggaaccaaaaaaccccaggagccacccataagccttctcctcctcctccagaatcaacacacacaaccttttgcttcactgaatttcctggactacatttcctctaacaatcgccaaactcttccctgtgtaagctggagttatgaccgggtgcaagcagataataatgattactggacggaatgctttaatgcgttggagcaggggcggcagtatgtggataaccccactggtggaaaagtggacgaagctctggtgagaagtgccactgtgcactcttggcctcacagcaatggtaggtgtcccagaacacaaatttactttgaggagtatcttggtatgatcataacttaaaagctttctttactgtatttgacaaaaaattttaatttcatgtctttcgggggaaaaaaaagaacctaaagtgagagctgtattgattttatcctaaacttatggactgggagaatgttttatattgaaatgcctttggagaagagtaattgttttctgaaattttcctcttgtaactcataagtaagcagtctatgttgggaacctgtgaccgctgagtatcagagtcgtcaggagcttacagactgataatttgcacactcttgcatgcttaaatccaccattcttccagatcaagtttccaaggaacctcttccatgaagccttctagccatttccagagtctcttctcccttctctgttttccccctttgttgtatcacttataacaa

SEQ ID NO: 71645 - DNA, 1089 bp, Homo sapiens
gggatcagctcagagacagtgacagcattaggcatgatggagagccctatggtcagtatggtttcaacacaactcacagaattcaaaatggaagtggaagatggattaggaagtcccaagcccgaggaaattaaggtagttgtcaatatattaacatttccagggcagagcagtttccaagtggattcacatacatctgctttaaaatggtattgtctgtgtgccatatatacataagttcctaagaatccttttaattagaacatgaggcacaccagcaggcatattaaatagtgtcttttgattgatttaacatttctgcattagcattttctaatgatcataggagagaaatactgaaatacgatcattttggttgctgtttttatgatagcactatgccactgtggtgtgttctacagagtttaccaatattaacactgaccccactttgttgtcacaggacttttcatatgtgcacaaagttccatcctttcaaccttttgtgggatcctccatgtttgctccactgaagatgttgccgagccattgtttgctacctctgaagatacctgatgcctgtctgtttcggccttcatgggcaattcctcctaaaattgaacaactgcccatgccccctgcagccactttcattagagatggctacaagtatgtatagggattgtgtcatttacttgccatatttgatgcaatttttatcttaactaaatgtttgttaaaaatgatgacaaggtccgggcgcggtggctcatgcctgtaatcccagcactttgggaggtggaggcgggcagatcacttgaggtcaggagtttgagaccagcctggccaacatggtgaaaccccgtctctactaaaaatacaaaaaattagctgggcttggtggcaggagtctgtaatcctagctactcgggaggctgaggcaggagaatcgcttgaacccgggaggtggaggttgcagtgagccaagatcgcgccactgccctccagcctgggcgacagagtgagactctgtctcagaaagaaaaaaaagaaagaaaaaatgatgacaagtagcatatcatttgaaac

SEQ ID NO: 71646 - DNA, 1390 bp, Homo sapiens
ggagggcttgagattatgccttttagctgcttgcttccaagtataagggaaaccagaccaattgtcagttactactggaggcaccaccctaatgtaacactgtgtccctgaaaattgacttgggagggaagaattgcttaaggtctgcaagctctcctttgatggcgcaatctgccctcacaagatccatgaaaaaaattcactgtttcttacacttgataagcttgtaaccatctcctttgtttcactatctgttggtatttctagaggttcacctggtaaacgcttctaccaagaggcatctaccaataggcatacattaggaaatatttgaatgctgccctacttatatacacgtcactctgttttaataacaccgtctgttcttaggctgtatcacctgctctgcgctcatcaaaaatgcctgcagttgggacagaagaccgacctcttgggaaggatggaagagctgctgttccttatccaccaagtaggtagagaaacttgactgagccattgtggctcactgcctgtaacttagatataatattctcatacttagtggtgctttatctttatctgaaatttcccttccttttgacagaattctaactgtgaattaaaacctatataaattggtgttctgagatggcaggcagctaatcatatacagaaaccatcttaatttgaattcctttcctttgttttccagttaagaattagctttttatagcttaaaatgtagaaaaacatgttttaggtttgtttttctaatagtcctttcctagtagaataaatgctgcacaagtgatttttcaaactgatactctattataagactgtgtaaaatgtttctgtttttataaatataattcactcaaggatattggatatttgatttcagtggtccttttcaagatgcatactaaagtttttgtgtttccttttgagatcaactagttttaccatatatgctgacaaagagatgaacctcttttttttgagtatattctttgccctaagaaaccaaattattctacaagaggaaaaaaaagggtagcttatgtggatactctgaagcagaaacataattccattgcaaatcattctttaacaccttctcattaacttcagctggtaatgagaacaaattgaggggaaaaaccaccatgtcatagggatgagtcaaaaagctttatgaacctataaatgtagtgctgatttactcaaatctagaagttgggaagtatacagagattggattttgacagctttagtggatccatagctttttaaaatatgcaaagctttctcaagcatgacatgggtgaaaatgaataatgatagccagcccgttgctgtagtttttttagttaaacatttttcttgt

SEQ ID NO: 71647 - DNA, 1065 bp, Homo sapiens
tcttttcttaatgttataatgatgtaattgtttactctcattttaggcataagcttttaaaacgttgtgcagtcgggcccaatcgacctcccacagtatctcaaccagggttcagtgcaggaccatcatcatcttcatctttaccacctcctgcttcttctaagcacaaaacagcagaaagacaggaaaaaggagacaagctgcaaaagagacccttaataccatttcaccataggccctctgtggccgaagaattatgcatggagcaagatacaccaggacagaaactagggttggcagggatagactcctccttagaggtgtctagcagtaggaaatatgataagcaaatggccgtgccttccagaaatacaagcaagcaaatgaatctgaatcctatggattcacctcattcccctatatcccctctgccaccaacactcagccctcagccacgaggtcaggaaacagagagtttggacccaccatcggtccctgtgaatccagccctttatggaaatggactagaactccagcagttgtctactctggatgacagaactgtcctcgtaggccaaagactgcctctcatggcagaggtcagcgagacagccttatattgtgggattaggccctcgaacccggagtcatcagaaaagtggtggcatagttatcgtctcccacccagtgatgatgctgagttcaggcctccagagctccagggtgagagatgtgatgccaaaatggaggtaaactcagagagcactgcattgcaaaggtaagacagctctctgcaccacccacccgtccaccggaagggcatgggctccctccccatctctacctgctaaactttcagattcaaaattgaagtaggcttttctttgtccttcttgactccggatatggaaaatgtttaatggtcaaatgctttgtcctacttataggttagcacacatgtcatttgacacatgggcatataaagaactctttatgccatttaagtacactccaaatatattaatacatttttgccctactgtttgttaattaaagaatatagct

SEQ ID NO: 71648 - DNA, 1017 bp, Homo sapiens
atggaacccaagtctaaatgtgcaattcatttgtttcatatataccttgtacatacagcctgaaggttattttatacaatattttaaaaatatttttgtgcataaaacaaagttttgactgcattttgactgtaacctgtcacatgaggtcatgtgtggagttttctccttgtggtgtcatgtaggcactcaaaaattttggattttggaacatttctgatttttggattagggatgctcaatatgtgtttatgtaggtataggtgtaggtaaaatgttccatgaggcgcttttgtattgtaataatgtacttggtaactttttctcaggagggtgattattcatagaactgtaatggtgatttagtagtaatatacaagtactatgcctcattttagaaaattatgtgcaattaactttcctggacgttttcattgccttgtaatcaggtttaacttatagttgaaagagaagatatatgaaatagtaagagtacctcagagcctcacaaaataatttaatcaagtctcattatgtggatactataatgccactgtcttttgaaaaggaggtaaaagttaaggcctgtccgataaaagaaaactcagtatacctgcaagcaaaggacctcaacatagtctttgtgagtggtgccaaagtaaactacatttttaaggagagtaagtggtaaagtaatattagcaaaatattcccaaataaggatctatatattgaggcaaattgcttctggcaagaggcttgattaatggcaactttgaaaattttaatagataagttcataccacagaaagcatttagatacaattatccgaatgcattttgcattgagaatctgttatcaaaacacttttacaccatgaaaaggagtgtattaatattcataatacgttttgaaagcacatgtaatagttgcattctaaaactcaacgtgagaagtaaaaatatctttttagaggatttagaatattgtaagagaataaaatgatctggagcact

SEQ ID NO: 71649 - DNA, 1139 bp, Homo sapiens
ttaaagaagatgccaagccacagtgagtgccagctgctagctctgaaatagtgatgtgaaaaggtagatttcttttgtgctatatttgtgctaagcagtgcctttaaaaatataactagaatcattacggtgaatagacacagaaaataattttatgttatacagtagttgtatactagcttcctttaaataaatattatagctttatcagttttttagatagaattggagtgtggggggaagaatacgaacatgggtccttcccttctctttttcctgcctcatctcattagagaagtatttaaggtagctttcatatagtaaatttaacgaggcgggaaaaaaaaatagatgaggaaatacggatagaggaaaaaataaggatggatggaaaatgcaatagtagattatggggaaataacgttctataagaaaggctgcatacctagctagcaccagtactcgttagcaggttctcctttttttttttttttttttttttttttggccttttgaccgcataggtaaagtcctgcttgctgctgttgacctgatgaagggcagcatgttggaacttccatctgttttacactcttttggcgggtcatttctcccactgtgagccaggcttgagaatctaggcagatgtcagaggtctgtccctatgtttctttcaagctggcaagaattccaccatgactgccacttgctcccccatgggtgtcagaatctgtcataatggttggatgtttttgtaaaacataaacattcctgattttaaggtgtacaatgagacacattttgtaatttgggaaggtacaccatttcagtttagcaatagggagctatggagttaggcagggagtcaatagaatatgtgcagtcttggcagtatttcagtgtcagttgatccttgattgttcacagtgatatataatgccttagtatttaatgagaaaaacagtagaaaaatttatgtggttcctcatcatcccccatgtcttataccttgcttgtccctatctttaaagtaacctccaaaacggatgaaaggttttatatttaaaaaaaaaaaaaagaattccaagcatgtcttaaagtaagcaataaaaatactttggtggttacagtttacctaa

SEQ ID NO: 71650 - DNA, 2062 bp, Homo sapiens
catgaaaatgacacaagactcatcctgttgacagtagcttgttagctgatacaacttcatattctagggatgagatgatttttgatgatgagctttggttcacttgtttaatcttgattagtggtgttctgttctattctgaggcttaaaaaagaaacagaagacttgggttctttccagatgtttctttgatgtgacttttccggggattagtgaggatgacaatatttttctacctgatgattatttgcgggtcatagttgtctaccagattctcaaatgttgtctcagctcacatgctcagagaaatattccttcagtgagataatctagccaggcttttgaatctgtctttagatgctgttgtgtgttcttaggagttaggatttccacctatagtatggcctcttttttcactcttcttcccactagtatcacagagctggtcttaaactttgaccatttgatttctctgtgttggtgtgaagtgaacacagagctaacattcacttgcgctttctttcgtgtggagttgtttgaactggcagagctcctgagtcagcaatacattcgggttatgccaagatacagacttcacttttctcagtgctgaatctacatagaaacttaattggttaatttttttgaaaacacttacttatggaacatttgaaaagtgcttaagttggctttgaaatttctgaaactaaatcctgcatttgtaatccatggggtgggcactagaataccaagttgatttattcttgtgattaagatccaggaacaaaaaagaggacctccttctcttgctgttggttaaaatagagctagcatatagtacaatggcgttattcttggtcacatgaactcttaatgctttcttgacacatttgtttagagaaaatattcttaaaacatggacatctgctttatatgcagtggtaagaatctttagactacacatgaatattacattgaattaaccctattaattaggcttctgagttgttctaggaaaaggactcagctttgtggcaaagtgccaaacatatgccagtttgaataaaatacatgcctttctattacttttccccttccccactgtttgagcatcatcaagtcatttgctttaggttgggatggagaagaatctgccagtgcgtaggggtatggattgagctgagtggctttattcctggatatctatttatacatagtcaagataaatagatacatgcatgcacacatactatgaaaagccagatgaagagtatactcttggttcccagtttaacttgcctgcttttattaagaaaaatgtgacacatgtactgattatcctaacatgttttagagcatgttttactttttgtattagatttctctgataatgcatttctttttctgttactaaacatgattaatgtaccacatagtgttaactgtgctctttcccccaaagacatcaaatgggaggcagcatgtagaagctaaattattcggagaggagtcagtgattgatttaaatataaaaggattaattggtccctgaaccagactattaaactgtactgtgatcttgactgaaagtggaagaattacaagtgcattgcatagaataaattaatacatttttcgtggctttaatccttttttttctgtattgcttattgtggttttatgtactgtactctattgtatgcataattgatgcagaagggattcagagtatcatgattaaatgggagagggggatagaaccattcctgaggtttaaggtggtacagttcttcttccaggatagctgaatgtatctccacagaatgaatatttcttggaattcttaccagtgatgaccccaggcacagaaagaagttaaatgttactgaataaaaaaattaaaagtttacgttctgtgagggctttgtttaacatgaacatcggctaacagtgggtaaatatagccctttatccttgaaagaattgaactgagacttcagctcttgagggtaaacagtgtaatggcaccatacccagataaaatttccttctttttataatt

SEQ ID NO: 71651 - DNA, 1044 bp, Homo sapiens
gtcccaaagtgctgggattacaggcatgagcctctgcgcctggccatcttttatattcctgtgagatgcctaacttgggtgaagagcctacttggctatcaagtaaatgaagacattttctttctttcttttctttttttgagagggagtctcactctgtcgcccaggctggagtgcattggtgcgatctcagctcactgcaagctctgcctcccaggttcatgccattctcctgcctcagcctcccaagtagctgggactacaggcacccaccaccatgcccgactaattttttgtatttttagtagagacggggtttcactgtgttagccagggtggtctcaatctcctgacctcgtgatccgtctgtctcgtcctcccaaagtgcagagattacaggcgtgagccaccgcacccggccttttctttcttttaaaaaacacttttagttactcgtacacagatagaagtgagaatgaaatattacactgattttgcctgctactaaaattgcactgcaagaaatttcccttacaaattgaagcaaatatctttatttaattatatttttatgttttactgctatattgttaaaatgttctcatatatgtgaagttggggttgtgctgagtaacgaaggtaacaaaagacaaagccattaaatatccaacatttcttttaaatggccatttctcctattattttgggatgtgaaattatttacatccatttggctttagattttgtatcagagcattaactttttcttttgtgatttttttttcaatgtttcaatggatgggtgtcttcatattatttatcttgacaaacatctttgtgtttttgttttttacactgactattcaaaattagctgattcagcttttgaaaataaaaaactcagcacttgtcaaacagaactccagtttcacaaatatcagaacattcttttttgtgtgtgtgagtgactataaaccagcctaccatattttgacttagacatggtatgttaaagagtagttagagaatgataagactgcattt

SEQ ID NO: 71652 - DNA, 1053 bp, Homo sapiens
aatagatcttacattgcaacgtagtacatacgtgtttttgtatctctcatttcttaaaataagtctgaaattttatttacattttcaattctattctatttaagaaatattggttgaaatctattaaattgattttatgattcctgccatttgaaaaactcttagaattgtagtcctcagatgtttttataattagtgtttacattttcttccactgtgtggtatatgaggctaagtgttcagtttgtccaccttcctaaattgtttgaatattttgggcaagataaaatgtccatgcatgttatatttttaggctcaataccaataatgttagaactgtctggtttgaatgtttgtaaatccttaacgaaaagcatttcttcagaagtgtaaattcgaggttgtgccagtgattatgtccatacttcgtctattttttcctaactgcaaatgattcatctatcatttttttcttttgccatgccaaaattttaagtgcttcatctggaaaaagggctggttataaaaggtgaaagaagtgtactcagtattaaaaaaattatgtgatacatttaagaagatccatgcttatttgttgtgggggtgttttggctaataaaaatctgtaacattgtttttatttaagtcattttaatttcaagccttttggccttgggaaatatgttcatccataatggtttatgagcagttatctccacctatgctttaataagcctgacttcaaaactgagcctcttccaaaagagacagtcactaatgcctaaaaataaaggtgatttcagttgtgtctttgttttcatctggaacagaatgccactgaaaatagtaacattctgtacatgagatcatgttaatactgtaacctgttcctgtcagcatatgtctagtagaaagggctggtctttgtatgaaaatcagagacttttgtttgctaggaaggcagaagaagctggtcattttcactctgctaaaagtgcaaatgtcttattgtagcatacttcctttgtagtcatgattatgcaggatctgata

SEQ ID NO: 71653 - DNA, 1036 bp, Homo sapiens
aaggggcagctgctagaacagtctgattccaagttgcttgcacttagtcttggcaaagaaataataaataccgtatttccccccaaaatgaaaaaggtaagatatagtggtttaatgttaagtgtgagatattaaagaagaaacaaaaaacagtggtcattcatttttttagcctctgggttagaaagtttaatggcaaacagtggaaaaactatttgtggagaccagacactgtagagccttctaggctttgaagaagattcctaatcctgtttttgttttaaatgaaccttgcttgcgcaataaagctctaagcagggtatttaaatacatatttaggaagaggaaaatggtttccatccttacacattctctgaatttatatgcagtggtctgcatacttgccctaaggggctaagctggatgctgttctgtcaagggcacccttgtggtagtcacatggtctgtgccttcctctagagctgtcaaactgaaaagttttagtatagtcaggtgtgtccaatcaatttgaatcttagggtcaaaaggatagagaacaggagtatggaatagtgaggctttctctctgcctcttgaaggtttgcctgaatattcagtgactggtgcttaatagtaaatcagaagatacaatttgctttggaggacagatacatttctttgtaacatttagccaaacttagagttatggaagaaaaagtgtcattttttcccctcctttattcattttgtctattaggtgacataaaagaaaaagtattcttttaaaacttaaaaattgggcgtattttaaatgtcaaagaaaactttgagttttttgttgttgttttgaggcagagtctcactctgtcgcccaggctagagtgcagtggcaagatcttggcttactgcaacctctgcttcctgggttcaaggaattctcctgcttcagcctcccaagtagctgggactacaagcttgcaccaccacccccggctactttttgtgtttttagtagagacggggttttgccatgctg

SEQ ID NO: 71654 - DNA, 1066 bp, Homo sapiens
tgctccccagcagaagccattttatccagccagagttgtccttcacagttctagcatagtctaaactcattttctcattgttcatattctttctctcccacccactctgtcttccctggcaattcaagttaaattccatctctcttctttgagttgctcccctgaagtaagatttctgtttcttctggcattttacctctaaatttatcaataacatgtttattctgctgttcttaatgtcgtgtgtgtgtgtgtgtgtgtgtgtgtgtgtgtgtgagtgattttaatcttctcttgaatttagaagatgagaatttagtctttctcctttccccattcctacattactcctaaattgaatctttaatataaaatcatttattttagtttccagtgtacatcataattttacctttttttctactcaggatctataattcccagcacaaaaggttggattaaactgaataggacatacttttcctttgtaaatctatttcatatgctttaggatcaaaatggtaaatgaggtttgaaaagtaatctaacataaaacaaaaattgggttatgtcattaaaatagaaatagtctcttcaccattcttatcttgatgttaaaagatgatcttttaaactattttctaattgggttgagatctttgattcttataattattggttttgtatggttatttatcagtgttattcattattgagtggtttgttcaagtttgagcaattgggctgtttgtgacccttattttactatgagtattttttaatagaaagcctacagtactgttggactttgtgccctgtcatgctggattgtgaattgcaattcttgtagtagaaatagcctcaacacattttgagatcttaaacgtgcttcatatataaagtaggaatttgcacacagaggaccctagagggaacattgttaggcaacatttcagggataattatgtactcttgaaattgagtagtattgtttctttagtgttaactgttattgagaatgtagaaaaataaacggacatcgcagtatatataattgaaaacagtt

SEQ ID NO: 71655 - DNA, 1048 bp, Homo sapiens
ccactaagaaccaaggtcgggtttctgttagttttagctgttgtggttcagtctgccctatgctacaaactgtttaaaaaggggggtggaggggtaggtggacaactgtgatgagaatgaggatgattgattcagtgccatttcctccttctggtggtaaactctttcccctcccccaggatcttcctgcatttggtaactcaggtttttgcagattttaatatcttcttcataatttatagttgttatttaaagggagtgtcatgttggagtggaaggaactactttgtactactggatggggaacctgatacgtattttaggatgtaaaacttgacgttgcataccatcctttgtcaaggagggtaccatcttttaaaaaatgtatagacataaaagatctttattatatatttggagttaacatttatataaaaccttttcctgatgcacttttagtgctctatacaaatgtttcttaacagcccttatgaacttttttttgcagaatgaggtaggatgatgagaaatgagacagaccagtaagaggaaggaaggtctgggaggtgaccaaacaaggctgaaaggcagatgataggattgtaaggggaatggaggcgattgagggatggctgcctgtttgattcgtagtgtgctgttagtaaatggggtcctttctttgaaaagtgtgatcacacttggtaaaattttctgactgtggcatctgtgtagcaacttggcagcagggggaaagcattgtagattagagttagatttcagaacatttctctttcgacaagaatattcatttctggaaagatggttaagaatacagtttcatatttttgcttttggttgactttacacttttttttctaacatttttttcctcattagtttaaggaaacaatttaaaatgttaagaaaaagattacataaattctattaagcttgaaattactcacttaagcttgccttttttgtgatgaattttatggtattgaataagatagcataaataaagtagctaatacagaacctaacatct

SEQ ID NO: 71656 - DNA, 1883 bp, Homo sapiens
cttgaacctggggggtggcggctgcagtgagccaagattgcaccactgccctccagcctaggcaacagagactctgtctcaaaaaaaaaaaacttgaaagatgggtgttagtggcttggatgaatatctctgaagttctcttaagaaatgctgtattcctaacattcttgatgatgcaagaattgaaattatgcagaagtgtgattttatttgaagtaattctgaagcgtaagatgttttagaaatacatcaatcaatttattttgcttacttttgtttacattttcttttttacgtgggcataagaatctgtgcccagtgtcccagagttctttcggaaagtataacgtaaaaattttaagtgataaaacattttgatagtttaattggtggtgtttttatttttggtgatatatctcatctggtgtattgcttcagcgacttactaatttgttactgatactataaaagtaattcttgatgtaattattttaggtgcctaatggataagaacttcgttaggattgggaaatggtttgtccgaccctacgaaaaggatgaaaagccagtcaacaaaaggtgagcctttagaatgctcttggctttttggtttctttggccttgtgggtgggtgaacagcttattgatttatttatttcctaataatgttagtagtttagatatactcaaatagatcctggatcacagtgttcttaaatactatattattaaatttatattcaatattaaagattgattagaaaggtgattgccaatatactcatgttcaagccacatattactatactatttggaattaagataatctgttttgttattttccattttccttcctcatctttgactttttttttttttttttttttttttttgaggctgtgtctcactctgtcacccaggctggagtacagtggtgccatcttggctcacctcagcctcgacttcccaggctcaggtgatcctcccaactcagcctcccaagtagctgggaccacaggtgtatgccaccacacctggctaattttttgtatttttggtagagatgggattttgctgtgttgcccaggctggtctcgaactcctgaactcaagccatctgcccaccttggcctctcaaactgctgggattataggtgcgagccattgcgcccggcctcatcattgattttttaaaagtgttgtatggaataagtttaaaaacagtgaagaaatggtgacaatttttgtggaattcattggtgccccttaaagaagatcaacacatctttgacgattgtaaaaccagaactgtgaattactttcctaaacaatcctaaacttttagccatcatatgtgtgtgtttaaatgcaatccttgatactatacagacatggaattttagatcagtcacaccagaatcggaaaacaaaaccctcagaatttaaaatttactttggctacctctgaatgtagcacacatgtagttggaatcataagttgatggtgaatattcattattgatgagcatggtattcaatttaaattttgttttattatcagtgtacttgccctaagtgtcccaggtactgggtgcagattagagcccttgaagccttacatagtagttttaagattaggtcttttcttttggttgcaaaatttcagctggaaactcctgcctcattaggaacctttgcttgcttaactttcctagtttctagcagagacttaattagtagtcttctcactcaacctgtctgccttaaatctttaatgaaatggttgtggaatcttctcattaaccaaacataatttatgaaaattttcaaatcagataaattagggaccggaagttttctttgtcaaatcaccataaacttct

SEQ ID NO: 71657 - DNA, 1538 bp, Homo sapiens
ttgatgacattgcctgacgaagaaatatgacctgcagtgggaactcaaggagctctattcacgcagtgttggactctcagagttttcatcagcctttttgccttttgcttttgtccttgagtggtcttgactgtgcactgctcttctaccctccagaccttgtttgttttttctggaatgaagtccagcatatagaatttgtgacttttacttgatagaagaacaaataaactttcagacattgtcctctttagtcacagatattttatctgcttttatttcatattatactctctgtagccttggatttttctttctgtacactgtaaatttatgatttgttactgaataaatggttgttttgaattctgaccttcaagacatgaggaaatgaatattttttaaaacagtatttactaagtgaggatgtgtgttactggaagactgttcagtgtttgacgtgactccatacctgttacgtgccgtattgcttttattctcagcattatcaattttaagatataccttcaatgtaacaatggcttttggagactaaagaagcattatcacgttaaatagactgtaatttacaaggtacatttggacttgagaaataaggaaagaattgggaaaatgtgacagcatgagagttggtatatgctaattattaaatgtcctggctctgtgatcagatatacctgggcttgtgtgcagctctgctgtttattatctggatgacattctcactgtgcctcagcttcttcatctacaaaaattgccattgtaacactcatcttttattactgctacaagagttaaataaggtactgtgcctggtaatcaaccaggtagtggtggtatagtgattctggtagcagttattgataatattattgcagaaacttggtattaaacactagagttctagtggaaatatgtttatatgtactctaataaaaatataattaagtctgttagctggtgaataaactgtggagatgctttttcagttttgcttcttgaatacttcctccttgggtgggtgtgccatatttcctattttctaaatttaatggagtcacagtccttacccctaaaaagcatttttttttaaacttataagcttaggaaaagagatttggttacgctgaaaatgattttcttcattgtgaacaatggaagatcgcagtagaaatttattttctaagtaaaaccagtggagcccagtgactttttggtacattggttctccgaattgactgcccaaaaggagttccattgtggtcatcagaaactattaccattcactaacccatctaacctgtaatgagttgggtgagggcttgaattgtttccatcctctttgatggtgtggaaattacagaggcaaaagccatgtgcagaattgcctcaatatggaataaagaattgctatataactcttttgctggtaggtaggaccctgtatagaagaattacattcagtgttctgacatcttttcttacaaaatatgtagaatttcactgaatactgttag

SEQ ID NO: 71658 - DNA, 1099 bp, Homo sapiens
atcaggctgcatttgcacttaattattcagagccatatggcatgacacagaaacattaggtacacacatacacacagcctgatttcattttcatttttcagcagctgttttctttttgaaacagtgattttggggaggtggtgggggttgggaacagaaataatttcctagtactattgcttaaagaccattttataaatctggcatcacagtgatcttgccagataatattgtactactttccagcattatatcatatttggatagtgaagtcatttagaaaatctcaataataatgactgggattactgagtagagaaccaaggttaattgatatatagtcttagcactatttatgatgatattgatttgaaacagtttttgcctgatggagtgtgtctgcttgatttatttatttgtgaagttaagtataaattttgaccctcaaagcttgatagagtgtaaaaaaggggaaattatatttctgatgtaacttttatatcttagaattatctgtcattaaaagatttgcaaattatgttctttaaaatatcattaaagcatttgggcagcagtgctggtcatactaaacattttttagtgtctatgaatctactatgattttaatcttcagtgggatacgatgggctataaagaattgaaatatgtagattttttcccctcaaacaccactgttgcattagcgagaatacatacacataagaaaattcaaataacagtacaagactacccgtgattagtgattataaacaagaaaaatgccagcattacattatgaataggaaaatactccttggtatatggcattcatttctcatatatttattgagcacctcccaatatagagcatacatttaagcatgttacatagtgggcacttaaatatttgttgaatattatcagtggataagacagacacacaccgtctgtactcccaaagaactgatagttttattggggaataaagctgtagaacttaatcattacaactcagtggtgaaagtgctgatttgtagatgttagagtagtgtgcaggcttgatcgggacagaaagaatgaatagaattcaaattagagg

SEQ ID NO: 71659 - DNA, 1373 bp, Homo sapiens
aaaaaaaggaaattaattatgacatataaagtttgggatagttctaaagaattttgggttattccttggcttcatttcagggtctgttacttggacagttaccctaatctcactaagccttagttaacatttaagtacaggacaccatgtaccttgagcttttgctagatgatagatatatatcatgtgtgccacataatgcctcacatactgttaatgtcagtaattattttcaccataaattttttattttacatactttgatttgtattctttcaaatttcattaaagtagttccagaatgctctatttgagccctcctacaggagtcaattttgaaacaaataaaacatcttttcttttagaaaataatgatcaaacaaaccatcttcatatagtttctatggatgacttcagattcttttgaaaaatggtactaatcctgttgttctttaagataataattttctcttatcaaacttaatgtaactttgttctatgaatgaaaattaccctgctcatgagataggaaagctaatttaaatgattgttgttggctccgtttattcattgtcaacagaagttggaagggctaatatatgcttgcttatctgtggtgatggatatcatgaaaattacgcacagctcacccccaccccccacgcgccccccccccctttcttttaaagctcagctattgttaatgttagagtctattttatgtgtggcccacgacagttcttccgatgagacacagggaagccaaaatgttggatacctgtacaaccatttgttgtagtctttgaaaaacctgtttacaatatgaatttattgagaatttatttactgtcttattcctggcaattttctgttatgccttttcatttctattcagataagatgtggatattgtgagtttctggcttgaaagctagaactgaggggttttttttttttgtttgtttgtttgtttgttttgagatggagtctcgctctgttgcccaggctggagtgcagtggcacgatctcggctcactgcaacctccgcctcccaggttcaagcaattctcctgcctcagcctcctaagcagctgggactacaggcacgtgccaccatgcccagctaatttttgtatttttagtagagatggggtttcaccatattggctaggctggtctcgaactcctgacctcgtgatccacccgccttggcctcccaaagagttgggattgcaggcatgagccacggcgcccggcccaactgaggatattaaaacagatcatcaaggactttatcacttggagagtgtttgtgtctctccctagccattttttccatagtttgcatgttaacaaagtttgtattgtgatct

SEQ ID NO: 71660 - DNA, 1229 bp, Homo sapiens
gtgttttcagtaggctcatatcgtcagtgtcccattattagtgatgttaacatgttctgtcaattgactgaggtaatgttctgtcaagtttctccgctataaactaataagtattttgttaactgttatctttgtcaattttgtgtttgtaattaatatgtaatttgtggccagatacaatgagattgtataattatcctatttctcatcaaattttcatttatttgttttagactatattggtagtccttgcttaaatcatttattaccattatggttgtactgttcattttcaaatgccaccattctttctactttttattagttggcatcctgttgtaaggaagagctttttcattttcttgcattttatttccttatttatttatttatttatttatttatttaatcttgctatgtaaattgggacccatggattgttattttattcaatggattatagttgatttttaccatcatttattttgatgcttaaatttttccagatttggtcagaggaagcccctttgtgatggctcgctcctatgtccttttgacatgatcccatcgttggagcatccccttactttctggcatagcaatatgttccaggctctgaatagtgttttgaggggagaagtggatgagaaagaatgggttcattaagagcttgtatgagaaaaactttttacgtctcttcctgagtctgtatgtagtactttcaggtaatcaaagctgtgaggacttaccagtttcttatccaaactattggctagggtggttaccactgtaatacaactgcttaggacacttgaactacagttgatatgttatttaagctactcagaaagacttttctgacggaagatttctctatttctcattctcaactttagctcctctgagtgttcctccaaatctgtcttttggagtagacctagaaatcatctgttactaaggtgtactatgcatgtggaaccattgatttaagagttgagtactcttaagtattctaaatatttggtaattctgtctcccactgtaaaacgaaacaaagtacacagaaactctatccaagaaaatgtggaaaacttactgttgccataatcctgtaccagaataaagctcttggtatctctgcaataattaacacacgtttaagcacaattctttttatacaaagttacaaggtatgtgaacaaagtatattttaaaattgtagctcactg

SEQ ID NO: 71661 - DNA, 1932 bp, Homo sapiens
aggttaaaaatggtaatcattttaaaaaatatttggaagaagtagcaaatggggacaaatttggttttgagaagtcaataacagccattgtgcaagatttctttttcagtgtgcagctattaaagtaacattgcagcctgttttctgtagcagttgtcttttgaaggccttgtacagtttatctcgaaatttagttttatggtttccttcaatttaaagtttgctggctttacagggagtcttgtgatccattgaaatgctaacttgggtcgtgtctcaactgctacaatgctgtgtagaaactgtcattaaaattctggttatcctgcaactggcagagaacccatgctgattccttaggaagatagtacactgttaaaattttgaatcgcaattgtgcttctgtctgccaaatattatcaatatttgtaatcacttaaggttgcaaatagtttgaaataaatggaacgttttagtatgtatcttctatccatgattcttatttgtttgatgaattgacatcgggaaggttacaatccatttccaacatagatttgttaagtgatactgaatattttacactcatgagcaattcaagaaatcagagctctaaataggttgaagttgatataagtaataagtccatttagttattaatgacttcaaatatagattctaccaggcaactgatggcagcataaattgatcagtcagtggtggtgtagtgttgtaagtcattggatttttttatgtgtgaagtgctatatttcataattaatgtagcattgtgctcctttgttactgagtttctttggtaagtcagtttttaagaaagcagatacttcaaaatcgtttatttatcttggtatccttcatttgctgcagttagattaagtggatacatgtttccttgttgtaatatctgattagtgtagtttttggaagtagatttaataattcagaagatttttttttttaaacactacgatgcgttttatatgtttgaggtagaaattgaaaacaaaggcagtgggcaaatgataaaccttggattcagagctatgctatctttagccgttagttactgaaatctaactgggaaacaatgtacttgtttcctgtgccttcctttacttgtgtttctggagtttcgagtgaaatttgattttcaacaattttaacggctgaataagaagtgccatccctgaaagtgcccttcccccacctccaatatttgcagtggccaatgccgttgctgaactcaatgttctggataataggtttcattagttttgatgcctgaggtaaaaaagcagtaggtgggagtaagaagtgtttttgatgtctagacgttcatttcagctgttgctgcaatatgatacattaaaaggaaatatgtatcatagctcagaggaaatatgtattctttgaaagtaattctacttttaaactgtgtaaggctgggtgacctgaattctaaaagcatgagcttgaatttcttcaaggtttcacaatctttatgctcctccctaccctattccattctccctcctcccatttttttttccccttcaagtaaagtatgtcagtttcatttatggaattggaagggatatctttccaagatctctgctggaaaacacaaaatcattgaagtatatgctgctttgatattttgccatattgactttttttctccctgaaccttttctatgttttttctttcaaataagcttattaattctgtaaggagtcatgtttggtgaagttgaaagaagttatattgcaattgatggggatttgaaaaattatttgggcactaagcagtaattactactatttaaaacttttcctttataaacactgtcttttctgttaaaaaacatttatatactacttttgcagtttaaatatttgattatgaggataact

SEQ ID NO: 71662 - DNA, 1052 bp, Homo sapiens
gagctatctttggaaaatattgtttgtcagatggggcgaactgtgggctcaggggcctgcctgcctatatctaggggcctcacatgagttaccatggtcctagagcccgttaagaccagcttctgagcagaaccaagagttacagtaccagcctggtctaccgtcatgctgaattgagctcttcttcaggcacaggctgtttccagattgttagcacttcctgttgctcctcttaacattaagagtcctacaggtagaagaaaactcaatattggacttttaggcaatgttgactcacagggaaagtgttgcaagagaaagtactgtgttttgtgagtacagtttggaaattttaaactcaagtctgctcacatagtaaaaagaaaacaaactctggtgagattggttctcatttttttgaacagtgctattggcttttactagttggagataattgtgcccattcactcattttccttctatcgaatggtcaaagattcttctctttatgcctggtgttatcagtagtaaatcaaacttatagttttcaaatattattagttttattttttcctaacaagggaattgcaactgtgcagcaagtgataccgtttcattccctgcagttagtctgtttttcctctttcttcctttcctccccttcgccttcctttttgtttttttttgagacagagtctcgctttgtcacccaggctggagtgcagtgtcggctcactgcagcctctgcctccctgtttcaagtgattctcctgcctcagtctcctgaataactgggattacaggcacacaccaccacacccggctaatttttgtatttttagtagagacagggtttcgccatgttggccagtctggtctcgaactcctgaccccaaagatccacccacctcggcctcccaaagtgttgggattacagatgtgagcccctgcacccgacctgtttcttccctttcttttcaccttgtagctcagaattagcatatagtgaaattgcaagggaaaaaaaaaagcaagtagaaaagagaagaaaa

SEQ ID NO: 71663 - DNA, 1846 bp, Homo sapiens
atcaaggatcacaaaactgatcagctagcctttgtgtatctgattgacttatactaaagtttcttcctgctttagggacatgtacttgctcctctccctatttgaatagctattccttcatctcacgagcctggttccttgatagcattaggtcttagaacaaatactacttccttatattatagtgtgatcttaccacttgctccagttatcctttgctgtgtaacaaaccaccccaaatttggtggcataaaatggcaaccatttcattatgttcacaggttctttaggtcaagaatttggaaagggcataatagatatggtttgtttcagcactgtgatgtctcgaccttcagctggcaaagctagtataattgaatggctgggtgccaagatcatctggaggcctttttattcacatttgtgactcatgtgagggcatggatgagctaggattgttgactggagtccctacaagtagcctttccatgtaacttaggcttcctttcagcatagtggcctcagaggagttagatttattactcaggactttcagagcgagtgttccagtgaatgagatggaagcttgcatggcttttctaacctacccatagagattatgtgttgtcacttgcttttttgtttgtttgtttgtttgagacggggtctcgctctgttgcctaggctggagtacagtggcacaatctcagctcactgcaacctctgcctcccaggctcaagtgattctcctgtctcagcctccctagtagctggggctacaagcacatgccaccacacccggataattttttgtatttttagtagcggcagggtttcacagtgttagccaggatggtctccatctcctgacctcgtgatccgcctgcctcagtctcccaaagtgctggggttacaggtgtgagccactgcgcccggccacatggtgttgctttcatcctactccttccttgaagcaaccataaatcctattttttaagggaaagaaatacaggccttacctctcagtgggaggagtgtcagacacttggggtcttgttttaaaactggcgtatcatcgtaaatagcataacatggttaacatgggttaaaagacatgttgtcttttaggtaaataaggtaaaagacttaattgcatttaacttgcatttaacaggggtttgaataattttatataagtaaaattattactctctgcctctctcaactaaaatgaaagttttatgaaaaatctgttcactgctgaattttcagcccctataatagtgcctaagatatcatatccattcacttgctgaatgaatagatacatgaattaaaattcagccacatagccagtttgcttcaccgctgagaccgtcctagtaccctgttatatcaccagggttctcataaaaattttcttattaatatgtaatataaattgtaaattcagcatttcatttcactgaatctgtatctttttgttcataatgtgctttctaaaatgaaatcgggtgcctttgaaatttagttcgtctctcagtatactgcttctaccttaatgatttatcatccaacactaatcatccagattatgttactgcaaaactagtgtgaagtacaataattttgtttttgtgaatgagttatgaatctactctgcctgggacagtggttgcactggatgtatatcatctaatatcaaaactcagtagcaaaaaacagtttattttattatgcctatggactctgtgggtcagaacttaagacagggcacaatagggaccagtagtttttgctccaggatgtctgagggctccactggaagggctccaagactgcagtc

SEQ ID NO: 71664 - DNA, 1017 bp, Homo sapiens
tgcatatcagattcagtgcccagatgacttaccttttgggaaaacaaaacccactcacttttatggaacatattctctgccagagacactattttaagcacctttacgtgttatctcagttaatctttaaaaatgtttgcataaagtagttggagtttcagaaaatgtactctgaattcatagtaaaaactacagtaggtcagctattagttgtattagccacattgattaaccacaaacatgcagaacttatattgagcatgctttgagccaagattttatgttttggggtaagctttttctttagggaatttttttgtgaggaaatagatttgggacaaagattctcagaccaaactcagttttggaatcacccagaatttcagaaatgggatctcagttcactatcagggtcgaactgttgggagctgggccctttgggacagtgaaggacaagagatgggggaaatttgaggagtagttgggcaccacccttacttctcatccaaaattaggatgtggactttatcggtgatggctgagtttcatttagtaatgaggaaaggtttttgtgaaacattcttttaaatggaatcacatgagttaatggtgtgagtatttcagggctgtgagttaagctgttggggcagtgaaatagcaggaatttctcagctcagtcagaatcctttcttgtgtgctgtgtatggaacacaggggcaaaggaaaggccaagcaaagagaaactgcctgtgtgcctgttctgtggctctgggtaatcacctggcttctattaagttctgtagtattggtgaaataattggggatttaaaggaggtgaaccagtgtgtggtctcttttagccaatccataacctttaaggtacaagttgctgtgattttcttcttggaaatagtttttgtatattcatttttcatggtttaggatctgtaactttaatatcctgtctatgaatatgaacaacctagtgaggtccatccttctctagagatataagta

SEQ ID NO: 71665 - DNA, 2912 bp, Homo sapiens
tggcaagccgcaagggagtaggaaatcccccaaggatgatatgaaatgtaccagactgtggcttgcattctttgcatggtagacacattcttgaagttgaagaaactttagctgcagacaaaacttgacgctttaatcacgtatgtccaagcaaagcaaaaaaccacaaacaatatcttattacctcttgttagcaggatatgaaccattggctgctgttaaagtttatttagaaatggaaacagtaatataattatggtataataaaattatgctgaaaataatttcagactttacaaaaactactttttattcctctttgatttggcaggcatttactgagtatttactttttcacagccttttgggggctttatacggagatcctatccacaaggagtttataatccagcaggggagagagaacctgtatgaaacaaatatatttccatgtaggatagagcctgcaaatactaaaagacaggatcagtgaaaatgcttaggagattatgaagggagagggaacacttttcattgaatgtatagtggaaaaggaagaggttgtatttgaggggtccagataagtaggatttggcattcagaaatttgtatttgagaatcttggacaaaccagagaaaacatacagaaatataaaggtgagaaaggatagggagtagaagttgagtgtcgatgtctctgaatgtccttagatttaggaaatgtatttctaaaagacctactttaccttttgcccctctgtctttgttctttcacttggtgactttcacccttaggaaggttaaaaataaggcactcattagtctgtatggttcccatagccgctatagacagatggcatcattttatttttgcacattatggctaattttgattttccaaaacttgctgtagatttattcctgcctttaggtccattgtaatgtgacttcttattgctcagtttcaaccactgtgtaggatccttcccatctgcatttttctaaaggccaaatgtaatatagtttgtactgtgctttattctaaaatcactgtaacaaaggagttttattgtatgcgtttattgttaaatctctgtcctaacaccttgctaatggagtttcttcgtgataccttttaaaataattttctttttcattgaggaggcaatttgaaggtaggatgtgaagaaacattttcacttaaagcatttaacagttctgacatttctatagtaacttaagatgtctttgatctcaaccaattatatatgaaaattgacgtccttatgaagacctcttatacacatttattttcaataacagaaattcataactaaatatctcccctccccacccccaagagattttgcttgctaaaagcctagttaagatgaaatttatgggactagtttattctctgtagttttctcatttcccccctcttaatcttctggtcctctgaagttttcccattttttaacaataagatgttgtgatagacctctggggagtaggttggagtcagagacaaagttgaacagtagtaggggcatccacacgagtccctactgtgggcctagtgtagtgctaggtgctttacgtaccatagctctagttctcagaacatctggtagcgatatattataggttgcatttacaaaagaagaaacttagattgagaaaattaaacgacctacctaaggccacacacccctgaagtaccatatgtgggtttcaaatctagactaaactactttcaaagcttgtatctttccgtaattctaggttgtccataaataaaaataagttttcactattttctggcttagagctgtacaaacagataataataagaatgaggaaatgccagatgtgagaatggtgtgcctcagttctgtgggaggtcagagaaacataggttatcctaagtgtcagaggagcttgtataggaacacttagcgaagttgagtggcagaggtgcagtggaggagtagtggaacacgagagcagaatggaagctcagacccggttgtaggaggtttagaatgccagcctggagcactgagtctttcccacctcattgattatagaagtttagtttactaaattatgacaagatctagatgtaacaagaagagtagaaatgacttattttttgccttcttggatttgctttccaagactttgttgtaataaaatttgagtacgttgataagctggcactgctgtaagggaaggtaggctctggccttaggcggacacaagagaactagacacttggtggtttgttacatgttgtgtgaagttaatgtccagtgacacagcctgcatggtcagccagaaaagagatttggcttagggccatgctggtatcacagcgatctcagcgtcagctctgattccaattaggtctttacagagattcttgcatttagagccattcttttgacaactaaatctgtccatgtgtgcatttattaaatgtgtatacttgggtctaattttgtatttgatccacttccagagaaatgaatttattcattcattaaaaatggatacattaaaaaaatgtaactatcagagggcaaagtgaaagaaatatcacacctttctttttctgtcttccatttcttcctcagccctttaaaaatatgttattttatcattcatttattaaacattttttattgccagctaagctgcaggcactataggggcatatgaaaggaacttaatgtccacttactcatctctagccaaaccattctcaatgcctaactcttattttctgtgtttttattcatgttgtttcttctgcttaggtcatctgtatcagcgtctttccttaatctccctgtttacttattctaaatgttacccaccctttaaggtctgatttaatattattggga

SEQ ID NO: 71666 - DNA, 1022 bp, Homo sapiens
gggttaaaatcctctctttctcctgggtacttgctgtttgactttgttttggcaaaccaccacatttcattttcttcatttgcaaagtggggaattaagagtcacaatgcttcattgagtgtgaggattacatgagttaacacatggaaatcagttagcacagcatttcactcatagaaaattcagtaagtataaactgttgttaatgttaccactatttctgctattgctacaagagcagtgctccgggcagctgtgatttttgttgttgttatacctactattgagtagttttcctttcaccgacattgatttgtgtatacgcattaaggccatttctgtttttaatgaaggagttatctgaatgttgtcagtttggggatgagaagaacttgtgaggccatggtgtcaataagccttccgtgtgcttatgggaaaatacattctcagcacaaagggagcattaaaccagatatactatttgcatattaaagttagaaagatttttctgtttggtttcaaaatttcctgcagtaagggggaatgggttaaaatagaagcaagtgtgtatatatttgtgtctagtctgtgtctttcaaaaggaatcatttacttcctgtgaggagttgccataggaatactgctattatttcttccaggagagtgaatttaacttgcttttggcctttaagggggcacaacacttaactttaattctttattgtatgtggttaaaactgatttttgttgttaatgacatatatctggttattgctattacagaaattgattgcttcctgctcccttctctgcaattatttgtggtggtgggatagagacttgtggtagctatcagaatgtgctctctgcctgctctaactaatggaggtggcactctggcttccttcttttgttccacattttggcttttagctgccaccataagctcttggcaaatagactgagaaaggtgagcaatcttttcttccagttaaacactcccctcccctcagtaagttctg

SEQ ID NO: 71667 - DNA, 1196 bp, Homo sapiens
tcagataaaatatatttgcattttgagaactctgagcttaaatattcttacaaaataaggtacataaaacctcttctgaacttaaacattttcttttaaaacttcgcttagtagtttatacctttgatgcattgatacttgtggtaaggaggaggttggtacttggaaacttggcctgcaatgtgcaacatcttttccttaacttgccactgatgctagactttgaaatgaacacccctgcctccccatcagatgtattgaacttcattttggactataaaagtttttttttttttttttttttaagtaattggagactttacatttacactgtgctgcctacaatccagtattccttcatttgttaatttggagttaaaaatggaatcctaatggatgtactcatatcttatgtataatatatgcttcagtggaaagttgtaagttataacttgctggagacattcatcatatggttggaaagatatttatactactgcaaaaataaaaaaaactgatgaacttgaaccttaacatattgctaataattattataagcttaaagaatttcatgtttttgtagaaataaaaatgatagttatttacgataatagcatgaagtaaaatgagaggtttaagaaaaaccattctagagtgaattgtctatagaaacgtgaaagtaattgcacagaaatttttcccttattgagttgagtaagaaaaatagagtataaatttatatacacaataatggaaatgatattttctaccctccaccttactatttctaatatgaaaatacatactggtcctataattatgtatctgattattttattaaaatggaagagtgaataagtgcttgggacctagaatcaatatatttagttttttgtgttttgaagaacagacacaatttttatgaataacaacagcaaagaatagttaatatattaacagtttcaaggtttttttttccccttaaatcttgtttatagaaaagtgtgaaccatacattctttgttgaagactgtgtggcaaaatgtaacttcagcggtgaaatgaactctagcactgcccacagcgctaataggcttggatcaaaaggtattattttggtgttgtaaacgttttcatgagaaaacgtgaaatacctattgtgtggccgaactgtggtatgtttgctctgtcaagac

SEQ ID NO: 71668 - DNA, 1573 bp, Homo sapiens
ggctacagggagctctgatcatgccactgcactcaagcctggtgacagggtgagacactttttttttttttttaaattaaagtttggatccagtccagcctcttcctacagatcagagccaaggcccaaaggagctgagtgtcttgtccagttttgtatgacttgtccagtttccatagtagaggcagatccaggtttcctgctacatcatgctgcttctcaggtgactattgcagggctctccagagagttggccactatcatgatgcatcgtgactcacctaaatggttttgtttggactaagtttgtttattcagtagtgttgaaatgtatgttgcaaacaacaacaacaacaaaaatagcagttaaaagaccttattgctcaagaattagttactatttttaaactatcagttaattgaacgttatttgggactttaaattcctttgtgaaaaaatttaaatatctgtctgttttattataatggaatttaacctgacgatatgttgatagtttgaattgtagcagaattataggaaaactcagctgtaaacatggtataaattatttttttagtttatattattttgttctgtgcaagtagtgaagtaatcttcatggagaagaaatcacagggtctgcgtaacagattccatatggccagaagcatgtagtgagtccttaaatgggacaaagagatgaaattttaatgaaatgtacagtaatcattgggaccacattagttagctctttattattttgtgctgctgctttgaaatagcaggatgtggcacatttataatccctttctcttgagaatcagttactgtaaagttgaagatttaatttaaaaagcaagagaagctgttatggaattaaatatgtagatgtggctgatatgatctgtaaataactttattcacaaacacagtaccacctttttaattccatacatttaaatatatcctttcatatcttttaaatattaaatcattttgacaaacagcttacaaaacaaggtatcagtagtgatacttgagtgcttttttcttaaaatctctaaaattcaattaaaatgtaagttgaaagtatataggaatgtgaactgtaagttagagtgataaaaagtgaattatagaagatttttcttttaattacctgctcacctttctaagtctaattatatataaaagtaatgagaggaaattgtattctggtattatttagactttagtagataaaaaatagtgttcaaatccatctgcttctttttctgtccacttggttaaaatgtattctggcattctctgggcagacagccagttctaaaataaccacttctattgaaacagtttttgtgatgtctacataaactctgagattgcgacctccatttgttggacataataatctcagaggctttactttgatcctgtagtattcagtggcacaaaatagagaattcatttatttattttaagaggcttctaaataaatagaatactgtcgatctttaactcttaatgttgcctttgttttaaaacttagaaaaactcagaaaatcctttcct

SEQ ID NO: 71669 - DNA, 3229 bp, Homo sapiens
ggggtggttatattttttcattgattagaatactcattactttctaatacctctttttcatggtgtcttggtacctgagaagctaagctaggagtcagaaagttgctaggtgaacacaggatcagaggaatcagctctatctccggaagcttttactcaggttataagaaggcctgttagtgtattcacagtagtgaatttctgtgatacctctctctattatctagtgttgtgtttgacagttaatagcttctcgtcaccttgtacctcttgtaccttttttttttttttgccagaaaaatgtttattaagcacaagacactattcgtggagttaaataaaaggcatgttacttctatttaatgctcttctctgtttgttctcattattaatttaattctttgtaacatatagggtttataaataaaaatttcttttttttgaactttgaaaggtatattcatgtgactctttgtttcatacttctggtagtctatagtacacaagattagattggttcagtaggtgatggtgataggattgacacatgtggcttagctatctatgaaaataaagtgtttaggaaaattgcatgtggcgaatcactataaagtgttaaaatgatttttattttttttaaagctagcattttatcttcaatatttcaaatgtgaaaagtgctgtctagaaaatgtcattcctttgaataaacatcattaaataaacttgtttgttgattcatatagatttgtattaaatatagtccatcaattctaggcacaaaaggccatgttatagctattagcatgatcaatacatgtcaaaaggaaatgttagcaattaagcaataatgaaaaagtcaagaaaataaaaatctaggtgaagaaagactacactggaatatctgcatggcagtagcagtctttcttagggtagctaaacttaaatggctaccattggagaattatagttaggtctctccacagcactcatgtcctaatggagtatagtacacagaatatgatgaattgatttttttttgacacctcaaagtgatctccacataaaataaatacttgtaagtgatggcccttactgaacgaacaagatatttttaaagtataaatattgtggggaaacgttaaacctccaaatctgtaagtcaacatagctctaaagaggaaaaattaatgttacacagtatctactggcctgtcaattgttacatttttaaaaatagagcattgtatacttaatagactggcatcaaatcttttgtaccctgtattttttgatcaaacagttgtttaaactgcttgtattcgagggatgcttttcatttgtaaacataatattaatcttgccaacaattccataccctagtatctttttattgtaacaataaaatatattcttctctataaaacatttatgctctttgaagagtttcttttctgcctgaggtttctttttaatcaatttgtctatctctttatctttacaaactcatctttaatcttttgtttctttaaaacagtctggtttttaaagattttagttttgaacatcgaattttgtgatataaatttatggggtcatgtatgaagaattttgtcttcatacttgaagtcaaaggatgaaaaatttgatccctaaagagttcttttcacaatttttaaatttcaataaaataaagaatggtaggactgtgattgaaaaatgtgatactaaatttttctattgaatgatgcatatttatttttaaaatccttctctgtacttattcattcaacaaatatttattaagtgctcagtttgtgccagccactatagtaagcactgtggagtaaaaacaaacttggtctgtgcaatctttggatttaggttattggcagggtaggaggcaggtattaataaaataacacaaaactgcagtgaagacaagtatgattatgagcagtatggtgctgtatagataatatggtgatttgacttaataagaggccagaaaaatggtttgtttatttatttatttattaatgacagagtcttgctctgttgcccaggctggaatgcagcattgcaatcttggctcactgcagcctcagcgtcccgggctcaagtgattctcatgccttagcctcccgagtagttgggactacacgggccagcgcctggctaatttttgtatttttagtagagatggctgtattaggcaggattctcttagagggacagaacttctgcctgctttatacttgctggaagctgatgagattgtgcccaccagattaagggtggatctgctttccccagcccactgactcaaatgttaatctcttttggcaacacccacacagacacacccaggattaatactttgtgtccctctatccaatcaagttgacactcagtattagccatcacagtgaggttttaccatgttgcccaggctgttcttcacctcctggcctcaagtgattctcctgcctcagcttcccaaggtgctggaattacaggcatgagccactgcgcctgaccagaaaagtggtttacctgataaagtggcatttgaactgagatctgaaagtagaatatacttgaagtagatgaagagaggaatgacaatattttatagcagaaaggacagcagcccttggtggcaggaggcatgttgtattccaggaacgaaagaccaatgcagctgtagtggagagaatacctgagagcatgtgatcagatgaggcccacctgagggcagatagggctagactaggcatagtgtagccacaaaagggctttcagtcagtgataaggatttgggtctttatcttaaaaagacaaggagaatccatgttacatattttaagcaggaattgaaggtggggtcttgaggaaggtgagtggttgggcaacgagacaggaatggtgaaactctgttagtctacaatgtgcaaggtggcagaagtgcatgccaaaagtggacataggcaggccaggtgcggtggctcacgcctgtactcctagcactttgggaggctgaggcgggggggatcacgaggtaaggagatagagaccattcggctaacacagtgaaaccccatctctactaaaaatacaaaaagttagctgggcttggtggcgggcgcctatagtcctagctgcttgggaggctgaggtaggagaatggcgtgaactcgggaggcagaggttgcagtgagctaagatc

SEQ ID NO: 71670 - DNA, 2655 bp, Homo sapiens
taacggtgtaactatataatctctaatacattctttatattcagagtgtgcttaaaaagatgttagattaatttctcatgtcaaactgtcttgcagactctaagcagtcacaatattttagaagcgaatgaatattcagttcaattcagcaaaaatattttgtaattcccaatatttgctggatactgcttaagttgattaagacactgtcctttgtcaagaggctagtgggaggaaaataaagacagacctaattctttactgtgaggtgaagacaaggcaagtgggttgtaagaacagtgcagaagtatcacaggattagagtgttcattttgctactaacaaagatatattcatgttcttctgtttgtatgttggatacttttaacatgaatagggaaattgctgtttttcattttaaatgattatgcatagcttttcatagttatgcagttgaactaagctccaaaattgactttaattttcagaattgtctggtacatagctttgcagttcaattcaaagaagagtttgctccgcaagtccttaggactctggctcctccaaattatgaaaaaattggaattatttgccaaagagtacaaacagatttctgcaaattttcaatataaaaaatacttttaccagtctttggttgagtatcagagagtactctcatagctaaccatcatatacataatacatatctatggaactgatgctgaaaattctgtgacttctattaacaattgtatctgggaggctaggcgtggtgtaatctcagcactctttgggaggctgagacagtcaaattgagcccatgggttcgagagcagcctgggcaacatggtgaaacccagtctctaccaaaacaaacaaacaaacaaacaaacaagcaaacaaaaaagcggggtattgggatgtgcacctatagtcccagctacctgagaggctgacaggggagcatcacctgagcccgggagattgaggctgcagtgagccgtgattgtgccactgtacactccaacctgggcaacagagtgagattctgtcttttaaaaaaaaattgtttcttgggaattccaaagaaggaattgatattacagatttaagattgttgttactaaatacttttccttacactgacttttttctgagtatgacagtgaactcttttaatgtgttacctttttcctcataggtcagatttacctttttgtatgtttttaataacagctattcaggtagataatcattaatgaaagaggcctatcttaaaaacagttaagaatagtatgattaggtaccaagtaaataatatcaatgtaaagtgtaattttaaagttatataaatagcattattatttgagaaactttcatgtgaaatgactgagatttaaggcaaagtgatgtttcttggtttacttagggacagagaaaagtatttcattggggagacacagatgagtaatggtcaagatggacataaattatgtgaaatttgtttttacctaagaatatttctgagacagagactcaatgcctagctttggaaagattttgaattgctgtgatggtcttgaggattgcttctttacaagtggtattctgatttcttttgtataaagtttagacacagacaaaactaacttacgataatagaagtcaggatcatgtatacgcttactgtggagtagtgcctggggaggggtcatgagggaggtgacttagcgttctaggaagttgattttgtttcaagatttcggtgttggtgagtgggggaggggggtactcattacacaggtgtgttcactttgtgaaaattaattgaactgtacccttaacatacctgtacttttttgtatgtgtgtttttggatacttagataaaaatttacccaattaacaaaaatgcaatagaagctaatttaaccaagttattgcagtatttaagaatttgaggatgagggagtgtatatggaatggctatcttatactccaggcacataaacaaattcaagaaatttacctttttttttttttttttttttggctgagttctcgattctgcatatgtaccacaggtcagagccattgagttaactggttgcctccccttcctcccccttgctttttctcaattccttcatgtctttgtttcatctgttttctattttcctggcccactggcttctttctcttgatccataccattttggtccttcagctgaatttttttctttgcctttgctccttaaggctctatcatgtttccatttggttttcaaaattctccagagataacttttgttgttgcctctgcttatcctcaacccttggcaatctcacttttttccttgctaacctactgagactacagtcaaaggccctgtccaaggccagttcttagccttcatcaaattcagcttacattcttcatatcctcttgttgttcaccctttttctttgctactcttctgtttctctgccttttactgttcttttttgatgatgatgatgatgatgatgatgggagcttatatttattgagccttagtgtaagtcagacactgttatatgtactttacatgtgagccttagtttctataatgttttacatgtgggttacatgaagacaaaatgacttaattcaaca

SEQ ID NO: 71671 - DNA, 4258 bp, Homo sapiens
tctccagaaaatgatgctgagtggaaagtaaaatctcaaaggttatatagtgtatgattccatttatgtaacgttcttgaaatgacaaagatacagcaaaattagtagttgtcggggtttaggaggggtggaagtgggaggaaagttggtgaaactataaaaggggaacatgaggcatccttgtgatggaaatagtctgtatcttgaccatatcagtgtcaatatgctggttgtgatgttgtactacggttttggaagagttagcattgggaaaactgggttaagggtacactgaatcttttggtattatttctgacagttgcatgtgaatctctgactatctcacacaaactaaaacttaattgaaaattaatgtaagtgaattacttttccccttactagctagggactcatttgccgttttacctagcttgttggcatttgtatatattgctgggtatataaaatttgaactgagatcactctgtttctgtgactgttttcattctttgtaagttgttgaaaattgaggatcttcaatgtatcctttaattttggtgtagatttctttccctgtacttttttacatgaatacttatgctcaaactattcaaaaacatggttttagaaatgtaaaattggttttgttagccataatatagttaacttattcctttatgtttataatttcttttcaggattaataatagcagctgtgacatgacagtgatttttttttttaataatttgttaattatgttatgtaaaatgtaatactggtgaggagccagtaatgttgcacagattatcgtagtcctgaaaaaccacaaataaatccaatgaatgagtgagaaaagtgacactgttgttggcactctgaaattctgcagggacttacattgtggctaaaatcaaccctaccttcttgctgtgttcaagaggcttttcactgatttctgttgacaggaaaagcctttttttttttttttaacttataaaagaaaaagaaaaaaagcagtaccctccaggccctgtgtattattaagatcttttagtagcgagttgctctttctctgggaaatcggctgttaaagtcagagggagctcttaatagtttgcatggtatttgattaaatggaacagttggatcagtacagattccagatttaatagagcagatactcacttctatacatcccctatgattagcatagttatatcttctatattatagaaatataattttaggatatactcttgtacattataaaataagcatgttagagaaaacctgataaattgaacttttgcagagaaagacttaaaagcatatgactaaaatataacttctacataaaacaatatgtgtccagcattgtgggatagtttatagttctgaggtgatctattaaaccatgatactggaagaaatgacaatgatagacactgacataggagcattatttgtgtgtcaggctttgtttaaagcactttttatgtatgaactcattttatcattactgtgaggtagggactatactatgatttcctgctgattgacaggaaactgaagcatggagaggtcaagtagtctctcaaaccaaagaacacgtaagtgagagaggaggggctctggctccatagtccttggtcttaaccactattttgtattgacttccatagagaaaatagcccacattatagctatgataaaatgcaaaatttcactttataggtaatagcctggaatcggtgagctggagtcattaaggcagttcggcaaaaacaaaaaacatgggggcaagtgtgggtaggaaagtgctagctgcctgagtacaaagcattgggtattaataaacatgctgtgtgcggcatagcaggaagcagctgtttggagttgaaggtttgtttgggagagcagtagaaaagatgggtttgattagttatagaaagaattttgaatggaaaagtgtggacttgggaacacattttctaggttgctgttgagaggaacaacagtggtacattaaatatggacttttagaactagaggaaattataaaagttattattggatctgtgctcttcagtgtttctgtgtctaccctgttttgtgttttaggttttgaccttttgctccagcttgtccagggacagagtggtgtagtgaaacaaaagcagtaaaccaagtatcacaaagcttggactttagtaccagcttttgcactttcctcactgtaaagatgttgtatgggttacttaaccagttggggtttaatttccttggctgtatagtggacttagtgtcacatgcctacctcaggatttctgtgacaattaaatatgatattttaaggcttctaacttactggatctaaataaattattcctggaaaaaaaaagtttgctgtgtaataaagcacctaaacaggaatgaaaaagcaggtatagaacttcaggtgttttgtcaccctccctcccccagtggtgtgtgtaggaaaactttgcttctttctgtaaatctgatgtctaatctcttctgactttacgttcaatcagttgattattttcattcagcagatgtgatcggtttgcagggttctcagtcaagtaggatagagaaaacatgaagatacacaactaaataaaatgctatatataaaatgatgttttatgcaataattatagctatgctatgttaattcagcaattattgctgctttggggaaatgagaaggctttgaggaggaggtagtatttcaaaatgatgaggtttgaaagaagtatatgatgaaatgcagaaacgaagaggtagcgtatttgtttcaggagaagggaatagaatgaataaaagcatagagaaagaaaagcatatgatgggctgggcccgtggctcacgcctgtaatcccagcactttgggaggccgaagtgggcagatcatgaggtcaggagttcgagaccagcctgagcaacatggtgaagccctgagtctaccaaaaatacaaacaaattagctgggcatggtggtgcatgcttgtaatcccagctactcaggaggctgaggcaggagaattgcttgaagggaggcggaagttgcagtgagcctagattgcgccactgcactccagcctgggtgacagagcgagactcttatctcgaaaagaaaagaaaagaaaagaaaagaaaagaaaagaaaagaaaagaaaagaaaagaaaagcatgtgatgaaaaaaattgatatttttctaagaaattaaatgtgccgtatcaggaaatagatcaataaggtgaaatgagaccagattaccgagggctttgagtagtatgctaaggaattttggattctgcatgttgttaatgtcatggtcagcagtcctgttgattttcgtcaggtattacctaatagcagttatagtcttacaaagatcttttagagtcttgtaaaattttgtgttggaaattatacttcaagaatgaattcgtgtcctctctcctctgaaatgtagactaaaaaaaaaaaagaatgaacttgtgttatagtgatcaagtaggtcttgttattcgtattctaattagtatatatttttaaaaataagaaaggtgtttctttttggttttcttttggttatccaataatattgctttctactgaccactttgtaggtgagtaaagattttgtggtctttcaaaccttgattaaataaatcctgatttttactagttacgaatttttatcaaatgaggcgctttgagaataaagatgtttgttaaaatttcttggtgtacatcttggatataatatatgtggtttgctgtctgttgctgtatgaaacaaacattttagatgcctggattttcttagaatgtctatgattcattaacacagacacttcctgtgaatatatttctaaatgtattcttttgaaacccaaacactggatccttgtgaaaaattccaccaccatgcacaatactatttccaacaggcataggtcataaatatttggtagtgattgtcaaataagccataacctatattgaaactttaatagaaatgacttttggttctcttgtaaaactgagaatgccaattcaagtgataaatagttaatggtttttagatatgtgatttaaatcaaaataatggcttttattgattttttaaaatttattttagtggggtgaatatttgacatcagaaaagtagttcaaacctgcaacttagagatctggtataattgacatctccgtagact

SEQ ID NO: 71672 - DNA, 1033 bp, Homo sapiens
gtctcagcatcccgagtagctgggactacaggcacgcaccaccacgcccgactaatttttgtatttttagtagagatggggtttcaccatattgctcaggctggtctcgaacttctgacctcaggtgatccacccgccttggcctcccacggtgctgggattacaggtatgagccactgtgtgcagccccagtcctcaaggtaagcaacagaagcatcccaggataggaaagtctcatactttgattgacaaggtcaaattgtatcgttttcacatgtttttaaaaaagtacttgtacatcacaatttatactgtaattaaaacaagtaaacctttaaaagcatgaaatgcaaaggagtacttagttttgattaattgatttaacaaaaagtatgagattgtttgacaggttgcctaaatggtaatgttttggattgcttcctgaaaaaaatagggcttgaagctgttgatgtaaggcatatgttgcataataaggaggaatgtgttttaattcagatttgatgtagtgagcaatttttctgtattcacaagttccatacttaacaaaaatgaacctacttgaaaactatttcaaagcaataattcattaatttcctttgcaaattttgagaaggtcatgttcaaacatcaaacataataatccataacaatccatcaaacacaataatccattgatgattatcaaacataatcatccattcatgattttaaaaactctcagaaaaattgtagtgggagaacttgataaacttgtatctgtaaaacttgagaaagagcatctacaaaaatcctatagctaagattattcttaatggtgaaaaactgaataattttcttcctaagatcaggaacaggacaagaatgtccactcttgccatttttattcaatataataccaaagttctagccagtgcagtaaggcataaaaaagaaataaaagacatacagatcagaaagaaagaaaactgtcccagtttccagataacatgactgtttacatggaagatcccaa

SEQ ID NO: 71673 - DNA, 1013 bp, Homo sapiens
gagataggaaatattctgattgagtaaacttatttaggttctggtaaagttttgtaaattgctgaaaggctggaaagttaattggagctttttaatagtgaaattgaactttgttaatgtctttttgctaactactttgatcagctttaatctttgactagcttctcattgagttcattcataaaggtatttcttaggagactgatgtacagtgatcggtttacttgtgagttacattctttggactggatgtgattcttgattgtgactcctactattcccatgatgatttcctttctctagagaagcagatatgtggttttcatttctttgtgctttttcctttgattttggggactctgattattagtaattagaaattcttacctttttttttaaacaaaaatagcgaggtattagtgattattaggagttttttttttctgagagatttctactttacactaaatcttcatcttgaccagatttgacaatgcatttagataaactacttgagaatttttttggaaataccgaaaaataattagatgactcacatttcaagtacttctaaaacagtaagttaatatgtagacctattctcagttgatatttgtgcttgagtttaaagtttagatgttttgttcctaagacaaagcatggacaatatagtacttctattacattgaaaaatatttttgattatttctaaaataaataagcttcaggttaaaaacttaaaattattaaagacaggattttgctttgttgtccaagctgtagtgcagtggcatgatcgtagctcactgcagttgcaaactcctgggctcaagccatcctcccacttcagcctcccaagcagctgtgactacaggagtgagctaccatgcctgcctaatttttgttttttttgttgttgttgtttctttttgagaaggcgtcttgctctgttgcccaggctggagtgcagtggcatgatctcggctcactgcgaacctccgcctccccagttc

SEQ ID NO: 71674 - DNA, 1050 bp, Homo sapiens
tacaaaagaaatggattgctgggtgataaatgccaatttaaaatgttacactactttgattaaaaaatcataaagagttgctttctaattttcatgatttttagctagcagctggtgagtaactgctttttttttttcctttttttctttttttgagacggagtttcactcttattgcccaggctggagtgcaatggcacaatctctgctcaccacaacctccgaatcctgggttcaatgattctcctgcctcagcctcccgagtagctgaaattataggcatgcgccaccatgtccggctaattttgtatttttagtagagatggagtttctccatgttggtcaggctggtcttgaactcctgacctcaggtgatccgcccgcctcggcctcccaaaatgctgggattacaggggtgagccaccacgcctggccaagtaactgcttttgaagcagttggagctcccatttgtgtcccagaagaacatcttactgatgaaaataaagtagtggttgtgctaaatgactgaagaatggacaacgagataaagcagagaacagagatagagttccttatggcagtgggccagagtcctactgacatgtacagataactaaagaaagcgtgtgctgtgtatcttgtgctgtcagatagatgctgactgaaccgtgctagttagggagaccagcccttcagccgagtacacggtttcatctttgcagttaggctgcaggactgctgctgtattttcatccaccggagcttaatataattttaaggattatgtgggtggaggcttagactaaagtaaagtgagtgtgctgtttatcaccagcaaagagtatgctttgtcttgagagagagacactgaactgatgttctgtcttattgtttgtgttttcagacttaatatggttactgttcaaactactatatatctttgaaagattcccattgatatgtattcccatcaaaaagaattactaagtatataactagatataaatgccttcaaattttgaagacatgtctgtctaatgctaaaatta

SEQ ID NO: 71675 - DNA, 1414 bp, Homo sapiens
ggtgttaaggcagatagatttctttatttcttgaggggtggagattagattttgatactggaccaaaaaatgatttttcctgatataggtttgaattaaaaaaaaaaagtagcatttaaaaagtatggattcctggtcttaaaatttgatgactgtttaaccaaatgggaactgtttttctgaaagtgctttagggcaatcagtgctaatgcttttacatgcttactgaaagtagaaacctaggcatttgatcagagtattttctaagagatagaaaatgtttaaaagtcagatgataagcttgcataagcctcaagggtgacacaatttagtattcctaaataaggacttagtgtttcttgcagatgaggatattgcaataggaagctatttgacataaaaataaagtgtgcgtgaagtgtgctgtatcacttttgtgtaaactctctttttgattttcttaagcagaaatggctgagattgggtttacatagtctcttaaaatcaaagcttgctttactgcatagaataaaatgtgtttctctgactgactagtactgtataaaatagcctacctctctcatgcaaaaactgatattggacagaagatggaagagacaagataaaaaaaatgggaccagaatggaaagggaatcacagaggtggctagtattagattcccagagcaaggagaaagaacaagcaaataagaacatggtaactttttctctaaatgggtcagatagtaacctctactttatagtccctaatcagtgtgcccacctgtagacatagaaactttagtggttcctaggggcagagagggtgggaatcaggccttaaagagaggcagcaggagacattaactttgtgtaattgtactctgatgtactaagacttaatgacttaggttccttagcatctatatctttttccaaagctgcagctgtaattcattttactatttctcctaaagagtgtccattcagtgttattattattcatcaaataggttttgcatgcttactatgtggagggcaagtcataagatctgtaagaggaatttcttggatccctttctttatggcgctcttagtctaggggaggtgttagaggcaggatgatggacactaagaaagatgtaattataaaactgttaagttatggcaacattaactgatagtcaggatgcagtgcttcccaggagaaacactgtgctcctttgaccccatgagtggagttgtcagagaagtctcagtgaagaggcacatctaaacttctgtagggggtcagagaagagacagcaatttattcagtttgggattgatgaaagtattgcaaatgtaggcggcactactgcctttacagaagagttagatttcaccaggaaagaaggaaggaaaaggtactctaa

SEQ ID NO: 71676 - DNA, 1981 bp, Homo sapiens
tttgtaaaactttgtgatttctcttgtattcttcatttgccagattttcttacatttttgagattcttctaactttgcattttctcctaagccttttgtgagaagcagtttttaatttttctgaagccttattgaatagaaagacttgagtgaatctgtggggagacgctgaccgtgaagaaccccagaggctgtcaggggaagaaggttaagggttggtggattttagagagaggggagttccttgtgcatcacagccacaggagatttaaaaatgcgtaagccgaggcatggggcaatgaagtaacttgctcagtgtcatacagcttggtggtgatgcagttagaattgcaattctaactgatctctaataaggctgtgctttttcaaccatttccattgtactctcttgcctctaactgttgtctggatagctataatatttgagtagatacagtgttatatttctcaagttgatgacatttcatccttaaattcaagacttaggtcctataaattggtgtttttctttatcttttaaaaaatcttaagctctgtaaaatgattctgctttgaacgaagggtacttatatctgccaaaatcattattgagcttctctagtcatttattttcttgaaattgaaatgaaactttctgaacacagccttactgaatatggatttcagagccataataatgcttcttgcctctgcagattctgaattgatctgagtttggcagtgaattatgtatgtgttatttcaggaattttgcacatgccctgctttaaaccactgattatttttgtaaaatgctgttgtgtggatttggctcattccattgacgctgaactcatcagatggctatattgtcttctaggaatgtgacttgaattgattaaatggcataggcagcaacatctgttttgtaaagctagtttagtttcctaaaactttaaattttcaaatttacagcttacaaagagaatgaagcatatttctttaatgccataaaaagactttcatggagttttgatgatagcttgttttaaccttgcccttaacctaattctttttagaacttattttcttactgtattatattgctcattttcaagaaaaagacatatttgtaatgttggaaactttatagtcttatatggatggctcttaggtttttcagatcattcatccatttgaagacctgcagaaagctttggatggtctcctagaaaaaaaagcacccatacacgtgctcctaaaactctgtacaattgtgggaggtaaagctcacctgtacagatccccctgaagcctcctgcctccttgatgtcctttgcttcacatgtgttattaaatgcattaataatgctgctgactgtgcacataagttacctttctttatacacagcttatagatttgttgaatatttggatcaccatttttaaaaatcaaatgttttatgatgttgatctacatgtgtcatttttatttctcggggttaatgtctatttttattctttttctctcatccttgtaatttcttttttagttaaggaaatgtatccatctcagggtttcttcatttattattacaacccttatttggatggacttaatgaccaaaatttatatggtattacagtacataggcttacctgatctaatcttgtagaagacttttcttgtatacttcttcgtgtaacattttcaaataatattttcaatttgggatagaggactttaaagaaagttaagacttgggtaaagatagatactctcatatgacaacccatgggggctttttaaaattatactagtggatgtgtatttttatattcagttgatcctagtctttgtacagtcagttttcttttacaatctggaattttgcccatggtttcaaggccagcatgggtatttactaagtaatcttgaggatgactgttcttcttttgtaacctgctctctccagatctg

SEQ ID NO: 71677 - DNA, 1325 bp, Homo sapiens
gtgagggaaggaatcttctaataagaacttatgtctttggtcccaagtagctgatgagaagaggactagttctgtttgagtctcattgagtgtaaaaaagctaggaaaaacgttaaaaaaaacacgacttgaaaaaaatttgtattacagcacctctttttgaagtgccatctcatttatcgtgtattgttggaatacatagttaactggtgttttgaagtgcttttgccatcagagctcctagagcaaatggataaggataaaatctgacttctctttctctttaataggcaccgtttttgttcaccattttctgagttctggttaggatttggcgacagtatgaagatgaatttgtgtgtcccagaaggcaagccacatgagtagttgagtaagtaggaggccatgtacagttggaagaaagggtttatggtgttctaggtagccaccagaggagacagcaaagaagcagtatttgtcccagctgtgatcaccactgacactacactgctgctttttcttggcagcgatattattcttcttttatattagccattttataaattctgaaagggaacacatcttattctttgccaattctgaaaactctggccaggttagcttaagaaaataagataataataatacctaagtatctctatatctacagatagggatctacagacaagacaaggtaggtttaggataaagggcaggagccaggtctagggaaaacagtgggtcagaacaagataggggtagaccaaaggaggacacatataatggagagtgagatcaagaatgaccagatagcaactagaggaacttatagtggggaatgagacaaggcattatattaaaagtcatgacagcaaacaccagaacacatactagaagaaaggcagttggtgaaaggtttataatttaggaattagaacatccatctacgctgaaaaataggattgttgtaagaattgccatgaactgcctacagcatgggtactgagacagcaagcagtcttttgctagccaggaaagttcttacaagttcttcctgcgtagtagctactcctagctgatagcagtcatggaatacagcaattcagtttacgtctggcagctcctgactcctgagcagctggtctgaatcactggagttttatggaaggctaggttctgataaattttgttctctctcaaagtagaaagattgatagattatggtccgtaatctagaattttgttctctctcaaaagtagaaagaaaattttgttctctctcaaagtagaaagattgctagattgtggttcatgtgcagaaactt

SEQ ID NO: 71678 - DNA, 1507 bp, Homo sapiens
ctttcttcctttttgatatggtggcgagtttattcattgtggttggaaactagttttgttcctttttgcaggcttttcaagttgatagcttcaggtggtaaaccatgagagtgcttttcagtgtctcctggtgagctttcatttataaatgctgctccactttcattagctttatttagaagtttctttattcattatcataccagtttactacttacattttccctaaactcaggcagccttattttggcacgtttctgcttgcgtgctaaaataagagtgatagattaattgtaccagttttggattttggaattctttattgcttttgtgtagtatatttgtaggattaatgttaggtgctgtacagatcataatgcattttccccgaaggcatgtggttggattttagggctctctgataccactatagaaatatatatatatatatatatatatatatatataggttacgttctgcggttgcttttgggctggttttttttctttcaagttttagggaggtgttaaacagaatgcttatgagataccatatgtattccacgaaataaagcgattcattcaacaaacatttattaaatgctctcagaggtttgagagaagtaacaatattatgcataccatttgcttagtggtttttctgatttcctttaagaatgtaattgtggcaacgtttcaaagcagttgacttttcttgaatgtagctgcagatccagacgtatagtccagttgatactccgtcctgcaatgatttcactgaagattcagatcctctgaatatagtttagagaatatctgtgtactgttgtagtgattagaaatcatttcagggtgcctctgctaactgagtataaccattaagacttttctgcctgcccctttcccacaatgttttatctcttgtcatatgtaagttgcagtgggaagggagggcagctgaattggtcttgaattgttttcccttaaatgggcttagtctagtttgtgggaattgactgcccaaaacattagaaaaatttaagggagaaatggttaactttcttagaacttttagaagaatatttcaagaggaagcccaattttggttaagccatggttaaatcttgaatcctaacttatgctaggttaggaccgcttggaagaatagggtaagacagagcagaataggaccacttggaagtcttctgggctttaccaaagtttgagggctctgtatcatttgagaaagtgtcatcttggtttatttttgccttgggacttccaagtatttctgaaacagatctcactgtggtagagggttgggctctaatagttatctgaccactccctcagcatttggtaggaagcaataaagaataataaggaaaatacttaggaaggaaagcatagaagaggacagatgggttagaatatgtaaactgagtgaagagccatgattttcacggcattgcttcagagaagtgtggaatggtaatggttactgggt

SEQ ID NO: 71679 - DNA, 1546 bp, Homo sapiens
gaaaccctgtctctactaaaaatacaaaattagccaggcatggtggcgcatgcctgttgcaatcccagctacttgggaggctgaggcaggagaatcgcttgaacctggaggcagaggttgcagtgagctgagattgcgccattgcactccagcctgggcaacaagagcaaaactccgtctcagaaaacaaacaaacaaacaaaaacaaacttttgcactccagaagaaacttgcaaataattttagtagtattattttttacttcaaaacatttgcccctccatgcttgcttttgtctttgatttgcaagcagtttattgcagctgggagatccctccttccttcttgttttccctccctcccctctttcttgtccaccttgtctgcccactccttcccattccctccctccctccctgtgaaagggaattggtggagaaggaaaccttggtttattggaagagtgtgggagatgaagtttaaattgtagaagttcatcaagccgtgcaaattgggagcagtaggctttatgcttcgtttataagtggcttttcttcgcgcataagactttttagatgctagtattgagactgtaattgacagtagtagttttttttctttttaggctagccatctgattgcatagcagcatcacagaagatagtctgcctgatctaatggcagcatgtcaaggagttaccttgagcattaactctccactttctttttagtttcaaaagatgattaatatatgttgtaattctctctgtgtcatttctgttgtagttttgttgtcagtaaggactatgtatatttaggaatcacttgagattcccgatagtattttaagcctgttgttttatatcatttgattattaagggtgaacttatttgattttgttttctatacatgtgttttactcagaatgtaggttaaagttttgttgttttgttatgtgagctgcaggagattaacttttaataccgtgttaggttggagaagcatattttatttaacttgctccatatgtgctgtatttatggaataattttaactatctgtaattgtttgggcttaaaaaaaccttcctagtagaagggggttgtttataagatagtgtcatagtatactcagctgaaaataaaattgtgggattgaattctctgatgctcagaagatttattgatttcatgtgagagaggctgttattcttgagttacttttattcaaacaggaaaataataatactatcaacccttaccatttatgaaaattaacttaattatcatttttaatagttaacaacttaatctcatgggtttgtttctaagaggatattatacactaacttaaaattttaattacaaaggtatacagtgaaactgtgactttaagtgaaatgacatatagcaggttcttgaataacgtcctttccttcaatgttctgttgtaacatggatgaggaaaaaaacctgattttgttatatgttatttcacttttgcagttttcaaaaacctatcaacagtattaagtgaggacttact

SEQ ID NO: 71680 - DNA, 1049 bp, Homo sapiens
ctgagcaaatggaaattaaaacttgatatactcagctataagtatcattgggcctaaggttaaaaaaaaaaaaccttaatggtagaaataacacgtaaatatttttttcctcttaaaaaacccagatagtgtaggcatctgtggtgtttttttttttttttttgagatggagtctcactctgttgcccaggctggagtatggtggtgcagtctctgctcactgcaacctccacgtccggagttcgagcagttcccctgcctcagcctcccaagtagctgggattaaaggtgtgtgccaccacacctggctagtttttgtatttttagtagagatggggtttcaccatgttggccaggctggtctcaaacttctgacctcaagtgatctgccctcctgggcctcccaaagcgctgggattataggcgtgagccgccactcctggccgaaatctgttttaagtatagaacatcatgaaattggattctgttgctttaagcatttcatgactgagctgctgtctggatgctacctgaagagattctcattgaatatcattatggccagtaagtgttccataattttctttaagctccatctatgtaaatatttttgaacaattttgcacaagtacagggccacatacctatttgttataaacccgacgttgataaaatgcactcttagtataattgggtcttgttttgatcctggcagtttcatattgggatttggcagtgagttcaacagaataagcattatcctcttgaggcccatctaggattgaactaaagggcttctacaatatccacatgatcatacaattagttctctctctccctctcttttttttgtgctgtgatagtgtaactgaatatgagctggttgccagggtattgtggtagaataataccctgcagtaaacagttaatcatgcagcagaactggcttgatttaaaaaaaaaaaaaaaaaagataaaaattagataaagatgaagtggctttgtgttgaaaaagattgtatgtatatgatggtaaaaggaaggttaga

SEQ ID NO: 71681 - DNA, 1313 bp, Homo sapiens
tattgttgttgagacggagtctcactttgtcacccaggctggagtgcagtggtgtgatcttggctcatggcagcctctgcctcgctggttcaagcgattctcctgcctcagcctcccgagtagctaggactatagatgctcgccaccatgcccagctaattttttgtattttttttgagtagggctgcatgttggccaggctggtcttgaactcctgacctcaagtgatgctcctgccttggcctcccaaagtgctgggattacaggtgtgagccaccacgcccagctactttacctttcatatttgtcattattttgtggataataatgaagaatacatttgtatttcatgagaaacaagtactttcaggaaaaacacatatccagtgataaatggcagctaggtctaagtagtttataaagtatacttttatttttcttggatctgaattattcaagttttgatgtaaatttcctgattctttaaataattacattactgttctgtttttctgttttatttgaaagaatgagtttgccaaagctataaagtagtaagtttttcattgggtgattatctgaatgggtctagtgcatacttactaaatattagacttaatgtgtaattatatacttgaaaggaaaaataacatacttattaagactgataaataatacattcatattgtaaaattatggtaagatcataatctcagttctttcagatgaagaattgaaaaagatctagtgaattagataaaattattaaggtaaatatgcttgaaattgagagaacaagctaaagtctatcttttgagtgtaagtaaaatcgatgtgttaccacaggcaacttactgaaccatgtaattagtttttttctatgaaaaatgagacatactgagattgtgttaaagtagcatgtaaagggcttatgttctaatgatatgaaaattaaagaattggtaaaaaaaagttataattttcagtttgttggtaagtatagttattatggcctaatgttttgcgttgatatgaaatcacctacttatataaagtaaacctgagtaaaatcctcttaaatgagatgttagagtcaccattggaacaaatagtgttgaaaattgtcttaacactagattaactgttatttggtatattgttttttaaaatgtgagtaatttttatgattaatacattgtgactggtagataagtgtttagtctaacatttttaagtgtagccatgtttgatgcccccctcaccatttgtgtatattttatttcaaaagcttgtactttcatagaaaactttaa

SEQ ID NO: 71682 - DNA, 2106 bp, Homo sapiens
atcttacttgatttctaaatataatttgtgagttgaatattgaatgataacatagaaaatagttttctgcatagagactttatagtaagtgtttagacaaattaaattattcaacaggaaataatgattatcagcttgttttattttagtatttaatgtaaagagctatgtagaaatcttgatagaaagtttctcccaccttaaaattcgagaagattgacatacattcttcactgggaggaatcttatgatatgaagtttcgtgtaaatatttattttagcacaattgcttttctgtatggaagactgtttttagtggtctgtaagtaaaatgagaaaacgattacaattttttgtctttttccaggctgaactcacgggaatcaaatggcgtaggtacaattttggagggcatggggactgtggacccataatttcagccccagcccaagatgatccaattctgttaagtttcatccgctgtctgcaagctaacctgctttgtgtatggcgtcgtgatgtcaaaccagattgcaaagagttatggatattctggtggggagatgaacccaacctagtgggtgtaatacatcatgaactgcagggtaaggtttctgtttttttcttaaaaattatttgcatcatatttttttgaacattgataaatttcaaacagattattaagacttgtctaaaagaacgatcttaagtgtttcatggatgtctctctcaaaaggaacattctcacccctcttcctcccatccctgtttttttttcctaactcttgtccttttccagttatgctgagaatcagaaccttgtgaaccgctgctgttaaatgagagtattgtgtctcctgggtgcggtggggtggaaaccaggctaagatccactgtttttaaatgatagtgaattgtgagtaactaacaagacagtgaattgaacagttactgtttttttccttggactgtggttgttatggttcactgccagctgaactctttggtggaaaattggagagtgatacagaaatttagttttgagcctaattggacaaaattgtgagattacattgaatagtattttgaggaaagatgaatatatgggatctggtctgaattgggtgtagcaaattttcttttgcttttatttctgtttttcatgtaatttggtgattccaggaaacattggctccggtgttgcctgatttttagcttcagattgcatctgatatctggaaactgaattaatgtaagagtttcatttttctgtgctgctttatatatttaccacagttttatgagcaggaacttttatcagttgtctttgaatttctggtaaaaatttttacctttttatctaagtgtttctatttagtatgcaaagggattttctcaagcaagactaattctaatctttagttagggtattaactctttttgacttagtctcttagaaccatcttttattatctccaaactatattgtgttaatctgtgtctgaaaaatttcagatcgtgtttgaaatgttttgttacttgatgtttttaatgttttttttttttaaaggaaggagtaaaactaactgtaatgtatgttcgaggctctgttctaaagcttttacatttgcctgaaggatttcctgccaacttttgcttgacaccttgctagtttttcttggcagccattttttatctgtgatatctcctgccacagcagccagagggcggtaaaccacaatggactaattgaactgtttactttatggtccatttgtctgttcagctcaaacctttatcctgatattttttagggtatttggtctataaataagagaaccattgtgggtgacattgcttgcttagctgggtaatcagcaaagtcccagaacttaacattcatctcaaagcctgttctatgtagttagcagttaacttaggtaaaattagagtttcagaacatctggattctgtttatcagaattttaaaaataagatgtcacctagaagataattacaacatttttgtttgtccattaaaatatgaaaacatatttttactttttttccctatgtagtagagaggtataaagctttttaaaaagt

SEQ ID NO: 71683 - DNA, 2519 bp, Homo sapiens
gtgatccttctgctgtgggcctgccaaagtgttggaattacaggcgtgagccactgcacccagctgagcgccttttaagcaggcttttaaccagttgttcttatttaatctcctctctgcctttcaaccctacttccaaaatacctgtatttaattcctgaggctgaggggattctgtgtcaattgggttgtatctctttcttcatgtttaggattcagttttcttacgtattgtaaatctccttatcagagcatctgcttcttagccttcaaaattttgatgctatatcctctcttgttccacctgccgttgtaattatataatttaatgaaataaaacaatgaaacaaatgtttttcttgatgtcttacaggggtttaggagagagcaaaagcagatgtgtatgtttattttgctgtctttacagggagttgattagttatgttttaacagaagttttctattacatgtgacttttttccttcctctgagttgagaggtgacttaatatgtttactgtattaacctactctactgcagtggtaaccctatcattggaggaagtgaggtgaggccgacttggaatttcctaatgcatgcttgtcagcctcaaatgatcacagctgccttttctatacaccagcctagaatcctgcccaggatggatacgttaaactaattggtttgtacttctgaggactctttcaatagtttcctgaaatgttgactatcttctggcagcttttctgttcttgatgggtaataagggttccatctcatttacaagttgcttttatgagtgggatgtaattagcctgggccaggagacttgaactgatttatagtatctaggtcaaccctatcactttataggtcctgaatctgaggtgccttgaggtacagtggatttcctaacatcacataggtaaatggttgaaaaaccaggccttaggacctagacctcctaatttccagccagtgttctttccatgatactacaccatgggttcattctaatcaacgtctcttgattttactgtgttccttgaccactgaatgtggttttaactctgaggagccatattgcaagtatgtgctgttggtcacaagggatctagttgctgtgggtcactgcaaataaataatctcatttcctgtatattgtatgtgaagaataggacactaggaatcaatataaattttctttgaatcacattcatgtcagttaggaagtgcatttatccctgttttgttgtaatctatttaattagaactgtttggaactgactgtagtagctgtttgtttaggccaggggagtatctgccacttaacccatttatgcctaatgttccattattggaacactaaacttgtgggagttatttatatcctactgctcaaggtcattgccaaggtctgatttttcacaaaaaaatttgcatcctcctgcataaatgggttaagttcaattttctgagaaccctgactacccctataccacatgccagccattgctgagcagattttcttccagcctgtcttgctatcagaatagtgattttgttggttcgttgtacatattatctaagaattagtttatgtagataccatcttatagtgataacatgtaaaagaaggcatataattatctgagtgaaataaaagtctattcatgggatgatacgtgggcactcttataccagttttcttaatacctcaggaagactaaagaaagatttatgaactttcttaaattagaaagtatggccatgagctctagtcattgctaaattgagttgatgacagtttctttgtactattttataatcctctagggctaatttttaccatttgccttatgaagcagcatggcagaatggaaagaatttatactttaaattcagttacagcttaaatctagttatatttgggatctgccatttgctacctgtgtggctctgggagaattattcaacctttctgagtcctaatttctttagctgtctgttgtgaagtttataaattatatatgaagtcactagtatggtgctcggtattagaaataatatatgaaaactctagtatggtgcctggtagtaagtagatgcttggtaaataatgatgttggtggttattatacataatgtgcatataggtttccttctttgtatattttaatttcatcgttttggttctatattttagaaaccatgtagtttaaaacttagatttaattaaggattgtctttttgacagtgagaaataattgtgtttggggataattttgaatctataattattttaaaggtttgctttaaaattttgaaatcattaggtaaagaattttgtgttgtagagataaacgttagtcagaaattgagacagtatggctgggcacaatggctcacgcctgtaatcccagcactttgggaggccaaggcaagcgtatcacctgaggtcaggagttcgagcccagcctggccaacatggtgaaaccctgtctctactaaaaatagaa

SEQ ID NO: 71684 - DNA, 1096 bp, Homo sapiens
ctgtttttctgggaaattgttatgaattgttttgttggtcatttcctctttattttctgtattttctctttctgaaagctcttgtatttggatttcagcttcctcgtatttggattttcagctttcccccattttccatttttgtttatttgtttcactttctgggagatttcctaaactttatcttctaaacattttactaagttttatcatttctggaatcattatttaaaaatttccaagagcttttaaaaaattctctcctgaaatagcatcctgttgtttttaaatggttgcaccattttattttgttgagaatattcttggtgtttttaaagttttcttctcccaatgttgtcttcccttctagctgctttttcatttgtttttgtttctgtaattcctcagtggttttccttaattatttagcaattcttggttgtatgttcatgtttaggaatggtggactaagaatctgcttggaatttctgagcatgtgaccgacatttgcttaactgtgcgcctcactgatctgggtgggctctttagttggggaacctctctctgatctcagtatcttgaggtcttttctgtggagctaagatttctcagagaagacttttccaaattcctttctgagggatgaagactggctgctagttttctgggtgcttagagggcagtggtagggagggggtggtccttggccttcattctatatatttcaccaaatgccctgttttcactctggttccgtgccttcagtttgcctgtgtcctgcagtccaggtaccctctgtttactgtctccagagaatacatttgcatttatttgctggggtgaagaagggacagtagttcagctttgtgcagtagagaaggtacctgggcatctgagtgccttcttattttattttcttttcttttaattttattttgtgattgggtctcactctgttgcccaggctggagtacagtggtgtgatcacagctcactgcagcctcagcctcccaggctcaagagacccgctcactttagcgtccctagtagctgggactacaggcaagcagcgccatgcttggcttattttttaatt

SEQ ID NO: 71685 - DNA, 1052 bp, Homo sapiens
cctgatactgtgctgactgcagaagtcactttggcttgtttattatgttttgttttacaaattatttgtttttcagcttggatagttaatatcgtatgttttaaagccctgacttttttttttttttttttttttttttgggtaggtacttaatctgctgttaaacccacagcgaatttttcattttatattttgcatatttgagctgtggaaattttacttagttaaaaaaatcccccatttctgtccttatgtttgtgtttttctttaaattcttgaccatatttataatagctgctttaattggcttgtctgttaatttcatcattactttcatttctgggtctgtttctgttaagtgacttttcttacagtcatgagtcccatttttctactttttgaatgtctggtattttttattggttgctggacattgtgagtgttgttgaaagtctggattttatttccttcctttaaagagttgaattttgtattggctggtagttaagttactggcagttaataagatcagcctattattattagcatactttttttctgaggcttgattattagcttgggttagaatagactttatgctagcactggtttcctccttatgaggtatggtcattttatgggcattattcagtgcccaaggtgtttaacagtgttttttctctctggctgttcagaacttgactgcctcccagctttaggtgaactcttggagtgatagctcccagtagttctctgcctgaccttgttgaattttactgtttgaatgtgcagcctagtacttaggaacagtttcaaaagagcctctatcagatctttggagcttttttcctgaatattctttctggtgatctgtctccacaaattccagctgtcttggcctttgtagggcccacctcatttgtatgccttctctcagggagtctagctctgtactccctgttgtctagtgtctgaaaacagtaattttatatattctgtccagttttctggttgtttatagttggagaacaatttggtgcttatttatattt

SEQ ID NO: 71686 - DNA, 1021 bp, Homo sapiens
tactcactttaagtgtacggtttcataattttgacaaatgtgtatatctgtgaaaccactgaaatcaaagtagagaacatttttatgatgcaaaaaagttcatacatgtccttttgcagtcagggtctcccccttgcccctcagccttcctcccctccaggcaactaccaatctgctgttactgtagaatcattttgccctttctagaatttttaataaatggaatcatatagtatgtaatccttatttctggtttcatattattgcttaagtagggtttttttttttttttgctaaatagtagtctcttttttggatatgccacaatttgctgttggctgtgaaaattaatgtactgctttttgtgtgggacatatgtttttatttctgtaaataactaggagtttcactttataaagaactgccaaacttgcaaaaaataaaatgtttgtatcatttaatatcccatgagttttataggagttctaattgctctgcattcttgcagcatgtagtacaatgaatttttacaaatttcagccatccttgtggcgtgtagtacatgttgtgaatcttttatctaaaatgcttggaaccacaagtgttttggattttggattttttcagatttgggcatatttgcattatactggctgagcgtccctactctgaaaatttaaaatttggaatttcctttgagtgtcatgttggcatgcaaaaagttttgattttggagcattttggatttttgaattagggatgtgcagtatgtagtaacttatttcagtttgtaattttttgataacagatgaagtttaacatcattgcatgtgcatattaagtcattcgtatatcttttgggaaatatctcttcacatcttttgcccaatttaaaaattaggttgttttcttactgaattggaagaattcttggaatatcctggatacaagttcattggcagatagatgtattacaaatgtattctcctaatttgtggtgtgccttttcattttctcactg

SEQ ID NO: 71687 - DNA, 1614 bp, Homo sapiens
caagtcagacctttacatgttctcacctcagagcttttgctgtttgtaaagagtgcttgctgcaggcgtgcactgcttaactaccagctacatgcattttctcatgctcacaagatccttttgaggtagagtctactattctcatttttcagataagaaaactgaaacaagaaatttaagtagcttgtccaaggtcacacaggagctgaatctcttgattcaaagcctgaacttttaaccagtagtacatttgtattttatgtttttctttcttctatctaaattcttttaggacttcagtgaagctcctcgtagctattccaaacattattggtctctttctttttcgagccttttgaaaattagcagtgtagaccatataatttagtacaagtgctaaggtagaaatcactggagcatatagatttgcctgagattaatggagtgataatacagtttacgtttttttaaagtttcatcagagattaatggagtaatatacagcctacaatttcttcccagagatagggaaatagatttttttttgtcttagactgttccaaattgaggaatcatttggaaaatgaaaaattataaagatagcttattgttttgattgatgactggggcaaggttaaaaaacctacataaccatgtgatctaaaaaataaaaatgatcacctcgataaaagtctttcagttttttttaaagtaaaagccagttattaaaataatgtcaaaatgatttagtatcacaatcatatgcttatttaaaaatagacaaatagcttaaaaagtaatctctttttctgtacaggcagcttggaggcctgcattttacaactgatttggttgtcaagggatctgggctctttctgtcttgttactacactgttcttagtttatggcatatagttcaagatggctattcagactccagtcatcaaggttgcattctaggttaggaggaggtggaaatgtgggaaggacacaccgtcctttaaggaaacctccaggaagttgcctacaacacttctggccatacttcaaggccttacttaactgcagggaggctgggagatgtagttctttaagtgggcatgttgttatccacagcagtgtaaagtgtatgttactatgggggaaggagccactcatgtttgtgtagacagtgcctgcctcgtaaataatatacgtttctgtttatagtctgttactgcagctgagaagcaaaccatcttaatatcactaatgaacttcattaaatagttcaattcccagaaatttcacaagaattctcttatagttaaggttaacaaatacaaatcatttaatcagtgtcctgaagtagtcagacatgaaaataatttatttgaaaatattgtgtatacctctaaacgatttacacttaccaggagatgtgcaagatgatactttggttttattaaaagtagtttgttttgggctgggcacggtggctcatgcctgtaatcccagcactttgggaggccgaggtgggcggtcaagagattggggccatcttggccaacatggtgaaacctcgtctctactaaaaatacaaaaattagctgggcgaggtggcgcacgtctgta

SEQ ID NO: 71688 - DNA, 1051 bp, Homo sapiens
aaaagagaatgggaatcctgtcagaaagcgttgtgatgtaatcctagagctatagatattttaggaaaatttagctacataatagttattctaaaaaaataagaaaaggtacttcaaaaattttcagatttatgacacctgagccatttagcatttagaatttatatcagagcatgaatcttcatcttagcaactaaagagcacaaatatttgcctcctgagatacaagttcttaactaacatttaagttactaaaaacacagtgttcaaagtatgtcgctttaacttgaaaagtgtaatcatctgcacagattgaatcaggtttcatgatcccaaatagactacattctttagttgtctacaaattacttgagagagatatgtatgaagatgatattttgttgctatttggtgataaggttgtgaaactgagctttgcaacccagacagatggtgctattcttgaatctgcaagatcctataacatttaattaaacagcggaatgattctcatgagaatccatagtttgttatatataagctaataagctgactttagtaaattgtataaatttgatttgaagtagaagaattacctattctaggaaactattctaatgaatgttaagatgagtagcttgtgttagtggtttatatggtaaactcaaggaatattccagatggaaaaacaagtgggactcactaaggtaggcgtttatcttctaaagtaactttgattttgttgccaaactttctcatatggtaggtgtgatatgctgttaagaacccacagagctgactttaacaatttccagaaagctgtgagaaatttagttatatatgttaacacccattttagaaaatatctattgatttagattccttgtaatctatcttatattttaattttggaattgaaaatagaaataagtaaaacagcccagtctagttttagtatgttatgtgaacataactctttagccatttgtaaaagtttgagtttggtggtaatattgtatgatggagatgaatgaattttttagttatataa

SEQ ID NO: 71689 - DNA, 3402 bp, Homo sapiens
atttatctgaacttaatatgagcactaataaggtattcagaagagtataattggtttgacaaaaaacattttatgttgacaattctgactattgaattttcatgccctaaagagaaataaggaaaaacatacatatatctaactggaacatttggaactagctcctagtatttgtgcctgcatgtaagcctggcacaatgctacttaagaagttcaaatgttacctcctctgaccaccacaggcagaactagttaccccctacctccctctgtgtacctctgatcatcagatgagcttctgcaggagagtgaccctgttgaaatcatctttgctaggtgctcattaactatctgttaagtgatggaattcctggacgattattctccattcctcaagggagctcttattgaccatttgggtcttgatcacaagtatgctgtttttatttcagcttattttgatgattaactctgtgttctgaatatattttatctagactgtatgtactgtggcttggtaatattttagatgaattctagaatttccttattaaagacaattccaactgatcatgagacatgttcttactcctcaaaggaataagaattcatttagtgtttagattttctgtagcatagtaggcaacctatagatttttgagccttctggggattttgtttgggggcttgatccagaattcctttactttcattctttaagctgtatagcagtgcttttgttcaacattcaaaagattgttttctatgagcccagtaaaatgggaaataacctggtagtagggaaacttgagttgtattaaacatttttactagtatgatcacgtaatagttctgtgcctcagtttctcctgtaaacttggtgttggagggcaggaggcgtgaaaaatcattttgagtaccttttaaggaaagcgctttggatgactagatgatgttctttagtaggaagagacctttagtaaattacaactaaagttatagagtagcccgaggcagttaaccaggagattggaatggtaaaatgacttgttttaagtatagcatttatgttgtgtttgtatttttttctagggagcagaggattaaattgttcttgtgtctttcctcgtaaataagccaagattgagaagaaaaacttgaaattcatttttagtttttaacagtttttcgttacaaccatatatgattcacagttgcatggtgtgcctttaatgcgctgggtgattttgctgtaccaactctgagctatagctggctgagattgggaattgaaccgtggctcttatttggtagtttaagctattaattccttggcagttctggagtgctctttgaactttaaatagcagttctattaacactttgagatttgtctcagggaatgtcaggaatagtacttaataaatatatttttcttcttaaagactaaatcatgttttagtttgacacacatgtcacaacccttactgtgttttgaacagagagaactcagctactggctaatttctattttctgtttaataatgtggcagtatctaaaaatattgtttaggcttgttgaaggaaggaaagccctcccacgaatctgtagcgtttgtattagtcatgttgaatatgaatagtgtcttaagttgtatctagaggtttagaattttacatgtaggtggtctcctgtgttctaaaatactagaaaaagttaatttgtaagtttgttttcacaaaaaaactcccatctcttgctacaaatgatggttagcctatttaccttgtatattgtacttaattaggtctattataaaactcaaatgctatttatagcagcatttttgtgggaataaacttatgcttagtgttctcatgtagggtgtcaggagcaccttttctctgacttatagtcctggcagtcagagcgggagctatagctcctcttctaggccaaggagaggattgctgtgtggaagagtgtggagaggtgaggatggctccctgtgggaagagcagcagttttgaaggcaggttttcctttccctgcttgtgggcacccactgctgctttctctttgctgatactagtggcaggttctgtgatgtcatcaggaaaagattctgtatttctttgcattttagcacttcccttctctttcctctcctccttcactcagccctggagacaagctttctgctggctattacgtttgctaaatgaggacttctgagatccaatgggatgaaaagggaattagggctgagattggacggggtagccagtaaacaaatacttagaaatgttaatgttttgtacgctatgtttgagaaatttgagacatgtattttggaataatgtacatcagaaattattaaaatctagcttgggttaacaaaagggctagactgatatgcggaaaaaagatctgcatgcactatttaatttctgcagagggagagtgacatggaccgcataatatctgataatactttgtagccagagaaacctgaaaggggagtaataaaactggatgttgaaggaatggatggatgtggcttgctagagaagaaggggaagggcattctttggaagcttgacaatttttagtctttattcttgaggatctttattgaggtggtatgtaggagaacacttctaatttatggtcctggttcttggctttcttttaaaaaacagtacaaagacttattgaaattgaatttttattaggtggaaaatttgaagtgtgggcaggccaatttagattaagaaatgatgttaaaataattttcagttttctaaaatcagttctgaactttaaaaaaagtgctatattacgcaaaatgctaatgactaaagtgacaaatatttcagaaactggacagacgtgaatctcaaatgagcagatgggatatgaaactaaaacgggagataatccaagacgatatagaaactattatgagaagtgaattgaggaaaaacaagtgtgttaaatggtattacatttaataatgtgtttaaaagcctttctaggactgctgtcttacacagacaaattagaattgttgaactgtgtaacccttcattgtttaaattctgtgcattgaaaacaaattcgattttggtttaagattacttcttatgaagcctaggcttttaagttgtgaaggtataggttatatgtgctttaaatagacaatctaatttgctttctctgacttaaaggtaaagaaatgaaataatggtgattttcagagacaatcgtggtgaaccttgaaggggagaggtgtaaggagtgaaagagagggaaggtttgctatttgggcagcttggtagttcaaataattacatttgactgttgagggtagaatcttggataagtgggttgaggagtga

SEQ ID NO: 71690 - DNA, 1010 bp, Homo sapiens
cccaaagtacattgtatatcatagttatttctgaaggagatgtaatcacttgttcaaaatcatgtttttttataagaacgctttatggtttaataatagcatgcatttttttcttttggcctgcagggttttttttttttttgttttgtttttttttgcagagaaaagtatttataaagaatttacctagatactctcattagttagattgaaataagagattaagttctgtaccgtggtaatacccacccagtttccattaccttgaggtgttcattatggcttaccaaaagttgattgtgcaatcaatcagacactttaagatttctgctagtcttttacttattttctgattttttactgcacggaatcaaatttcttaaattaatttttcagcatccattcccttttcctaacgtgtgaaaaatgccattgtgtatatatgatatgggtcattgtataagtttcttattctaactgctgtgagatttgtagctgctgcattaagtgcatgcctgcctgtgcctttctgactcaaaactattttcttatgctgtccatcacatttctgggtgactttttatatattcactcagttaatcattcagttaaaagtgtgttaaatctgcctttttgaaaagtgtaacagtgcaccctatggtatgtgaactcattcttgtgagaagacataatttctggatgttaagtagacatttatttttctctattgagttaatatggagaaagtgattttgtgccctttaactagatttaaatatgtgctctttgatatgagggagtgatctctagttcttagatatgtatgctccactttcatgttttatttgcttagaatcttcctgactatggataattgggtgataatctcaaattcttgctgaattgagacactagtacacccattagtacataattcctattgaagaccattagttctatatttgaagcttttaaggtaatctattgttgacctactttctttttgtctt

SEQ ID NO: 71691 - DNA, 1940 bp, Homo sapiens
attctcccccttttggatcgtctctctctcgccttggatcccatccagtgtttatttggctctttaaaaatcatttgtgagcgcggcgctcggcgtggaatttgcatgtggaagtctcggagctgcggattctgggtcgcacttcgaacgcccaccctctgttgcaatcgcactccccttctcctcccctttcccccctttttttccccccgtaaatgtggaaggctttgccttgtgctgccgcgcctccgatcggcaacctcttcccccgttgttggatcagctgcctgcccgcccgcctgccttttgaatttttttaaattccataatgacacctgcaatttcgccctaaaatagttgattgaatgcgattgtgtcaggaaaggactcttgcacccgaagctcccgcgattgtaaacatcgacagccgcctgcctctcggggcttactatgctggagagccgtaaagccattgcaccgagccgacggaaggtggagaaagctttttcttctttctctcctcctgtgtcttttaaaaactgtttttctctatcctaacaacgaatccgcacacacacacacacacacacacacacacacacacacacacacaaaagcaacaagctggtcggtttgataacatcgcttttatctgccttcgcctctctcgcgctctctctttctgataattgacaacttttccttcggatttgaatcgcctgccttaatcttgaagcagttagggtgtcaattgttctcgtggaagcctggcacccgccgacggtgtctagattcatcgaaattaaaaatgtatagggctccagcaactcttttcctggcggtgtcagtgacatttggtggtaaatgccatctttgctttttattgggtcgtattacctacctctgaaaacattcacgttgttaaacctggcgtttaggctaataattgcagtgcgtggtctttaaatatgtgctttgtgcatgagttactgtatgtatagctatgtgcccaggagagtacgaatttgtttaaatattgagcaaagatttgtaaacagatgtaaggcaattacgtttcaagcgtagaatataattggaaaattggctgaacggtttatttaatttagccttaaaaacacccaacttgttttaagttgtgtaccctgttttttttgggggggaggtgagtcccttttggagagcatgcattttggaaattattttctgtaacccccgctgtagatagaagcattatttccctcttaatccttgtttacactggataaataatttagtgttcaaattgtaattagttacatttaattatgggtggcatagatgcctttttgctatgagactaatggagaaatgcaaattctcgccaacttttcaaatgaaagtgttactttattaaatgtgttacaatgcagaccaaaaaatcaacacgtgatttttacctacaaagacatagtatcattgctcccactctagtaaaatcaggtaaatttttttaaatgaaatattttaatccagatatttaatcttaaaattcatttataagttggaattctttctcttagtattgtgataattttcccttgattttttggtatgtgggagtaaaacccccttttgcctcaactttttccctcctcagtcttatcatttagtatcagtcaggttcagggacttccatagattagcaaacatattgatcaaggggtatttaaaatggtttttgtgtggttactggtgaccacattgacacttacaggtaattaaaataaccaagtagagcgatctcccaaattatcatatattatgctgactggtaatggctgtgtatatacggattctgtagacaaatgaaagtatatgtatagccagtctttagggtatatcatttcttttatcttttttttttttttttaaagcttaag

SEQ ID NO: 71692 - DNA, 1040 bp, Homo sapiens
ggtcagggcactcgtccctgccttcccaggttcctgaacgctgaggattacagcttcgactgctgctgtttaatcagctggtagcaatttaaccattacaccccagtgagagaatcctagacatttcctacaggagggggacgggaagactaagatgcaaggaatgcagaaggggggtggtgtggagacacaaaacagctttattaaaaagaagaaggaaagagaaaaggaacatgatgtgtcattgtatctcagcttgaaataaagctcccagggctgggaaggagaacgcagacccctggagatgctggggagaggggagttggagggttgaaacagggaagatgggtgcgggttgggtgcgggggaggggacatcagagaagcctggatgtgggatgtgggaagttttgtctcctgcaatgaggggcggtcccaagacctagagaaggccctgccccatccaagccttgcccgagatggcccctcagaaactggaaacaacagagcagttcagcgaggagagactcacttttgcaaccactggtccgtttgtaagtgcgtggaaaatgagatcggtagaagcgaggagagactcacttttgcaacctctggtccgtttgtaagtgcgtggaaaatgagatcggtagaagtgaggttctttagcaaatgcacttccagccttcaaaaaatgaaaacaaacaaataaacaaaacttctccagccaactttcttttctctggtcccaccgtgccttaagtgcctgtacttgaagtctccagctggctgctgccctgagccccccaaagccaggcaagagccacctgtggggtgtaatgcagagcaccgggaacctccgtggaaggcagccctgggagaaagcaaggatggagtttggggcgtagaaagggagccctgggagaaagcaaggatggagtccagggcgtagaaacctgccctaagatctggggtttcagatttgagccccaggccttccttggctcactgagaaaactagggcaggttgctgaagctcctctg

SEQ ID NO: 71693 - DNA, 1047 bp, Homo sapiens
actgagtcttagagacccagctgaggtttgtgtcttaatagaaggcaccccagttaggcatagagttaagttgaaggagtgcttttcaataaagccaagatttcccttgaaaaacagtcttgactcttctctaatacatgccaaaggcttgaataagaccccaaaataatgtactatagaacaggtgtcagcagatgttttctgtaaaagaacagatagtaaatatatgatggtgtgtggctgtaacatatacagtttctgccacaactactcagctctgttgttattgtgcaaaaatagccttacacggccacagtcggattcgctgccgcagcagccgccacccccaggagccgccgggaccctcgcgtcgtcgccgccgcggcccagatccccacaccatgccgtcggagaagaccttcaagcagcggcgcaccttcgaacaaagagtagaagatgtccgacttattcgagagcagcatccaaccaaaatcccggtgataatagaacgatacaagggtgagaagcagcttcctgttctggataaaacaaagttccttgtacctgaccatgtcaacatgagtgagctcatcaagataattagaaggcgcttacagctcaatgctaatcaggccttcttcctgttggtgaacggacacagcatggtcagcgtctccacaccaatctcagaggtgtatgagagtgagaaagatgaagatggattcctgtacatggtctgtgcctcccaggagacgttcgggatgaaattgtcagtgtaaaaccagaaaaaatgcatctcttctagaattttttaaacccttaccaaggaaaaaaaaagggatgttaccaactgagatcgatcagttcatctaatcacagatcatcaaacagtagtgttcccacctaggagtgttaggaagttgtgtttgtgtttcaagcagaaaaactgagctccaagtgagcacattcagctttggaaactatattatttaatgtaggctagcttgttttcaaattttaaaagtttaaaaataaaatactttgcat

SEQ ID NO: 71694 - DNA, 1925 bp, Homo sapiens
tcctcccctgttctatcaatagaaacccaacgttgaggcaattcctaaacagacgcacctcgtagcttgctgtatgtgtttattctttattgctttcagctttggggctgtaacaggtacaaatatttggtttccctatgatttatagagaagaagaagaaacccagctttctatcagagcactgcaagagaagagtcttacacctgccctcagtgggagatgagaatggtcattatgacttagagaatgctacacgtgtaggttgctggtgtgtcctgaatccacaggcataaagcactccccatttttcctactgtaatgcagattctccggctcaaggtctagaatatttgatcctaagatcaagacatcatgcccttcgaatagtactgctctttgttttcaggagtcacgtgaacacacaactctcctatattcctcacgaacctcaggattgagcaaggtctttgtaatttttttggttcactttattgacctgggagcaaggtgctaattctgtggtcagtattcaatgtttttttcagtggagctttttctttgggccatatttgccttctaatacattcctgcaatatgtagtggtgatttcccttagcttcctcctactacctcttatactcatctccccaaattatttgcctcccttaaataagttttcctagaaggtaagctggtcaggcaatttgaaaaatattagatcccaagaaatctattccgtttgcattggacttctcggattccatgtgtttgcagcaggactacatcgaactctgatgtgccggattgtggcatgtctgcatgtctcatccatctattgtttttggtaactcagtttggaatttcagtgtctgtcttccctgggttgacattggaatcagcctctcctttgagcttattttaactcttgagcaacataacatagatttaatgtgaacagtttataccaaagggcagcctgtgcctgtttatggatcctctctgcctttgtacttgaagagcgcattttacatttccagtcctttcacagacaggagctccaaccttacgatggagaattaaacttgcttgtatttccactttgtggatgaggaactatgagaggtggagtgacttcctgggtccccgctgagacttagtgacagatcccagacaagaacttcatctctgactccaggtctagtcctcttccccctgtctcttgccaactccagccctgacaccgtgggcgtctcccctgagagcagatatatttcaattgtccaggccaaaagaggggcgaggcggcataaacacccaaattaggtggaggatccaaaagtcattttcatttggctgtggaatatgttttttgtatttcaatcagctaggggtgtgttcactgtttttggaaattcacagcgcttgagcctccataatgaagctgggctgcagagcacctggcacgtgctccaggctcccagctcccaacctaggacctctccctgccctccactctggttggtttgtggttccctcgaccgagggtttctagaatcagggaccttgtctaagttttgtttgcccagagcccagcgaagtgtgtgatacaccttgggagtttaggagatcacaaaagggatgaaaacacctttagaaaacatttcattggtggggcgtggtggcttatgcctgtaatcccagcactttggaaggctgaggcaggtggatcacctgaaggcaggagttcagaccagcctgaccaatatggtgaaaccccatctatactaaaaatacaaaaattagccgggtgtgggggcgtgtgcctgtttttgtgagactctgtctcaaaaaaaagaaaaaaatattgttaataagtgagtgttttcggctcaagggaattgagtcatacgttgcatctccccca

SEQ ID NO: 71695 - DNA, 1073 bp, Homo sapiens
agtctggcccttgcccagagcctgtaatccagtgggaagaaaggagagggaccagcgtgggttgagtactggttccaatctaagctccacattcaacccgagatgctgcaggaaggtgactccacctcttagtgccccagtgtcctcagctcaaaatgggatttttttttttttttttttgagaaggagtctcactctgtcacccatgctggagtacagtggcacgatctcggctcactgcaacctctgcctcctaggttcaagtgattctcctgcctcagccttccgagtcgctaagactacaggcatgcaccaccatgcccagctaatttttgtatttttagtagagacagggtttcaccatgttggccgggccggtctcaaactcctgacctcaagtgatctgcctgcctctgcctcccaaagtgctgggattacagtcgtgagccaccgtgcccagcctcaaaatgggatattcacagtacctacttcatagagtctttgggaagacaacatgagttaagacatataaaatatacagagcagggcctgcgtgacatctaaagccaggatattttagccactattacaaagaacatccccctcttgggggatgttggagagcagtgccactcaaagtgttgtctcttcaccagtgccagtttgagagccacctgttgtctgtctccagtgagttaagtacagaaactgaacatgaggtttcacatatctggtcatggataggtttacactactcagctgtagagtatggatggagaactgtaactgcagccaggatgtctgggttccaggccacctctgtcccttaatatttttaggaccttccacatatttgcctttctgtgcctcagtttcctcatctgcaaaatggggtggataaaagtacctgcctcataatgttagtgtcatcatcactgctgcaccgcagggtctgtaatctgtccattatctcatcaaatcctgccaataacaccatgaggaagggaacaattcccattttattcatgagaaccctgaggcttccagagataactttatttgcccagagtcca

SEQ ID NO: 71696 - DNA, 1042 bp, Homo sapiens
ttttaatgcttgtttttatatgagatttgacttcttgatggacatttgtattaggaaattgaagcatgatatatatgtatatattgtctccaccatctctcctgttgtattacttggattgcatgagatagtggggtggttcttgttttttaaaaaatatttccacagtgtgcaaagtgctggcaacatccctccctctcctccaccgctcccccacttttctctggctgccaaggagtcattgattttgattagcttcactgcagagcgtctgtgaagagagagagagagaaagggagggaggctttgaaataaattttaaaaaagacctcatatcgggtttcagcagacagcagtgtgtgtgtgtgtgtgtgtgtgtgtgtgtgtgtgtgtgtgtgtgtgtgaccgtacaagcagagggaggcctctgagatcatcgtttaggtagcttgctgcataatgagatgaagagacttttgcctcttcatttctgatggtgctgcttgctctcagagagtggggagccaggaaccgctgggactggagcccccgggacttcaacactccgaatgagatccagtcctttctggaagcttctcacccccacctgatctcccacaaacaaatacaatctcttcaaatttgggggtccgtttcctattctctttgttattggtgtagcttgagtaggaagtttctctggggagcccattggccccaatggctgctgtccatggtcctaggccgtgcgcatgtcctagaccccagttcctgttttgtttttttttgggttttttttggccctgcgcatctcttagagcccagttcctgtttttttgttcgttttttttttttttttttagccgccttcatttggatactggggacttcttttccacttcttcttcttcttctattttattttgagacagagtctcactctgtcacccaggctggagtgcagtggtgcgagctcagctcactgcaacctccacctcccaggttcaagcgattctcctgcctcagcctcctgagtagctgg

SEQ ID NO: 71697 - DNA, 1040 bp, Homo sapiens
tgatattattctgcaggtgtgaacagtttaatttgcaacacagtagtccaattgtccaccagaattcttccctctatggccagttggatttggctttttgttgttgttgttaacccagttgttagagcacatatataagaatagaaaatattcttaaacagaaccccgttagcgtacagtgactaagttagctgtgatctgtgaagtcaggagttttatggagctcttacatgagaatgacaatagatggccagtagtttgtagaattggctttgtttcatcaatcattaaaattaaaaccacaaagtaataaaaataagtagcactttcatttgtttcttggggtgtttttattttgaaacagggaggaaatccttctgtggaatgtcctgctgctttatgattttattttagaggggcttgctttttttctctctctccatctctcttttaatctaggtgccttgggattttagtgaaattgggccagttatgtggaattggcaccatgaactaaatgtatgcccttggagaaaacctgtttgcttagatctttatgccaaattggtaactgactaacagtaagaaactctgttactgggaggcctttgagatttaattatcccacaaaccatgccggagactgattttgctttgactttgcctcctttccatatcccctcctcttttttttgcttttgaggctttatgttttgaaaactgaagtcctgctacattagtttgtgatctgtgtgtacttttgatgctgaggtctccagctccttcctttcaatagttgtccctcgagggacttaatctctctgtgggagtgtttcttgccgaaacatcttgaaaacagtgtagcttttagtaagcaaagttacttgttggacagttcattgaacaggtttgtaatcttgctatttataattttatgttcatctttttttgtgcccacaggattcctggtatttaaaggagacaattttttagtcgataacaatgatacagttgttggtttcaaaattacaaattggttt

SEQ ID NO: 71698 - DNA, 1078 bp, Homo sapiens
aggaacacatgttacgaaccaactggaaggtgggcagtggccaatatcattacctgtgaaagaatagcctgcaaggacatgggaatccaagctttcactcatagcctgagattaattgccaacagcgaagggagaggggtacactgagcctccccttcagctgttggtgacttgttgcccattttgttcaccattagatgatctgcctctgttttcagcctcaagatttgggaacatcctcttattctgcaggagaggaagggtgagattgggttgccagccacttcctctcggattgttagggtggtcagaggagtgctctgtgcagcccctttgactttcaccgactctctggagggacccagaaagcaaaagcactacctgcatacaaaagaggagctgaaaatgtcatttctagtaaatgtaagagggagatgattaaacatctctaagcactgtcttctcttccctcacataacctattggcgtgcttccataacatttatcacttcaaagtctctacggaaatattagatcacagctaagaatttgcacagtgaagtgtttccataggagataactgtcaagagccgtgttacataaagctgtttgaggcatgacgagacagcagtgtggtggcagtgtttctttctcacctgggaggctggagattcaatggtagagaagggatggaaccattctctttactcccataaaggtcaatcctaatagactttgagattaacaagcttttgtgcattactgataatgacaaattgcctatgtgcctgtctgtccctactcacctcctaacctgattagtgaccaatacgcttgatctgggcaacctcacacggtttctagcaaagtcaataagagcagtgtctctctagttcaggggttctcaaccccagcactagtgacatttggggccagctaattcgttttgtgcggggctgtcctgtgcattgcaggctgttgagcagtatctctggcctctccccattagacgccagtagcattctcttcctcccccaagtcatgacaactagaaatgcccctagacattgctggatgt

SEQ ID NO: 71699 - DNA, 1151 bp, Homo sapiens
cattaaaattttatctggtggttacgatgcttgttttctgggtcagatcttgaatcccttttcatttgagacagcggtgtttgtggttacctcattcccaatcaatgttgaattcaccaggctttctacagttatgtatctccaaggagcttcttaaagagacagtggccaactcaccccttctttctcttgtacttacctcgtgtttctcttattcttcttttttccttcccttttctctttcttttgcacaagtggagtctgttcagaggcttagttttatgtacctagagctaaactatgaagcatttttgcatttacacctattaagtacatttcacatcattgatggagagcagaatctcttcttctcaccttttcagctctctatgtaaatattcctagtttggggccatgctgcataggcccagactgatatttattgcagtgaacctcatgatggacccagtcatggttcttccctactctccttttcacataaaaccagtgaaatctgaaaatagtcactcgttgataaacgcatttgacactcaaatacccatcatgtgaacaggacctggtgcctgtctccctgaggcttgtttttccagtggggaaacattctttccaaagcatttgattgttcactcttttgtccgtgagtctttgcttactctacagtcttacaaataatttctagttaacttttcctgacattcaaagctctttgacatttctttccaagctacctttttccttattacacttttcaagtgtacctttgttttttccacactgttctatttagttacctctgactgcatcatttttttagttaagatacagtcatatgctgcataacagcgttttagtcaatgatgggccccatatatgacattggccattcatgtaccctaggtgtatagtaggctctgccacctgggtttgtgtaagaacactctgtgatgtttgcacaaatgataaattcaccaaaggatgcatttttctgagtgtaaccctgtcgtttagtgacacgactgtataattcatatgccataaaattcactctttcaaagtgtacaattcagtgattttttcttagtagatttacaaggttgtgcaaccaacaccactatctaattccagaacat

SEQ ID NO: 71700 - DNA, 1055 bp, Homo sapiens
cgtatatatttgccctgaatttaaaaatattttctgttcgggaactgaagccctcaaggatcgtgtttccaacactcgcttagttttatatgtatgtgtgaaaaataaatactgcctatggattactttgagactgttgagataacagatgctttgtaaataacataggtataaggttgtgtgagataaatgttgcccatatatacttactaaggacatgcgttccatttttctccttttttaaaaaaactttttcccctaacagttttcctttaaaccttgttttgtatagattttctgctgctagttattgtgacattggactgtttcccataaggaactcgatcattacccgttagggacctctttttaaaaatacttttaaatttatttattttctgctgtgaggtatacatgctcttctggtaaataagtctgaggtaagatattgataagtgactagaggagagcattacatttattatatctttaatgaaggagctccagaatatccttgataaatactggtgaactcatgactgcatttatccatctctggttctccgaggaataatgggaagggccacagctacaataactctgcataatcatcattgactctgactctattgattgtgattaaccaagatgtatggaaaacagttttaagtgtgtagtgcatgtatctcataaggtccattaagacgttcattatttttcaattgatgcgtcttaagccccacttgatgtttgttgtagtgcatttccacagaaggattctgcactgtgggattgagttcattttgttaattgcataatacaaccccatcgtgtttcatagaaaatagtaaatactcttgcttttattgattggtattctttgatattactgaagaaataccaaagaagcaaaggagcaaagaaataccaaagaagcaaaggagcaagtgaatagttcttcaaacttttacatattaagggcacgaatgtttcttgaaatgtggacactgcagttttaggagcctctgcctgattgctcagtaggctttaaacca

SEQ ID NO: 71701 - DNA, 1030 bp, Homo sapiens
tcctctttatatggtgccatcaagcacggcaaagtggcttatccacctccgcaacactcccagtgcaactgtctgaacgcacacatgctccattgtccgggactgtggctgccctgggcggaggtgactatgatttctcatttactgacgtatcaacaatggacgggggtgggtctctccaagctgctttttagcggtgaacagtaggaccatgttttagttagacggctgtagagactaggtacttctaaagttttacttaagattttgtttttagtaaaaaatagttcttcagttgttttgcttgtatcttttgtttgtatgctgatgatgacatttggatgtgatgacatggcctttgaatgcagtaaacaactacccccctgcccccaacattgaagttttagaagtgattcttaacatgttaaagcattgcttgcgagaaggctaaggcaattgatggattgtggagaagttgatttttttcaaggcctttgttttccagtcagtcttgtcctaaaagtttcaatcatcagttcttgcctggtacctttgcctactcacccttaggtccaggaatctagtcttcatattcagacactttgcaaacaaaacagaatgagacaactttctaacagaaaccaaaaaaacacaccaggtatagtccttgtaaaagatagggtatgttcataaatgtaaacttttttttttaacactaggaatgctcacattttaaacattcagaagggaattaaaacatctaggctgggtgtggtggctcaggcttgtaatgccagtgctgtgggaggatctcttgagcccaggagttgagaccagcctgggcaacatagtgagcctccgtctctacaaaaaatgaactagctgggcatggtggggtgcacctgtggtcccagctacttggcgggctgaggtgggaggatcacttgagccctggaagttgctgcagtgagctgtgcgtgattgctctgctgcatttctgcctgggcaacagagcaagacccagtcaaaa

SEQ ID NO: 71702 - DNA, 1057 bp, Homo sapiens
ttgctgagactttttctcttgttttaccttggcctactgtgcaggagagaagtcgtagagatctttgggcagggggttgtctccttgccctgaggtccctccccaggccctctccaggtgggcatgttcatagtatttgagttagtcttttggcctcagctaattggatgagggatggggccccagttcttgggggaagctgattcatggactgggatgggctggttgggactcaaactttgttgcattcttggagtagaagacctcctggaatggggacagccacctttctccatgtacccagggatgagagaaagctggtttccgaaaagaagaatgaaatagaattgcagagagaagcagagataagatctgtggtgcacacaagttacatacactaccttggttctgcatgtcttcctggttcctggttctgatcccttatcacctccagctgtacttcctgcccttgggctccatgaagtagcctcattcctttccagtcagtttcctttttatgtttaagccagtttcagtgggtgtctgtttcttacaaccaaatgttccattgctgaaacatatgacaagcattaagcaaacctttattgatgtacagccacatccagcactgtgaattccttaccatagggcatagagagggaaaaggacacagtcttgccatttcacaagttcacagtgtcaggagccaaatccatttcattgctaggtccgcagtatgataacacttgacctttcaaatgaatttatatcagatttaaaaaaaaatacctatttgagaagtgaatttccttgaccctgacaggcattaactacttcttccttagtagttatgcaataaatgcagacttggttcaagttaaaacatctagaaaagtttgctgctccttttctggggtcttaaaatagtgtgacagcatgaccaaaagttaagcttattcattgttccattgtgctttgtgtatatctctctgtgatcattgtgttttatattttagttattaaatatttgtttctctccagtgtgtgttttatgaaa

SEQ ID NO: 71703 - DNA, 1256 bp, Homo sapiens
cccaaagtgctgggattacaggcatgagccaccacacccagcctaaagttcttatataacatgtgaaatgatacactattacttgcaggtagactgtgataaagacttatgttaaaatccaaaagcaacctctaaaataacaaagagttttggctaacaagccaacaaaggaattaaaatggaataaccacatttagttatcccaaatactcaatccaaaaaataaaaaaggcaacaaaagaggagaaaagggagcaaagaacagatgggataaatttaaaaaattagcaaaatggtagattaaacccaaccttatgaataatcacagtaaatataaatgatttaaacaccccaattaaaagcaagaccaactacatgctgtctatggaaaacccactttaaacatataaagacacaagcgaaaagatgggagaagttctgcatgctaacactaatcgaaaactggcgtggccatgcaaagtggatttcaaagcaaagactatagtaaccagggataccgagggactttgcctgtgataaagaatcaactcatcaagaggacatacaatcctaaatgattttgcacctaaaaatgatgttgaagaactgtgcacgtgatatcagccccccgacaagtgaggatctgatcaagtgcgacactttataattgaagtaggggaaatcgaaaaagatgaagacacaacaggctttcaggagagaaagatttgaccatttaattgatggagccctggatttttttttttttttttcccaaaaagactcttctcaggatagctctgtgctactcaaccttgtggtgaaggatattttattgcataaagttctgttggaaaaatgatgccagcaaagccaatacttgattaataatgaaaaatgtgtttatagataaactccatgtgtgcttagagtgagctgtggttaaatagcttccacgcttggcagcacccagggtgagtgtgatggtgtacgtcagttactcattgagctcatagttattttatgcacttacaaatgcagccgctcatcctgcacttttccagctaaattccagcccaacttcatgacgtaccaagtcatgacataacaagtggctttggaccaagttgtttaaccgctcggtgcttctgtttcttttctgtgagaggagtaaaatggtgcgcctcccaagatggaagtgaatgcccagtgagaggagacacacgagtctctgaagactcagaagctctatgcaaatg

SEQ ID NO: 71704 - DNA, 1011 bp, Homo sapiens
ggcagaggcaggaagattgcttgaccccagtagttcaaaaaagcagcctgggcaacatagtgagactgtgtctcagctaaattaaaaattagctgggtatggtggcacacgcctgtagtcctgtctatttgggaggctgaagcaggaagatcacttaggcccatcagttcaaaaatgcagtgagctatgatagcaccactgcactccagcctgggcgaagagtgaggcactgtttctaaaaaataaaaaagtaaaataaaatattgtataaaattaccttcaggccatgtgcatcaggtatatatgaaacgtaagtgatttcgtgtttagacttgggtctcatttccaaggtatctccgttaaaaaattttcctttgtgttgcatgtttttaaaataattgaacatattaagtaaatttaaaattgttacctgcattgtttcttgctgcatagggtttcttaatatttgggatttaaggaccggaaagtaccctgttcatcgttttgagcacgatgcaagaatacaggcactagccctcagccaggacgatgcaaccgtggccacagcttctgcttttgatgtcgtgatgttatcccccaatgaggaggggtactggcagatagctgcggaatttgaagttccgaaactggtgagctttttagtctggtcatcttattttctattcttagaatctctgggtctaatgtaagcacgtactaatggtgttggtaactcccattcactcagagcttcctgcgggccttacctccataagtctaactacagccttacaaaataggtagtagcattttccccatttaccaagaagccacttcaggctgcttagagcagtgaactgacttgccccagttctcagaggtaagaagttacgattcaaacctcagggctgacttcagggccagagctgctcatcactgtggttccttggccttcttcagactaacacggtggaatctcacccttgggaatcaaagatcagtttgacctaa

SEQ ID NO: 71705 - DNA, 1080 bp, Homo sapiens
acatctaaatgtattttttgactgggtaatgcattcacctaattcagggatcaaaagataggaaggaagggtatgtggtgggaggactccttcccactccctccaacctgccacccagtttctctatctggagccaaaccaatgttgccagttttttgtgcattcttcctaagatagtttatgcacttataatcaaattaccatatgtggtctcaaccccactttaaacaatgagaatagtaaagtgctacatttttgtctgcagcttgctttttcctgcagcagaatcacttggagatcatttctatgacataacaaagaactttttcatgttttggttttgatttttgcaactttataatattacactttgtggatgtgctttaattaatttgctggctccctacggatggatgctagattgctcctggtgttttgctattgtaaacaacacttggtccacatgaatgtatttgtaggatcatttcctccaagtagacttgctgggtcaaagggacatgtgcctccatgattttgatagacattgccctccacagaagttgtaccttgggcagtggtggatggcagggcatccccttcccctagtggttcttggacggcttttctctgataggctttacagaaagatcacaagatgaggccagcggggatatacagagatctgactggtcctgcccttcatttaaattatttttcagctctctgcttttagagtgaatgactagaacacatgacttcatctagaatcagtgtagcatgactgacagccctatccggccagtgtcgtggtggcaagaaagatcggcagcgtacgcggacatgctccccttctgggcttatctgggacccatttgaggaagagcccacaattcttttaatctgacctgcctcttctcttctgtaaaatgaggagggttgaacacatgacctttgggctcctgtcccaaaccctggattctttaagccatgtaggtggtttaaaccttttggctgtggagttgtgttgagccagtccactggaggatgctgagttgctgagggcttctgaaatgggccgag

SEQ ID NO: 71706 - DNA, 1989 bp, Homo sapiens
tagtagagacagggtttcactacatgttggccaggctggtcttgaactcctgacttcaggtgatccgccttccttagcctcccaaagtgctgggattacaggtgtgagccaccgcgcctggcccccaagaattgttttaaaagaatgcatttatggtagaatgggacaggtcaatttagcttccatgcagaactaatggaataagctaatgtgaatgctgtcacttcatatgaaacccttcaagatgcgaagccttattggagagggctggcaccaagtcttaaatgtcttttgtctttattcacacttgcctagttcctgtatgccaataacatctgtaccattttctaatttttaaaggaattattcagtcttcttgagactctaagtttacagaaccatttagattgaagaatatcatgttcattgcctttcttgtcttttggctttcaaattaagcttagaatgttatttagaggctggtttttcttccctgatggtttatgtggaattgccttcctggtttaccatcctataccatggaagagaatgaacttagcgctaactccatttatttcaccttcacagatgtgtatggctttggtttgtttgtgccaaataagcctgggagtaaacactgcccaggcattgttagtgttaaaaatcagctcgttctccagttcatggggagctaagggagccctattagaaatgtttgcctttgttccagaggtgaaaacacgaaaacactagtgctgcagaagaggctgtgtgcttcccctgcatgtccagacagttgagactgatgctggtttggggcagagtaggagcaagagggcactcagcaaatggcctatgtgagttgaatttctgaatatttaaaacattttactgttttcaaaatacacatcgcagcttagactcacaaaatattaccaagtagagaactttcactttttattcagtacatagatgactatgatttattaatttcctccgcacttcagtcttctatagggcactgtgttagagagtgggtttgtaattaacttatcaattactgagttgcagatgaatccttctaatggacgcaaagttactctttaaagcattccctcgatgtgttattaatttacagggtaaatcccctttgtagagagcaaaggaaaactcctgctcagcccacatctgagcggtcgcatcccaaactaagggactcaggaagagccatgaggctgaaggtgcattaaaatgaggaagtgggctgtgtccagagagctgctctgctggacctggcttccagccttagcttgcctctgctgcaggagaactgtgccagggacgtgggatgaccgactggccccaaactgaattcctcatccagatttctttgggtctttgcagggttaggccatctggcccgggtggcttctttgcactctgctgtttgcttgggtttgaactcttactgtgatctcatgatcacaagttttaaaagtatgttgaaaatgacatgaaaataatccctccccgagcgcatttccccttcctggctcgcccctgccctttccccacctttatactcttgtggcacctgtccacctgtcagtgcccctcctcacggtccacttcaggttttctcagagcactggctgcgtggcgaggagcatgggtaaggccccggtgcccatcttcagcctggccttctagactgtggggagtcaggccccatcttagctcctagctctctagtcctgtgcttccagaatgagacccctgctccagccaggccagcgccatcctcaatgtgccacattcattcctgaccggggactggcactagcatcccctcttcctctcctgtcttgccatgtccttttgaaaaacagtcctacttaacagaagcagccttacaaactatctgcctctcattgagcatcagagctctggccctgagcttgtacagaacacagggtctgcatctcattt

SEQ ID NO: 71707 - DNA, 1136 bp, Homo sapiens
tggggtagaggtttaaagagtatgagctttgataccacccacccaggtttgaatcctggtgccaaaacttcctaactgggcaagaggtttgagctccttagggccccatattctcctgtgtaaagggagtaaaatcatggtacctatcttacagcactgtggaggtcaggtgagataacgcatcatagcagtgttttgcatgtaagagaatattataaatattagctgttattaataactattttggtaggacaggaaagacattgtgatatggtcacaaagtggcgcaggaatgacacgagctgcgctccacctagtgccacctcagctccttttgttgcccatgtaatttggggcaagctacttaaaattatttaagcctcagtttcttgatgcacaaaatgtaggcagtagtatttgtcttctctccctcttggtggttgtgagattcaaatggaaggatattccgaaggaatttgtgtgaaaggcatgtcctgggtattacaaagagctcatatgtgtagtgtttgtttatgtgcaaaatgctgctaagcatgtctctgccaatacctcatgcaccatgtagagtgagtagaggccgttatgccttagggagctggggggagcccctgggtggacctgctgccctccaccaaaggccctgattattcgctgcggcttcccagtctccccctggggctatttgtttcagtgatctgattttagctgcctgcctgccctcttctagaagcttttgtccagtctaactttgggccaaactagaagttgccaggctagtcaaaagaaaatcgataaccaagctagtgtaatatactgaatttcatgtgcaatgttcactaagtcctgtcggcatacagatacttgtacattatgagcatctcatggtaaccttttcattttcaaaatagtatgcaagttgcctttaattttaaagagttcacttcatagtttgcagcctcagttttcactccgtaagatagatattataaccttctcttggtgattatttccgtgtgtcagtgttcctggcattttgacactgcccatgctctctgtggggatgaggcctgttgggagcatgaaggagggtgtaaggattttcagctcccagtcag

SEQ ID NO: 71708 - DNA, 1050 bp, Homo sapiens
ctttactgtaaggccagcatagcagtcgcctgtaaggggtagatacacgcagacatgtacagtgtgtattcatctgctcattctttcatcacctgtatactgagcccctcctatgtgccaaacactgcacaggtatccaaaggagcttctgttccttccagacagtgcggggggcgcaccctgggcatctggcatcttccatggttatggtactttttcctgattcatggcatttgactggttggaataaagactaggtacagattattctatgtatttaacccccaaatcaacattgtttttgcagacagcatctggattcttttatgctcattacttgaatctttgttgactatttcttccagcacctcagaccttttttctggaatgattttctgtctcccaaaagtgcattctttagaagtttctttcataaggacttggtcacaagtgttttccgtgtttctttcttacagcaccttcatttcatccttatccttgaaaggtagttttgctagtcttttacagttctagcttgacagttatttttgctcagcctttgaggatatgactggttttgccttccactgacactactgacgagttggctgtcagtctgtcattctcttttaggactttctctccttttgactgcttttaagatcttctccttgtctttaattttctgtggtttcatgccaatgtctctttgtatgtctgggatttatttatttatttttatactgtctgggatttcttgtgtgtccctcctttcagttgtagagaattcttggcccttatcttactggaaatgtatcgcgatgctctgcgtggagctcaggggaggtgtgcatgaaggcagcttctcccctcctccgtgctgctcactgcccattcagatttcccatctctctgtctgttgcattccgcccaattcctcaactcggtattccagtccacagtttctctctcggacttatttcttgcttatctcatccattgactttttaatttctagaaattctctgctttatttttcaaatctgctta

SEQ ID NO: 71709 - DNA, 1102 bp, Homo sapiens
ggggtggcttaatgcctggtggtggtttaatgcctgtagcaggtatttgagtatgaagactcagtattttggtaaaattaaaacacagagttcctttcctcattcatcagtataggaccaaaattctgagagggtaaggctctatcatctcttcacagtgatttcagtatgcaagtggttcatgattaattatgagggtgatagcccccaatttaggaagagcttgcagtgttaatccatttcttactgggtgaaggaagaagttggtctgccttgagctcaccccgcctcccacccccacagggacaagagccatctctcagctctttccttcacagtttgcctggaaagccagtccaggccacacctggatgctgcggggcccgcctgcccacggcggtggctgatgcctcccagttgttgggcctgtagctggtgtctccttcctgactctggaccaccgcccctgctgcttaggacaccagctgccaggacatggctagaagatgatcggtgggtctcctcagagaggcaggccccgtctatggaggagcaggacagctgacggtcaggccccagctggggaagaggtgggctctgtcagctggcagcaggctgggacttctgcatgtcacccagcgtccctgcacgttcattccagtgcctagaagatgattgataaatatctgttggccagctcttgaatgaatcacagcattatttattttatctaaaaattataaacaatccatatggagttgtgtatccacagagaaattctacacaaccattaaaaagaacaagatctatctataggtattgacacgtagggaaaaggagttgtgaaataatcccatttaggaaaaaaatgtgtatacacacagaggcagatgtgcagaagaaaagtcaaagtatatatatcaaactgttaaaagtggtgatttgtgagagatgaatatacagagggctaccacttcctttatagaattctattatgttagaatttgttgtaagatgtatcatatttgaaatcagaaaaagatttttagaaatagatttcagatacatcagaatcattgacaaaattgcaagttaagattct

SEQ ID NO: 71710 - DNA, 1034 bp, Homo sapiens
ttgctctgtaattactgttcaagtgcttctctaatatatacctggtacttaaaaggaaccatcctcaacatcatctttggcagctgcattagtgcagaatattttctccgggatttgtgctggggtaggtttttccagcatatctgtacacctctgagaatgagtcaagtggtcatgggttgagactcacccaactagggcaataaagagaaaaattagtctaatgcatggtcttaacaagagggagagtgtgagcatgaataattaatctcactagtctatggcaatcagataaaatgaagtcccatttgctcaaccttattaaaagagagagagtgcgtgggagggagggagaaatggtaaaggtcgttaagggactcgtaacgtggaaagaactgcctttgagatgggtaatgtgttttctaatctctgtggtctttaactaaacgtcatggtaaaggtactcttcagatagttcggattcgtttgaattattaaacattttagaaaatactggactctggactactaacttagatgtctttatgatgaatttgcagagagtctttttggaaagggattacatctcactatatcactaagaaataatttatccacttgtcaaaaaagaacaactggaagacataaagacacatggacctactcagtatcagatttcagttcttagatttaccatcaacattctaccgacttaaaggccttaccttcctgctgcagaagttggagtattttaaaaacaagagaacacttgaaagtggatgcagaatactacttttataatagaacgtgaggttgctctttttattttctccctccaggtgccgattttatataatttttaggttattctctgatgataagagatttggttatttctatatacttacttggaagaataaatttactcttgatattttaaaattgttgaaatgttctgcgtcagaaatttttcttttcaactgcaattgttctctgtagtctttatggattaagagggcattttaaattttgaa

SEQ ID NO: 71711 - DNA, 1055 bp, Homo sapiens
aataggaagcacgccctgagttgtgaccccccaattacagagtctcagtgcttgcttcttgccctgacaaatataaagttgtgtgctgtgctcgtgctactgctgcctgctgttagagagagagtgattggggcgtaaatgttgcatttgctccatctgcaagtgttataataagttattcagagctcttaacacaggaccaaccagagcgtgcctccctctcggttccagcacgttttcctgcccatcagatggatgctcctctgttggagtctttggaaggttctggtgtcttttgttttaattggtgggctaccgccgactcctatggtgtgattttcattagagaggggctggagagagggagtgttggaactgtcctccaagcccaaccatgaatattaaacataatacaattacagctttcagaccaattatttttcctttcaatgggcaaagttgatgaaatactcgctagatggggattcacaatatctaccattggctcctctttgtccctggaatcggttgtcttggcatattctggtgcccatttgctgtgctacctgtttcccagcgtcgagtatttggtttgagtgctgagctgacgacgggctttgccaaggcgcacggcattcgggcctgtgctgcgcgctgtcagatgtccgaggcagatacctgtttcttcatgtgaatctgaatggcttgggtggacttagcacactgtgctgtctgctgtttctgtcgacgagaagccagagtggtgcttctctaaggagatgtcagaaaaatgtttttcctttttcccaggggggagaaattcaaggctggtttggcctatttttttttccttagtgatataaaatacactgaggccgcatcttttggtttatttgtttattttgtttggagccatccatgctggtatctaaatacaataggaaaacagatggcaaactttgaacttctggaccaaatttgtgtttgcctttgtctccttaacagccaaactgtaaattatggagtataaatattcaacagaggagctctttatg

SEQ ID NO: 71712 - DNA, 1012 bp, Homo sapiens
cacctccttcaggctgctagagttgaggtgccccagtcattccattcctgtccccatccagggatgagagggggcttgctgcacttgggacagggtctgtgaggccagaaatcccctcgtgggcacgccccatcggccagcagataacaagagccatttctgaaccacctgcctccagcccgaggcacagaccgcagtgcccagatggtggggctgactgagatccgtgcccggggcagcaaccctcggtctgtgttgatcaaaggccagcagccccacaagacgcatcagcctgccccttctgggatcaggtttgcaccaactcatcgccaaccctgatcgttcccgggatgccacagacaatgccaggagccgggcaggagagcgccaggtgatttctgcatccacgctctggcggaaatgagccctaaccctgccaattagaggacaccctcagtgattatgcacaaatgagctttcttctgagcagtgtggactgggctcacggtaactcaacctcattttaattagctgtttagataagcggtggcccaaagcttcaaagacatcaggcaggcctcagtggcccaaacaggggagcacatttgatgtgtgcccatcgtggccacatctcccaaactaaaactcggggcacaggggctgacggaagatgatttatttataaaaacactttacgttaatgaactgcctttgttgaaatgaaccaaatcaaagcaaactgggacagccccagaaaacctgaggcctgcagtggcagtgccagtatgccctcctgctcagtggtaccacagatcgtcctgctcacatgggcacggcagggcaaggtgcatgggggctggaagagggaggttcttgcagtaaggccgatccccaccaggctgtcctagtgactttctaggtgccttccgccagcagccaggggaccaagaagctcccgagcagcaggggaaggcagggagagcaggtgagggggatcacgtcccacttccct

SEQ ID NO: 71713 - DNA, 1012 bp, Homo sapiens
cccttcttggagtatgacagggctgcctccttttgtattgctttataacatctcatcacctggatatacccattttgtttttgcactcaccagttgttggacattgagtagttgccatgttggtggttgtgattgtgaatagcttgtggtggtttttcatgacatgaacaacctcacaagggaggacatcccgttgtcacctctgtatcacggaggaggaagcagcctcatgagttcagggtgacagctgagtgggatgcatagcagagactcacagcagcctcccccggcagcactgtcaggagctcacctttccatccagcctggctcacctctgtattccgggatttccccagtgtttgggttgagtcctggccaatctttcaagaggtggcaagcaggagagagctggggtcttggaagtcactgagccccccagtgatgccccttggtgtcctggggctggcatccaggctggcacagctggtggggccagtgggaggcagggtggcttggggagtccctggggcacgggagaaggctctcagctgtgcttgcttcttccagtggggccttgccctgagcccttccaccttctgccttcccgaccctcaccctgggcggctgcacctgctgtctctcagtctcatccacacccacgctgtctattgccgggcacttcagatctcgttccctggcttggtgtcctctgtagactcagggcaagtccaaatgtcctggactgatagatgaggccttcacgcccccaccaccccagctgcttcattccctgcctgttttctacccacactgaagagcccgaggctccctgagccctgtgtgttctgcctctgccaaggctatgccttctgccagccctgtccaccccacccccagaaccccattgggcatcacctcctgctcccatccccgtggcctagaacctccgctgcaaccctggtgccccttggccagctgaagcagcgtttactgtcctggatcctggcgaggg

SEQ ID NO: 71714 - DNA, 2183 bp, Homo sapiens
tattcactccattcccctgtctgtctgcatttgtctcagaacatttccttggctggacagatggggttatgcatttgcaataatttccttctgatttctctgtggaacgtgttcggtcccgagtgaggactgtgtgtctttttaccctgaagttagttgcatattcagaggtaaagttgtgtgctatcttggcagcatcttagagatggagacattaacaagctaatggtaattagaatcatttgaatttatttttttctaatatgtgaaacacagatttcaagtgttttatcttttttttttaaatttaaatgggaatataacacagttttcccttccatattcctctcttgagtttatgcacatctctataaatcattagttttctattttattacataaaattcttttagaaaatgcaaatagtgaactttgtgaatggatttttccatactcatctacaattcctccattttaaatgactacttttattttttaatttaaaaaatctacttcagtatcatgagtaggtcttacatcagtgatgggttctttttgtagtgagacatacaaatctgatgttaatgtttgctcttagaagtcatactccatggtcttcaaagaccaaaaaatgaggttttgcttttgtaatcaggaaaaaaaaaaattaatgaaccttaaaaaaaaaaaaaaaggttttgaagggaaaaaaagtggtttcacacctcttgttattccttagagtcacttcaaggcctgtttgaatgtggcaggttagaaagagagagaatgtctttcatttgaagagtgttggacttgtgtgaaaggagatgtgcgtgttggaatctgcttttccaagccgccagggtcctgacggcagcaggacgaagcctgttgtggcgtcttctgggaaagcctgaccgtgtgttcggacggcactggctcctttccgaagttctcagtaactgagcccagagtaactgcacgcctttgtgcagctctggagctccaccaactctcggcctgccagttctcaagcgagctaatcttgtcattaatcgatagaagctaacttccgaagttaggacctagttactttgctctcaacatttaaaataatgcagttgctctagtgaatggggcgttaggggcctgtctctgcacctgtctgtccatctgcatgcagtattctcacccatgttgaatgcctgctgcttgtttaccctttggaaaccctggggtgaccaaggtttggaaagccacctgagaccacttcatagcaagggaaggctttaagcagttactagaaagagatggggatttggcccctggctcctccagcctgaatgagctatttaatccactgtccatgttcctcatcagtcaaatccaaagtcaaaggatttgaacctgcatctggaaacgtaaccactcacagcacctggcccgccaaggttgggaggattgtacactactttcatttaaaggggaaagtttgataatacggaattaattaatatgaatgagatgcattaataagaacctgagcatgctgagagttgcaattgttggttttctggtttgattgatttccttttttcttagacacatcaaagtcaagaaagatggttttacctttactgacccagctgtacatatgtatctagactgtttttaaatgtctttcttcatgaatgcttcatggggctccaggaagcctgtatcacctgtgtaagttggtatttgggcactttatatttttctaaaaacgtgttttggatcctgtactctaataaatcataagtttctttttaaaaattttccaaaacttttctccattttaaaaagccctgttataaacgttgaactttcacaatgttaaaatgttaaatatttggatatagcaacttcttttctcttcaaatgaatgccaagatttttttgtacaatgattaataaatggaacttatccagagaaaccacgcaaatggcctgcccaatttcgtttgaggacagaaagcccagccatgacttgagtagaatgtctctcacctctcttcggatctaaatatgaaaagtatgttctgctgaatttttctgagcattggtgagcggacagcctacctgtaaaccatgacctccttgccaaacgttaattttatcagctcactagtaacctttga

SEQ ID NO: 71715 - DNA, 1727 bp, Homo sapiens
aagtgctcagctatctgagtgggatgtggagtagatggatagtagttgatacaaaggtctagagttcaagagagaactctggtctggaaaataggagttttcataatatgtgaaaccgtgaggaactcaccatggcagtgagtgcccaggcccaagtggcccaagcagggggaccagcaaaaggttctagatgcctccccatcttctgaacctcccccagctcaattcctttttcaggctgctcttccatttccttttatgaaagatacaggcaagtaagtctgaagccaggcagataactgttcctcagatttcagtacaactaatttagtattatattacaattcaaagactgctatttccattataattattataagagaatgaaccaattatatttttcttgttaagcaaactacatggtatgttagtgtaatgtgaaaaatagataactgaaagttttcaaatcttaattcttactgactttttgtttccagaaaagctttgacctggaaatactacgcaaaaaaaattctttactacctgcggcaacagaagatcttaaataatcttaaggcctttcttcagcagccagatgactatgagtcgtatcttgaaggtgggtcttttcccatatatgtggacagtagtatttctgtaggtaactgattagttttttaagaccagcagagggaattgtgttccttgtggtaaagaagtgaaaaagcaaatcatgttgcgtgggcttctgcaggttggattatagggcctgatcaatgaggtagttcaaactattaaatttagagctaagattttatcaaagtccactaaagaaatagtgttttttaaagatgcatcattggcttaaaatgtgagagtgatactttagctaatgaagtaaattcctgtttttccgagctttaatgatcatttccaaatcagaagtaaatgtatccaattttgtctccctgtgaccttgagtaaatcccttaacctctcaggttggagtttattgaggacagaatgttcttgggcatcagtgagtctgcttgtccgtaatgaaaggtgagaaggaagaagttgagtggacaggcaagatgaagggagtggagaatctttttgttcttattaagttgaacaggaacaaagtgagacttccattttttttaaaatgattttgaattcctacaatattacacaaacattcccataaattatggttatgaaatacaaatatgactggtcgtttacttttattccctacttctgatgttttaccagattgttgatttttttttccattccagtgtatctcatagtcatgttcccattctgttactattcctttttttaaaaaaaatgtatttatttttagagacggggtcttgctatgtcacctatgctagattcaaactcccgtgctcaagtgccaccacacctggctggcttctgtaactagtctcatgcagtctatggccacctctcctggcaacaactttctgagtaatacttgctttcatgaacattacccccccttccctccaagtcagccaaaataccagtgccagccccattagaaatctagccttcaccactgcatgtgaaacctgcaatgtggacaactgatttcccttttatatttaacctctacctgcttttcaatgccctgcataatctggtccagacctttgctccgtactctccaggatgtcccatttgctccagcc

SEQ ID NO: 71716 - DNA, 1380 bp, Homo sapiens
agtcttgctttgtctccccggctggagtgcagtggcgcaatctcagctcactgcaacctcctactcctgggctcgagcaattctcatgtctcagcctcccgagtagccgggactacaggcatgcgccaccatacctggataatttttgtatttttagtagagttggggtttcaccatgttggtcaggctggtcttgaacacctggtctcaagtgatccgccggcctctgcaaaccaaagtgttgggattacaggcgtgagccaccgtgcctggcctcacggaagtttctgtatctgcccctgatccctttttgtaactctggaaaataatccacactaatgttttgagttcaacaaactattcgatatttatttctggttggggttctagaaatagagccaatctgatttatttcacttttttgttttcctaaagactcctttggattctctaattttaattactgttagttaatggagttaataatttgaaatgttttcaaggcttttcaagttttgaaagggaaaatttgaactttggacaaatttgaatgttttcccctatggagaatacaaatagacattccttagtgtaattggtttctataaatatttattagtgttagaataaacaaaatttgtattttactttggagaagccatgccctggctaaaagcattcataatcacaaattgtaaatgctgatctgaatgtgtttgcacatacgtagattttggtactagctatgtttggtgcagttggtcatggactatgagcctgcaacctccatttctagtccagctggttttgtgtatgttttgaacagtctgtgcctctgtgtaataatgatggattgttgtgttttttcctcagctcccccttttcctgtaccactgcttaattagaagtatgtcaaggactttgaacacagcgggagcatacttaacattaatctgtgggtgggtgattgctttggcccgggatcttggcgttcctgtgttctcagaatgcacacaggttgacctgaaatgttctggctacttgcaaaaagaaaactgagagaagccatagaattttaaactcagaagatcttttttttttttttttttttttttttgagacagagtttcactcttgttgcccaggctggagtgcaatggtgtgatctcagcttaccgcaacctctgcctcccaggttcaagtgattctcctgcctcagcctcccgagtagctgggattactggcatgcgccactacgcctggctaattttgtatttttagtagagatggggtttctctatgttggtcaggctggtctcgagctcctgacctcaggtgatccgcccacctcagcctcccgaagtgctgggattacaggcg

SEQ ID NO: 71717 - DNA, 1004 bp, Homo sapiens
ccaaagggcccaggccaggagactgttaaagtgaaaaggcaatctatgactcaccttgctctgccatccctggcagcccccaccggtgtcctgttcctgccacatggagcttgacttcatgccagctataatctcccctgccttcctttaatcccaatttcccctgctcactcttccacagatataaagaacaaacacttagcatcccacactcaccccttctaatcctgaagggaagcccattctaaactcctttcctgcaaacccatttccagctcctagtagctttcctcccaaaggctttctttccaatcctttatagctttggagacgcctccccaattccccagggaaggaaactgttgtgtccaatccccattaaagacaaattgatcagtgcttcccactccaagtcaagctttatgcaggaatgcttttccatcagggaataaatacttagaagcgcttacaaggtgccaggcacctcctttctgcatgtgcctgcctttctagtagcagacagatggaaacattgtctcattttgtcaaggagtccaaagaaatgattataaaaccaggattcatccttcttctccagaaagatttttttttaagtaaacacctttcaatccccaacacaagctgcttcacaactccaggctagaaggcaggagagcgatctgatgtgtttctttcatttgccagaattcctgataccaaaagcctctctctctgttgagtaacctctcaaggaccagagtggagtccagattgttaggctcagatcaagggtggggaaatactgccctctcgtggtggcttttcatccaggcctcgtagccaaccgtttaagtgcaaaatagaattaagcaatgggtaagcaaaatagggttgacaagatatttgggggttattcgggttatggcccatttatttccctcttccccctgaattgaccagtagcagctccagccccatttcacaaaagtgagtttggccaggag

SEQ ID NO: 71718 - DNA, 1046 bp, Homo sapiens
cttgcggtcaacggccggcccttggtggacctgagctatgacagcgccctggaggtactcagaggcattgcctctgagacccacgtggtcctcattctgaggggccctgaaggtttcaccacgcacctggagaccacctttacaggtgatgggacccccaagaccatccgggtgacacagcccctgggtccccccaccaaagccgtggatctgtcccaccagccaccggccggcaaagaacagcccctggcagtggatggggcctcgggtcccgggaatgggcctcagcatgcctacgatgatgggcaggaggctggctcactcccccatgccaacggcctggcccccaggcccccaggccaggaccccgcgaagaaagcaaccagagtcagcctccaaggcagaggggagaacaatgaactgctcaaggagatagagcctgtgctgagccttctcaccagtgggagcagaggggtcaagggaggggcacctgccaaggcagagatgaaagatatgggaatccaggtggacaggtaagctccacaggggtgtgtgtgtgtgtgtgtgtgtgtgtgtgcatgcttgtgtgtgtgcatgtgcgtctactgagactcagcctcatagcccagaagccaacctgggctgtctcagatacctgtttttgcataaccacttgacggcccccttgatcttcacttaaaattacattcacaagaggccacagggcatagcttctaggatgcttctcttgtcacaaaacccagagcgaattaatcatcatggtagcagacagtgtgtcttctcatctttatcccctataatcctccaggaaacttacttgcatttttgcaatctatgtttcacaagtgagaagacggaggctcggagtggaggctgcccttcctgaggttgcctagcaagtgggaggcgtgtgtgcgtggcaccctggggtgtgtggctctgcaaaaacccttggaagacaggagggaagagctgagccctgggcaacccttagcttaaatcagctttctcctcattgcagccag

SEQ ID NO: 71719 - DNA, 1055 bp, Homo sapiens
ccatttacacaaccacggctgctcctatgcaactgtgacagagccagctatttgcaacagagacgatgtggcccacacagtcaaaaacttttacaatctggccctttcctaactttgctagcctttgatagagaggattggatatggctgtcaggggaggaacaggagcctttgatagagagggttggatatggctctcaggggaggaacaggaagttggagggggagagaacttgtttcagcggaagaaggccagcttgccccaagatgcagcgggctgcctccggaagtagagaactccctgtccttggatagggtggagcagatgttgactgcttggcctgtgtgatatggaggcaattcaggccctgaaggctggaccaactccctggactttaaaactcttcgtttgctaaggggggccataataacaaaatgtcacacactgagtggcttaaacaacacgaatttattcctcacaattcttgaggctggaagtcccaagatcaaggtgtcagcagggttggtttctggtgaggcctctttctttggcttgcagacagctgccctctgatcgtgacctcacgtggcctttcctctgtgactgcacatccccagtatctcctcctcttctgataaagacaacaatcttattagattagggttccaacgctctgtgattttattcccatccccggctttctttccccacactggttctcaatcttgagtcccgaaatatgccctccctatcctcatcctgtgcctaccttcacttcacccatccatcccctgcaggctggtcttgttccactgtgccaccatatccccaagcccccctcacctccgtgaggctcctaggactgctgcagcaaaccaccacccactggggcctacaacaacagatgtatcatctctcacccatctggatgccagaagtccaaaatcaaagtgttagcagggccatgttccccctgaaatctgtaagggaatccttcctggcggcttctgaattcctggtgctttcctggtcatcattggcattccttggcttg

SEQ ID NO: 71720 - DNA, 1030 bp, Homo sapiens
agacagcaaatctgaaaaaataggaaactgttgccatcaatctgtctgtctctctgccgtctgtctgtctatctatctatctatctatctaatgatcaatcaatcgagagagagagaactgagaaggaacacccaacccagtctaggagggaagagggagtattagggaatgctttctggaggaagaacacccaacccatgccgaaatgaattaggatatcaaggaagacttcctggaggagaggacatcagagccaagtcataaaagacaagtagggtttagccaggcaaagcaacagagggtattccaggtggtggagacagcatatacaaagagtgagaaggccccagggccagaccaaggtgtgtgtgtgggtagatattgggtaccatgttaaggacattgggtcttttccagcatgtgatggaaaagcaggttctaagagagtgaggtgagggaatgataagttaccccgactctgtgggtaggagagggcattatacacgtggtagcatttgaactggaccatggagtatgtgtaggggttcaccaggtggaggaggaagagaaacgatagaaacactctgtgaggggcagctttgccgttccgtgggggccactgaacagggactctcctgggtccctgccctgtctccttcatctattacagcatttttctatttagttactccagagcaaaagggatcagtgctagacacaggggggcaaagggaaatatctgcgtggggtttctgggtggttctggtgaaagggttccaagaaagaggtggatgaagcaaaagtgaagatttagggctcagttcttggccaccccagtgcctctgacctgagcatgtcccaaatcgaacttctcaggatagtggcctcggggtgggtgatgatgtagggttgggactgacatgcagggtctggtgtgggtgcagttgagagatgcaccctggtgccgtactgcctggtttcagggctggcaccaccttcaccacatcccttatcttctcattgctttgg

SEQ ID NO: 71721 - DNA, 1071 bp, Homo sapiens
gcagagagtggttctggggagcttgaaatgatctttggaaagcatgataaaatgcagatttgtgggccccaccccaaaggacttgagaaacttttgagttgcgggtacttagtctgatttagtgaaaaaattgagctatagactttttttttctgagacaaggtcttgctctgtcacccaggccggggtgcagtggcgtgatggctcactgcaacctccgcctcccgggttcaagcgattctcccgcctcagcctcccaagtagctgggattgcaggcacccaccaccattcctggccagtttttgtatttttcgtagagacggggttttaccatgttggccaggctggtatcgaactcctgacctcaagtgatccacccatctcagcctcccaaagtgctgggattacaggcgtgagccaccacacccggccaatagacttttttttaaaagggaattcagctttaaaggtttcagaatacgttagagacgagatctttggttgcaaacaacagaagccaactctatctaacttaggctgaaaatgaacttgtttgggatattatgggataactctcaggattgacaggaaagctggagacccaggctcagaaaggggcaggacccaggtgtctttgggctctaagtagcagggatgacttgacagctgattttgggagggaccactactagattgagcttcaaatatttttttccatcgtgtgtcatgctgttgaagattcatattcccaagagagactcagattggtctgattggcacctggtgagttaggggaaggcagtgtaccctagttgacacccccaataaggttgtgcacagagtaggagagagaattccccgaggtggagtggggtgaatgctagacggtcacaaaaccagtgtcctctgcaagacagcagtacaggctattggctcagatattgaaatgcctgagtccggctgagcaggaataattacatagatgaacacgttaagtgacaatttgcagcgagcccaccctctatactgtttgatcccaaataagcaaattttctaccctaacaagttca

SEQ ID NO: 71722 - DNA, 1051 bp, Homo sapiens
ggacaggcttaccgtggacgcctacccgggcttgtgcccgcccccgccactggagtcgggccaccgttccctgcccccatcgccccggcagcggcacgcggtccgcaccccgccgcgcacccccaacatcgtcaccaccgtgaccccgccgggcacgccgcccatgaggaagaagaacaagctgaagcccccggggaccccaccgccctcctcccgaaaactgatacacttgatcccgggattcaccgcgctgcatcggagcaaatcccacgagttccagctggggcaccgcgtggacgaggcccacacgcccaagtgagtgcgatcggtgggtgccctggggcggtcgaaacccggcctgcgaggggctgccccttggtcccaggaactgcccaggtcaaggaaaccgggaacagacttgcgttccagactctggttgaatgaaaaatggcttttcacagagggttctgagcaaatgaatagaacagaatttcccagaattggccgtttaaaaaatacgattaatatcctatggcctaggggctaaatctgatacccggcctgattttgtaaataaaaggtattggaacacgcccatgatcattcctttatgtgttgcctatggctgcttttgtgtgacaatggcagagtgagaatagcccacaaagctgaaagtatttaccatctggctttttactgaaaacgtttgccaacccctgcagagtctagcctagtgccgctcctagaaataggatatgaggcatatattaaccttcaactttctagtagtcacattaaaaagaatgaaaaggaacaagtgatattaatgatcataatacatcattcaacccaatatatcaaaattataatatcttaacaaagaatcaatgtaaaatatcattacagagatattttgcattttttaaaatacaaagtctttgaaattgaatgtgtattttatatccacggctcatctcagttgaaggtggtaggaagcaggacacgttggggaaattgacagaggacccctttgggggagagagcaggtgtg

SEQ ID NO: 71723 - DNA, 1046 bp, Homo sapiens
gacagggcagccacagtcctgcatttggagtagagatgcaatactatttataaaaattcactttaaaagcaacttctcatgagattgatttttttttttttttttttttttttgcacatagcacagatgtcagcaaacttttctttaaagagacatatagtaaatattttaagctttttgggtcatgcagtctctgtggcaactacttagctctgcagttggagcacaaaagcagccacagatgatatatatacattaatggtagtggctgtgttccaataaaactttatttacaaatataggctgagggccagatttggcctctgggcagtagtttgctgacttttggtatataggaatttctaccttttcccagaagccagtatgggaaaaaatgctttgaaaagtctgaaattggcctgtgaagatggaatcttgaaaggctggagacaaaaagagaagagttctaaaagaaagcaatggaagaattggagataatgtgttgtgagagctctttgtttgagaggcataaggacaaatgagaaagacaaaagatattccaattggtttttctatgtgtatttttgtttgtttttgagacagagtcttgctcttgttgcccagactggagtgcagtggcgcgatctcagctcactgcaacctctgcctcccgggttcaagtgattctcctaccctcagcctcctgaatagctgggattacaggtgcccaccatcacacccagctaatttctttttgtatttttagtagagacggggtttcatcatgttagccaggctggtctcgaactcctaccttcaggtgacccacttaccttggcctcccaaagtgctaagattacaggcgtcagccaccgcactgggccgttatgtggtttttcttgagacagggtctcactctgttacccaggctggagtgcagtggcatgatcatggctcactgcagcttcagcctcccgggctcaagtgatcctcccaccacagcctcccaagtagctgggaccacaggtgtgcaccaccatgcctag

SEQ ID NO: 71724 - DNA, 1064 bp, Homo sapiens
ccctggtgtttcttcaacttgagacgtgttccttttataaagagaaaatacttttattgtattcatttattaaacttttttttagagacaggatcttgccatcatccaggctggagtgcagtgacatgatcactgtagcctcaaactccaggactcaagtgatcttctcacttcatcttcctgaatagctaggactacaggcatgcaccaccacacccaactaattaaaaaaaaattttttagagacagggtctcgctatgttgcccaggctggtctcgaactcttgccctcaatggatcctcctgcctcagcattccaaagtactgggattacaggcatgagccactgtgctcagcctggaatagactttaagatatattgtatagtcttaattttattataatgttacttaaatatctatcaacacaagactagttcttaactgggggcaattttgccccctcccaggggacatttggcaacatctggagacatttttcattgtcacgactttggggaggatggtgtgctactagcatctcatgggtaaaggtcagggatgctgattagtatcctacaatgcactgaatggcccatcacagcaaaggattatccagccctaaacatcattagggcccaggttgaaaacccatgtacaaacccagctgtaaatgtcttatgtttatagatatcaaacaattatgcagacaaaacagatttgcaaacattaaatacgatctattttgcaaaaccagttcattctagtagatgacatcagtgatgaaaaagatattttggtgaaagtaaatggtgcgttgaaacttgaatggggcgcttctattctggtgcacattattttgtctttggtgagcctcaggtatgtgtctttcgtggcttagttatcctgtggcatgaggaagaaagagtggtaggagtgacttcattggccttcactatgggggacctgttttagaaccaagtattaaatgtgccttggttctactctgattaggcagtgattattaaatcagtgcaacttggcaccaaaagaatcataaattat

SEQ ID NO: 71725 - DNA, 1036 bp, Homo sapiens
gacttgaacaggttatttgttcacttgtgttcatgacagcattatttgcaatagctaaaaggtggaaccaacccaagtgtccacgagcagatacatggataaataaaatatgatatacccataccataccatagacacacccatattatttagccttacaaaggaatgaaggccaggcgtggtggctcatgcctgtaatcccagcactttgggaggcccaggtgggcagactgcttgagctcaggagttcaagaccagcctgggcaacatggtgaaacctcatctctactaaaattacaaaaaattagccgggtatggtggcgcatgcctgtagttccagctactcgggaggctgaggtgggaagattgcttgagcccaggaggcagcagaggttgcagtgagctgatactgcaccactgcactccagcctgggtgacagagggaaaccctgtctcaaaaaaaaaaaaaaaggaaagaaggaatgaagtgctgacacatgctacacaacatggataaaccttgaaaacatgatgctgagtgaaagaagccagatccaaaaggacaaatactgtatgatttcaattaagtgaaatatctagtgtagtcaaaatcagagacagaaagtagaacggtggttgccaggggctgagaggggagggcagtggcgagttatggcttaatgggtacagaatttcattttgggaggatgaaaaggttctatggatggatggtagtgatggttacacaacactgcgtatgtgcttgaggccactccgctgtacacttaaatggtgtattttatgttatgtatattttaccagaataataagggggcaaggagggcagaatgactttctagatgctaattttatacgagtacacattgatgactttgctttcacataccagcttttagtgggtgcctaggaaaggcctggttcctttttttttccttttttccagactgagtcttgctctgtcgcccaggttggagtgcagtagcgtgatcttggctcactgcaacctctgtccctc

SEQ ID NO: 71726 - DNA, 1025 bp, Homo sapiens
agcccctttgtttgcgagtgtgagaaacttatctcaaactggttcaacaaaaatggggagttctttggcttgtgggactgagatgtttatgggtagcactggcttcagcgtggctagatccaggtacttgacaaagcaaagccttgtctacacctctcagtttggctttctttctggattgctttcatccaaacagcctttccttacggtggcagaatggccactggaagtgccacacttgcattttatcaccttgcttgtaggaagagcgtgattatttctcagtggctccaacaaatttctggggtatcctattcaccagccaggagtgcttcatttctctactcctggagtcaaaagggagcggtgttgtcatgggtcagttctggagccagggagcgagatcagtcccttccaagccctgtggaccaagcagggatgttctccaaacaaaagctgggatgctgttactcaaagataatgagcttggctggaggatacaatagattctgttgttccaatgtagccagaattcttaatccagaattccagcaaatgcagaaaattctaagtagggcataaggatcaaaagggtaaagaacatattactaggaatgtctggatattcagagtgggatgtttcagagtttgcaacgtcggctggatttaaataatagctctccctccactcatgcactctgaagccaagtgtggtcacacatctgccctcccatttaagaggcgccatgtatcttttttgggatggtgagtggatggagaactggagcacggtgctgggtcccagctctgccaccctcttgctgtgtgtcgcttgggcaagttacataactttactgagccacaggatactgggaggatcaagggtaagaagattttaaagtacttgggaaactgtggccccgcaatttagggcttggttgtagtgtgccataaccataaaccaaagtactttatgactttgctgtttatcgggtttcctgataaaatataggatgctcttttaa

SEQ ID NO: 71727 - DNA, 1177 bp, Homo sapiens
taatgataaagtctaagtggtaaataatatgggggacaatgtgtgagcccattaggcatgtgttcagctgcatgaaatggaaaacccaatcctagcagtaaggcaaataatggtttctcttcatgtaacaagaattctggagacatatagctgcttcagttggctcagtaggttagtaataccagggctgatgtctttgggaattctcatggcttttctcttatggttgcaagatggttcctgcagcttcagcgattacatctgagttcaaggtaggaaagaggaggacctggtgagtgtgaaggaataaagggttccccaggacatctcttcctcctcaccttgcagatgatttgattatatcttcttggccagaactgagtcctagctgcaagggagcccgggaagtggggaagtgggaccaccaccaggatcggcttagatggatcatgatccattgcctgaaatgacatgttgccactccatgcaaaatcagggctctgctagtgtggaaggaggcataggtagatattaagtaagtggacagccagcgatggcagccatggcacatagtcagaagatattttggtggaaaagaaagttcatgaacgttgagtcagactgatatagttgtaaattctagcttgtctttttactttatcttgggctagtgatttaagttttctgatttatagttttaagtttttggcaaaacagcaataattaaataatattccctacttcagaggatggttataaggattgaaagagataacgttttcaagggtctagcactatctggaacagagtggctgcaggtgctaaatgaatgacagctgtgatgatgataatgattggcattacatggtgttgactagatggcatggaagggagcagttcagattggacagagagaaggaggagcttgagtagcatttccaaagtatgttctgtagaaccctaaatctgtgggatgttagcgtttttaattctttcaacaaatgctgacatccaggcactgtacttaatgctggtagtcaataagtgttctgtggacaaaacaaattctgtggttaataagtttgggaagggttgagttaagcaaagggaaacaggcatctttactgcaggacttttctcagagcctttaatatgctacctatgtgtattaggcctc

SEQ ID NO: 71728 - DNA, 1110 bp, Homo sapiens
ccttggcaggggtgggggaaggaagtgagtgatgcctgggccttccctgggggctgacacaggctggcagcatggcccacctgtagggtacatctcacaggtggtacctttcctgcagccctctccaggtgcctacagccactcccttcactaagcccttcaggctcaagggtgacaggtattgcatagccccatggttttcctatatcacacctttaaaaagatcttgtttaattctcttcaaattgctgcatttgagtatgccatctgtatattgctgggaccttgactaatatacttagattcaaaaatctgagtattgtctattgcaagaaaagtttaacttactttttagacgcaggtctcagaactttgctgctactaatgtccttatttcagtttattaagaacttggtaacttaggattgtggtagctgaaatttgtatcattctgctcataccagaggtgctgttcagtgtaaccataccaattaattatttctccaatttatgtcagtcattgtcctcaaagggtgggggtaatatagccatctttattaatttagtgaattttgtgtaaaactgattttttattttatgatgatctcttagccatcattagacatagagagctagcctgctgagctggactgatgaggaaatacactaacaccaagaactcacagatagcacagcaacatggtttttgttttgtcttctgtcttccacatttagctgaatgcttcagatgaccgaggaatagacatcattcgaggaccgatcctgagctttgctagcacaaggacaatatttaagtaagaattatttgtgtaatttcgctcccttgattttgattagtaagatgatatgggttaattttttaatcctctccttagccagtttatatgggttgaaaaaaaaagtgactttgtccaaagcaaccatggaaaagagataaacgagagggatggtagtaagaagcgttataatgcaactgttaaaataaaatgttatctacgcttgtattagcaagtttgttttttttttcttttttttttggagacagggtcgccctgtatcgtacaggctggagtgcagtagcatgatctc

SEQ ID NO: 71729 - DNA, 2379 bp, Homo sapiens
ccttccctccctttgccttctttgcaacaaatgattccttttgtttttaaaacattttcttttgctctctctttgttttttgagacagggtcttgctctgttgctcaggctgaagtgcagtggcatgatcatggctcactgtagcctcgacctcctaggctcaagtcaccctcctgcctcagcctcctgagtagatgggactacaggtgtgcaccgccacacctggctcatgattttttagtggagacagagtctcactatgttgcccaggctggtctccagctcgtgggctcaggcaatccacctccctcggcatccctaagtgctgggattacaggcgtgagccaccatacctggcctgcaacaagtgattttttcaattaatcaaaatacaaagtgaggagggggaatcctgcaggttatgagaccaaggtcttaccagctgtagatttcaaaatttacagattgatcatgcctttgcttaggtctttcttcaaaaactattacaaaacaatgactcaggatttgctgggaccaggctgggcatggtggctcatgcctgtaatcccagcactttaggaagctgaggcagatggatcatttgaggtcaggagttcgagaccagcctaaccaacatggcgaaaccccatctctactaaaaatacaaaaattagtagggcgtggtggcgggcacctgtaatcccagctgctcaggaggcaggagattcgcttgaacccaggaggcggaggttgcagtgagctgagattgtgttgctgcactccagcctgagcgacagagcaagactctgtctcaaaaaaaaaaaaaaaaaaggatttgcttgagaccatacctgcaaaatgttcagagccctacgcatgtctccactggaaagagtgactagtgctttcattccatcttcacttatatcaactctgaaagaaataagcaaaagggatttatgaggccccctgagagcaccagcattcaccaaaggaacaagatggcctggaatgattaaggctttaaagggatgaaggaaggagaggaacagagttaataatctcctgatctatatgatctagaattcactctggtttttagggacctgggcttcacattagtagtcacagccaaccaaaatcgagaacagcctgaatttaggaacaagcattctcccatggagccagtcgtcttgaattctgctctctggggaggacagaggcctggcacaagccatgatcacacagccgaaactcctccttcacaacaagcagctgctcaggtcggctacttgcttggcatctgactacacagaatgtgatgtcttagaaccttcccttctagtctaaaaaggctggaagcatctttgcagaagggactcagcagcctgcagtttccaatgacaaagaagagtaggaggaaattgggacagcttccaggggaggaggatggaatcaagaaaaatgaagtaccaaatgacttttatgaggaatggccttgagacagcagagaaaatgatagcagtggacggtccccagtgcctcccctgtgctaggcactctgcaaagtcgttttccaacattcctctcctctacatacgaaccagccagtgatcccacaagcctgtttctactacactccatccccaaaggcccgcaaaatactcacttctcttcttccacgacatgttccaggcggggaaccatgagttcaggagtcaggggaccgaaccgaaacctcgtgcagcgggactgcaaggcagggatgatctttgacagatagttacagatgaggcagaatctggtattttctgtgaatttctcaattactagtaagagaaaataaaaccacctcatgtcaaagtccattctgatttttcagagagcccagaaaacttgaatttttctgtggtcacaagggtataggaaaagattcaatactgcaaacaagtgaggatgttggccgggcgtagtggcttagtggctcacgtctgtaatcccagcactttgggaggctgaggcgggaggatcacttgaggtcaggaggtttggccaacatggcaaaacctctactgaaaatacaaaatttagccaggtgtggtggcacatgcctgtaatcccagctacttgggaggctgaggcaggagaattgcttgaatccgggaggtggaggttgcagtgacccaaaatcattccactgcactccagcgtgggcaacagagtgagactctgtctcaaaaaagaaagaatgtaaacaagtgaggctgcagcctatgacaagacagggcagtgctggcctgttcagatcagagattagccactcctcttttttcttttttgaaacagagtctcgctctgttgcccaggctggagtgcaat

SEQ ID NO: 71730 - DNA, 1806 bp, Homo sapiens
gccctgtcttgtcataggctgcagcctcacttgtttacattctttcttttttgagacagagtctcactctgttgcccacgctggagtgcagtggaatgattttgggtcactgcaacctccacctcccggattcaagcaattctcctgcctcagcctcccaagtagctgggattacaggcatgtgccaccacacctggctaaattttgtattttcagtagaggttttgccatgttggccaaacctcctgacctcaagtgatcctcccgcctcagcctcccaaagtgctgggattacagacgtgagccactaagccactacgcccggccaacatcctcacttgtttgcagtattgaatcttttcctatacccttgtgaccacagaaaaattcaagttttctgggctctctgaaaaatcagaatggactttgacatgaggtggttttattttctcttactagtaattgagaaattcacagaaaataccagattctgcctcatctgtaactatctgtcaaagatcatccctgccttgcagtcccgctgcacgaggtttcggttcggtcccctgactcctgaactcatggttccccgcctggaacatgtcgtggaagaagagaagtgagtattttgcgggcctttggggatggagtgtagtagaaacaggcttgtgggatcactggctggttcgtatgtagaggagaggaatgttggaaaacgactttgcagagtgcctagcacaggggaggcactggggaccgtccactgctatcattttctctgctgtctcaaggccattcctcataaaagtcatttggtacttcatttttcttgattccatcctcctcccctggaagctgtcccaatttcctcctactcttctttgtcattggaaactgcaggctgctgagtcccttctgcaaagatgcttccagcctttttagactagaagggaaggttctaagacatcacattctgtgtagtcagatgccaagcaagtagccgacctgagcagctgcttgttgtgaaggaggagtttcggctgtgtgatcatggcttgtgccaggcctctgtcctccccagagagcagaattcaagacgactggctccatgggagaatgcttgttcctaaattcaggctgttctcgattttggttggctgtgactactaatgtgaagcccaggtccctaaaaaccagagtgaattctagatcatatagatcaggagattattaactctgttcctctccttccttcatccctttaaagccttaatcattccaggccatcttgttcctttggtgaatgctggtgctctcagggggcctcataaatcccttttgcttatttctttcagagttgatataagtgaagatggaatgaaagcactagtcactctttccagtggagacatgcgtagggctctgaacattttgcaggtatggtctcaagcaaatccttttttttttttttttttgagacagagtcttgctctgtcgctcaggctggagtgcagcaacacaatctcagctcactgcaacctccgcctcctgggttcaagcgaatctcctgcctcctgagcagctgggattacaggtgcccgccaccacgccctactaatttttgtatttttagtagagatggggtttcgccatgttggttaggctggtctcgaactcctgacctcaaatgatccatctgcctcagcttcctaaagtgctgggattacaggcatgagccaccatgcccagcctggtcccagcaaatcctgagtcattgttttgtaatagtttttgaagaaagaccta

SEQ ID NO: 71731 - DNA, 1080 bp, Homo sapiens
tctccactaaaaaatcatgagccaggtgtggcggtgcacacctgtagtcccatctactcaggaggctgaggcaggagggtgacttgagcctaggaggtcgaggctacagtgagccatgatcatgccactgcacttcagcctgagcaacagagcaagaccctgtctcaaaaaacaaagagagagcaaaagaaaatgttttaaaaacaaaaggaatcatttgttgcaaagaaggcaaagggagggaaggatttggcactggaatagccaacaggctgtggcatcctctgatgaggtgactcttccggtattgaatatgtgggttcccactgccttgtgcccatagaactttgctgctcacctgcattgctgccttggcaatttcttcttggctccctgcagcttggtggcagctgtgacagccactgtgatctcccctttccccctctgtctacacagagcaccaatatggcctttgggaaggtgacagaggagactgtctacacctgcaccgggcacccgctcaagtcagacattgccaacatcctggactggatgttgaatcaagatttcaccacagcctacagaagtatcctttctcatgacctcctggccaccgagacctgaaggtggccccaggagttcaggttgcagccagcacccacaccttgctggcaaaggatgactggctgcaggcgactctggtcagcttgttgtgggagtgagatgtctgtaggtggagtgggtacttgtctttagcactccagagttcttcttggagggctctgaccttcaagtcagggtaaggcttgaagcagcttcactcacagatgggagaaaagcttaggccttggcattgaagatgcaggaattttcaagtggtcatgatagtgatagctcttgtgctgtgaaatgaaaggctaggaatggtgacacaaagcctttttggaaatgcatttggggctgggtgtggtggctcatgcctataatcccagcacttttggaggctgaggcggtagatcacttgaggtcaggagttcaagaccagcctggccaacatggcgaaaccccgtctctactaaa

SEQ ID NO: 71732 - DNA, 1099 bp, Homo sapiens
tgttctatcaattcccatccccactccttcaacagattttcagccctagatctcttggtcccttaagaaaaggcagctgtgtttggtgtcttttttcttaccctgtgtttggtttctgttaggtacaggctttctgttggcaccaacgagaagatccagctgagctccctcattgctgcatttcaagtcaccagagacctgattgttgcagaggcctagatgctctgagggccattcacaattctcagggctcagcagtgatgggagaacagaggacagttccaggataaactgctgcctggggctgtgggatgaatcagtcaccccgaatcttggaaaaacccccttccaggagaggatgggcaggcatttaaaaagtaccatttttgtggttgtttggagcagggatgtacaaaataattttaatgtattaactcatactgcctgtcttttataggggaaaaaaataaccttttttattttaaagttataaggtttttaccttttagttgcttggatgacagggaattagcctaccccattttggtctggaacagaagactttcaaatttaatatggtccaagtgtcttcctactcaaggtaaacattatctccaaaattacatttatgattctaatatttggcattgtgtctgtatctaatttaaacagatgttaatggacgtctggccgaaactattatacttttataagatgagctgaatcctcttactttaaaaactggtctttttatttaccctctgtggtagaagagtcaccagcaggttccaaattgatgtgtatgataggaaaaaaaccttaattttaaatataatatagagccttaaactatgccactgggtggcagaggctgtataaaacgcacttgttttcatgcaggagcggggcaagtaaggttgagcctgactgtaaacctagaactgcggaaggactgggacttttgtacaaatttcacatttattttacagcaatcatgctgcatttgtgttagtgttctttataataaaaaacaaagcagcctcctggctggctgtgttacaagtgactcttccttagacagctagaaagatgctgactt

SEQ ID NO: 71733 - DNA, 1074 bp, Homo sapiens
aaggttttcatataaatgcaagtttgacaaagtcagcatctttctagctgtctaaggaagagtcacttgtaacacagccagccaggaggctgctttgttttttattataaagaacactaacacaaatgcagcatgattgctgtaaaataaatgtgaaatttgtacaaaagtcccagtccttccgcagttctaggtttacagtcaggctcaaccttacttgccccgctcctgcatgaaaacaagtgcgttttatacagcctctgccacccagtggcatagtttaaggctctatattatatttaaaattaaggtttttttcctatcatacacatcaatttggaacctgctggtgactcttctaccacagagggtaaataaaaagaccagtttttaaagtaagaggattcagctcatcttataaaagtataatagtttcggccagacgtccattaacatctgtttaaattagatacagacacaatgccaaatattagaatcataaatgtaattttggagataatgtttaccttgagtaggaagacacttggaccatattaaatttgaaagtcttctgttccagaccaaaatggggtaggctaattccctgtcatccaagcaactaaaaggtaaaaaccttataactttaaaataaaaaaggttatttttttcccctataaaagacaggcagtatgagttaatacattaaaattattttgtacatccctgctccaaacaaccacaaaaatggtactttttaaatgcctgcccatcctctcctggaagggggtttttccaagattcggggtgactgattcatcccacagccccaggcagcagtttatcctggaactgtcctctgttctcccatcactgctgagccctgagaattgtgaatggccctcagagcatctaggcctctgcaacaatcaggtctctggtgacttgaaatgcagcaatgagggagctcagctggatcttctcgttggtgccaacagaaagcctgtacctaacagaaaccaaacacagggtaagaaaaaagacaccaaacacagctgccttttcttaagggaccaa

SEQ ID NO: 71734 - DNA, 1544 bp, Homo sapiens
ctggaataccgtgacacgatcgtggctcgctacagcctccatgtcccaggctcgagcagttctcccacctcagcctcctgagtagccggaaccacagaaccacaggtaaatgccaccacatcctcagccccctgagtagctggggctaccatgcacaccagcaccacactaagtttttttggctatttatttatttattttttaaataaagattgggtcttatctcactctgttgcccaggctgatcttgaactcctgggctcaagcagtcctcccacctcagcctcccaaagtgctgggattacaggcatgtgccgtcacacccagccctgcttgttttaaaaggggacttttttttttcttaatggaaaaaaatgaaacagagagccaaaagcttttaactgttgtttttttcttttcttcaatgaaagcctctcattttgaaaagacatgtttttcttcaagcaacaaaggtggtagaggaaattcctcaactttctcaacgagtcatgtaacgttacactggcctccataaagcaccgattaagaaagctaaagaataagatgttgtatttcttttaaaataatttaaaatatattaaattttcctaaggcaggttttgtttgaatgaggtgtcttgattagataactacatgccactgaaggagaacagtacttttaaggagctatttttgtttcgcagtagagttgaaaccagctgattaatccaatgaagttaaacagcagagacagatctcgtacataagagtatcagctaaagtcatgactacaccaattctttacacaattaagacatctttgcaactgttcaatttaagtactatggtttttagataatcgagaaaaacacagttgtaccttaacatctgttgagaaaatacaaataaatatgatgctaataaatggccactgataactcagtagccatctgaatagtcatgcggtttaagaatacatccttgtataatctgacatacaaatttgtcatttcctgcacatgcacaccattgttaaaaaaaaaaaaaaaaagccagtaatagtgtctggatcggtcaggagcacggcctctgagtcccctgtaatttagttaagctaaattaatacctcataccaaatggctccaggaaaactgtcctgcaggtcagaagggagcccaagaagaaaagcacttggccaacatcgaagcaactctgaccacagcaggagagaacttgaaccaatgctaccactgcatcagaaacacaaggataggtactaggcagaagccatcgttcccagcggagggagtgtgagctgctctgccactagagaggctctggaggcctacttagttgcataatcaaaacaacatcagtaactgcactttgaatcaaaacaagcagaaagagttcaacacttgctgttcataactggactgaaaatttaacgtaaggctctgttgccgtgcaagtggaatctcttcctctaagactgactttcacatgccagggagagaaagatccatgactagtacactggaatc

SEQ ID NO: 71735 - DNA, 1291 bp, Homo sapiens
tactagtcatggatctttctctccctggcatgtgaaagtcagtcttagaggaagagattccacttgcacggcaacagagccttacgttaaattttcagtccagttatgaacagcaagtgttgaactctttctgcttgttttgattcaaagtgcagttactgatgttgttttgattatgcaactaagtaggcctccagagcctctctagtggcagagcagctcacactccctccgctgggaacgatggcttctgcctagtacctatccttgtgtttctgatgcagtggtagcattggttcaagttctctcctgctgtggtcagagttgcttcgatgttggccaagtgcttttcttcttgggctcccttctgacctgcaggacagttttcctggagccatttggtatgaggtattaatttagcttaactaaattacaggggactcagaggccgtgctcctgaccgatccagacactattactggctttttttttttttttttaacaatggtgtgcatgtgcaggaaatgacaaatttgtatgtcagattatacaaggatgtattcttaaaccgcatgactattcagatggctactgagttatcagtggccatttattagcatcatatttatttgtattttctcaacagatgttaaggtacaactgtgtttttctcgattatctaaaaaccatagtacttaaattgaacagttgcaaagatgtcttaattgtgtaaagaattggtgtagtcatgactttagctgatactcttatgtacgagatctgtctctgctgtttaacttcattggattaatcagctggtttcaactctactgcgaaacaaaaatagctccttaaaagtactgttctccttcagtggcatgtagttatctaatcaagacacctcattcaaacaaaacctgccttaggaaaatttaatatattttaaattattttaaaagaaatacaacatcttattctttagctttcttaatcggtgctttatggaggccagtgtaacgttacatgactcgttgagaaagttgaggaatttcctctaccacctttgttgcttgaagaaaaacatgtcttttcaaaatgagaggctttcattgaagaaaagaaaaaaacaacagttaaaagcttttggctctctgtttcatttttttccattaagaaaaaaaaaagtccccttttaaaacaagcagggctgggtgtgacggcacatgcctgtaatcccagcactttgggaggctgaggtgggaggactgcttgagcccaggagttcaagatc

SEQ ID NO: 71736 - DNA, 1753 bp, Homo sapiens
gggttttgccatgttgaccaagctggtcttgaactcctggcctcatgtgatccacccacctcagccacccaaagtgctgagattacaggcatgagccatcgtgcctggccgctgacatttatttttaagtggaataagatagcacttggctcaggtcttcatcagcacatacgactaccctattggcaaacaggactcagaagcagactcagaagtctctgcacatgcgtttcagcaggggtcttcctaaggctgatctggtttattctctcttatagtgagctccttgagcatgcccattgttttaaatcctcaagaatccagaccagttgccttatttaaacctacaccacacgttctggaagagctgtagaaaagggatagagaatcagccctggctgcagggcctgcagatttggtggtggtacctttccctccctccgtttgagtcctaagcactttgcttctgccctaaccaggcacttcttactttccacaggtctttctatggagcatgaggtcctacacgttaattcggaagctagagggccatcaaagcagtgttgtctcttgtgacttctcccccgactctgccctgcttgtcacggcttcttacgataccaatgtgattatgtgggacccctacaccggcgaaaggctgaggtcactccagtaaggactgaatccctgctatgacttttttgtggggggactgatgaggaacctgcctgggattagacatgtctcttttagaatctgggacatgggaggggacaagctggataaaaaggcacagtgggtctcttttgagacggagtctcgctctgtcacccaggctggagtgcagtggcgcaatcttggatcactgcaacctccacctcccgggttcaagcgattctgctgcctgagcctcccgagtagctaggactacaagcgtgcgccaccaggcctggctaatttttgtatttttattagagatggggtttcaccatgttggccaggctagtctcaaactcctgacctcaggtgatccaccgcctcagtctcccaaactgctattataggcatgagccactgcgcctggcctggttcattgcttcttagtgatgccttgtcaattaagccctctcaagtagctttgagtgtcttccagtctcctgattcaggtggctgtgtgtacttcttcggaatcagcattatgaagcctcaatatgactctttatttccatttactaataactgtagtaacaagttcagaaagagcctcttatcgaaactgtgctttccaaaatgagtttcatgttctcacaaacttggtctcctttttccttttgtgtctgttgttttatgaagcaaataataggcagtcctataattatcatgtatcttagcctaaaaaagacttgcagtttctactgtggcattaaagtgagggctgacctactttgcataagcaaattagcacaaggaagtgttagtaacccttcatccacaggacacctggagccttctgagatacccttttttttcccagtgtgcaaatcccaagcttttccacgaggggcacacaatgcatcttgagcccttttgtagccagggcagtttggcttcctgcctagggtgatgatggagggtggagagcagccatcactccaggcctgccatcctgtttctttccttcccagccacacccaggttgaccccgccatggatgacagtgacgtccacattagctcactgagatctgtgtgct

SEQ ID NO: 71737 - DNA, 1357 bp, Homo sapiens
acaatctgaccacagtccagcgtcttctcttttgggctgccccgccctttcgtctcatttttgctacttcggcttttggcttcaaaccctttagggatgctgggagaagcagagatttcttaatgaatctgcaattgttaccagtctatcaacttttcatcctgggacacgtaagacttttggggagtggagggaagggtctgtcacccaagctggcgtacagtgacacaatcatggctcactgcagcctcgacctccctgttcaactgatcctcctgcctcagatccaccaagtagctaggacgacaggcatgtgccattaggctctgttaactttgtttgtattttttgtaggacggagttttgtcatgttgcccaggctggtctcaaactcctgagctcaagtgatctgcccaccttgccctcccaaagtgctgggattactggcataagccaccccacccggccacataagactttaaatcctagaaacaagctggccttcggtgaaatctgctgtgacttttctttttgtttctttttaagagttgatgtaggccaggcgtggtggctcatgcccgtaatcccagcactttgggaggctaaggcaggtggatcgcctgaggtctagaattcgagaccagcctggccaacatggtgaaaccccatctctactaaaaaaaaaaaacaattcgccgggcgtagtggcgggtgcctgtaaccccagctacttaggaggctgaggcaggagaatcgcttgaacccagtgggtggaggttgcagtgaaccaagaccgcaccattgcactccagcctggggaacgaaggcaaaactctatctcaaaaaaaaaaagagttgatgttaacacaggctatactggccatggctcaatctatttgcaacagccctgcaatggggtgacctgccttgtgggataactaaataacagatgctccagggagtcacatgcttgctcagaaagttctctcaggttttgatgagtggaaggaaaaagacactcagtttttcccatgagtaagaaagcatactgcaggtttggaactagggcagaacttagaggctgaatatccaccactctcctgcctgatgagttcccttatcactagcttagaaatccccaaggagttggaaaataaactcatcttgccaacaccgtttgtttggtacatgttaatttccaccttcactcacgatgttgcaactgattaatgaggctccttcatttacttcctaactgatggtaacccgcacaaggatcaaacagcaaggtagtcaagagagaaaacgaattcacagggctgtgtagaggtatcctgtcctggaagatctcttaatc

SEQ ID NO: 71738 - DNA, 1014 bp, Homo sapiens
tttcacatttctcccatgtttcgctactatttttatttattatttttataatttaaaataatcgggctttttggggggcagagaaaaggtcttgctctgtcacccaggctggagtacagtggcatgatcatagctcactgcagccttgaactccttgtctcaagtgatcctcccacctcagcttcctaaaggcgtagccgccacaccctgccaacaatagctattttaaaagtattttaaaagagagaatttggggcatttatattctagttagggtagttatacattttttaaaaatcatgtagtgcttttgatattgagcaaataattgatattaaccaaataattatactgctttttgaaataaagtttttagaaactttaacttcagtgaagctaaattctgccaatgaatctgtcttgcctcatcagctctttcccacggtacgacctccctgcttttcacgtaactcatcccttgattcattagcaaactcaaagtatttgttgagcattaggccaggatacctaagaccttagttccagttctgcccctgattttgtgaccccaggaaagttaataacccataaaatggagattttagtatctctttctagaaaaattaaatttaggatattaaaatgaaataataaatatgccttaattcttttggaataaagtagctacaggtgtattccttaattcaaatacagaaattagggccaggtttggtgtcacacgcctgtaatctcagcactttgggaggctgaggtggggtggattgcttgaggccaggatttagtgactaacctgggcagcatagtgagaccctgtctctgcaaaaattaaaaaattagctgggtatggtggcatgcgcctgtagtcccagctactcaggaggctgagatggaaggactgctcgagccctggagttcaaggctgctgtaagctatggtcacaccactgcactgcagcctgggtgccagagagagaccctgtctttaaaaaaaacc

SEQ ID NO: 71739 - DNA, 2169 bp, Homo sapiens
tcaaagtcttccacattccacattccttgtgtggaatggacacatcaggaagtgaccttattcaggatggaagccagtttttatattagtaagtatcacagtcataatggtcaaaaaattcattctgaaggcctttaacttataagcttcatcagccatgagaatcttccatcagagtagagaactgaactaggaactgtgggtcagtcaatgaagaagctccaatctggtgcctactctttcacaagatggtgtgctaggtcctgggagaaacaaagacaaaatgatctgggtgttggaacaaggtgcttagacactgatgacgagggcggggggcagagagaaattggttacataagagagaatgaaataaacaaggtgcgacttatttccgttttgatagtgtgagatcagggtacgcttcttagttgtgaatctaggtgggattattacttttttctttctttcttgttactttgagaagctagggattctcataagcaaaagtgggtccaggtgtgaacgtaaataagccccttgcatgtcaaggagattttgtggccagagtgtggcctgcagggaggggacaagggaaggaggttggaccgatgggctggggcagatggcatgtggtgaaagtcctggtctcagttgcctttatgatgtaggcaggcgggagctttctaatgtatttgaaagaaatgatgtgatgtgtgggtatttcagctttagcagcatctctaggggtaggaagactgatcaggagactgtagcaaaagatctgggtgagatgagatgaaggtttaaccccagacagaggacgtggaagcgggagagatggggagatggaatccatacttctgagtgtgaggaagcagggcaagggctgaacgtttttagccttgatgatggggaggatgcaggcgagtgagagggagcctttgagtttcacatattccttctttgacagcagcaggttcttctgaagaaacctgaaatgcattggaaggccttgctattttggccccataatcagcaccgtctagcatattcctggtctggctgtctctccactttcctccccttcaagtattcataggaaaatgaggcctccattcactgggttcatgggcacaaaggttactgtgagtcatggttaaccagcagtgaggagtgccaggattgagtaaccgtggtggaatgtggcctgtggctgctgttattgccctgggtcatttaagtgacaactccctctgggaatggatagtgtggctctttgccacagggagacagtggctttcctgtgtctgggtggtcagggagcaagggggtgtgtgtttgaagcatgttgtctcctgccccagaggaaccgctgctgctggccgaactcaagcccgggcgcccccaccagtttgattggaagtccagctgtgaaacctggagcgtcgccttctccccagatggctcctggtttgcttggtctcaaggacactgcatcgtcaaactgatcccctggccgttggaggagcagttgtaagtattctcgtactggggccccatccggcgcatttccaaacactccttgttcttttgccatctctgtgcccaagaaccagagagagggaaggtggctcatggttcaggaattgatcatgggggtttccagagccccaagttctgtatatgtgaaagtcaattctgtcaagattatgttagccccaagttggctttttttcccatagctttattgagatgtaatttatataccacacagtttgtccatttaagtatacaatacagtggcttttagtctatccacagagttgtgcatccatcaccatcatcagtcttactttatttatttattttttgagacagtctccctctgtctcctaggctggagtgcaatggcgcaatcttggctcactacaacctctgcctcctgggttcaagcgattctcctgcctcagcctcctgagtagctgggattacaggcacacaccaccacgcctggctaagttttgtattattagtagagacgaggtttcgccatgttggccaggctggtctcaaactcctgacctcaagtgattcacccacctcggcctcccgaagtgctgggattacacatttctcccatgagccactgtgcctggcacataatcaatt

SEQ ID NO: 71740 - DNA, 1850 bp, Homo sapiens
ctgctaaatatgaaaatctgacttgaatttgtactctttaaagttgcgtatctgctctagtgggcaggacctagggcttaaaggggaacttcctttctccatttctaagaactgggactctaaaatgagaagctggttgtctgaagtaaccctgcaggtgtggttggggaaggtctgttttcttggatgaaggaactaaactaagcatatcagagcactgtcttaaccagttttatttccctggagatagaattcttttaaaaagagttagggagctggtaataggaagtgcctttcattataactacattttgcagagcttcatatttatatacaagcctcctaggtgatacactgttagcttgcagactttcctatgcttcatttctcctgttgctttcaaagaaggcaggagacacgtttaataacggagtatctggtgataagaattgcttgggcaaaccagctcatctggactctttctcagtcttggaagtgggaagaggaaaacttgtttccttcctgcttcttaaggatattctgagggtacactgatcaataacactaaatttggaatgaaaataccatgtgatgagtttagcctgctgatgcttccagtagatccttgtatagtttcaagatttaagttttccgatttcatataaatttcttaaagtcgaggaccttataagggtgcaatggatgtttgctaaatatgaaaaactgacttgaatttgcactctttaatgttgcgtatctgctctagtgggcaggacctagggcttaaaggggaacttcctttctccaattctaggaactgggactctaaaatgagaagctggttgtctgaagtaaccctgcaggtgtggttggggaaggtctgttttcttggatgaagggattaaactgagcaaatcactagaagtatgccctgtcccctgctcagaacactggggagctcaagagtgggctgcaatgtgcacccctcaggaatagctgtgaattgcaggtctactggctttttgctttttgtcttttgctgcaaggtaccccacgtacttaaccattctcaacagtgtaaatcagtgtcattttagaatgagatactcagcttgcttctaaagtcactgaattactgagtgagtctctcctttagagtcttcggcaaccaaattccagaattgaagagtctactactcagaggcaacaagattaaaaaaagaaaacacaaaaactgttgaggtgaaaaaaaaaaaaaaccctagctaggaacacagagaatgttttgtaggatcactgggatattttccacaacttcctcttctctagcacacacatctgttgataggaaatatttgagggtttttccactaccaaatgggagcttcatggtcctggtgtcaaacactataaacctttgaccagctgagctgtgactgctgtcacatatctgagtcctgtgtgcacagtaatatcctgggtcaggtaaaatccaggtcttcaagttttaaggattttttgaagaattcgggcttctttaagacgatccatgcccaaatccacaagcttgttgacagtggattacagtttgtgtggcaaagtccaagttgttacactgtgctttaaaaaaaatcttatctgcatgtattgttaacttagagaccatgagatctatttatcaggaccaggaagatacacacttcaggtccattgcaactgacttttttcttgtttttctcaaaccctggtggagcctgggaagggggcctccacaattctgtggctttgatattagccccaattctcacaagcacatacaagccccataattgccgcaggaaaacacaaga

SEQ ID NO: 71741 - DNA, 1038 bp, Homo sapiens
gacggggttttaacatgttggtcaggctggtctcgatctcccgacttcaggtgatccgccctcctcagcctcccaaagtgctgggattacaggcatgcgccactgcgcccgggctctagtaccaattcttaaatagtgcttcctttgctcaagaccctgtcatatatcaattatacttacgtgtggacccgttcctggactctctgttctgttccgttgatcactctgtttatcatggcattgataactctcaacactcttacttaccatggccttagaaatagtctcagtgtttggtagacagagagattttaactttccattgtttgttcacattccctgctccatctgatccccacaaactctctgaggttgggtgataaaatatttatctggcattacagacaggtcataagccttacccaaggtcaggaatcaagacaagaactggatccacgcagagaaagggaggtgttgttctaattgcacacatatctgatggaagaatcaatggtgtgatttgtctttacagaacctttaaatatcggggggattgtgggaaccattgtgagcctccttctgctgggactggccattatctcagggcttctgttgcattatagccctgtgttctgctggaaaggtaaggactccctgggtcctttagcttctcttccagacttttgaaaaggtgcgggatggggaaggatggcccctgccttgctcccacctgaagttctgttctctgggcttctttgctgggtcaagatacacagtaataagtcacctaagtaccatcccgggacaccctatcacctgtcatattgagtcagttttcttatttgttcctctagtaaatgtttgcctgattaagaacctgtcaggttgaagtggatgttactggatattaatggtttttcctttctctcttcagtaggaaacacttccaggtgagtgttccctagaatcaaaccaaacacccattcccgcatctgtcttcacttctgttttgttcccttcctttcacaagaacaataa

SEQ ID NO: 71742 - DNA, 1178 bp, Homo sapiens
gatggtctcgatgtcttgaccttgtgatccgcccacctcggcctcccaaagtgccaggattacaggcatgagcctgacttttcctgaggtcaggagttcaagaccagcctggccaatgtggtggtgaaaccctgtcccttttgaaaatataaaaattagctgggcgtggtggcacgtgcctgtaatcccagctacttgggatgctgaggcaggagaatagcttgaacccgggaggcagaggttgcagttaggcgagatagtgccattgcactccagcctgggcgacagagtgggactccgtctcaaaaaaaaaaaaaaaaaaaagaacatatacctgatttttaaaaaaatcctaatacaggagtactgtccaaaaagggacattgtttagaaattaagaagggtagtaacagcctgatcttgccttgtacaggattggaggctgttgtcattggagaagttcatgagaatgttactctgcactgtggcaacatctcgggactgaggggccaggtgacctggtaccggaacaactcggagcctgtcttccttctctcgtccaactctagcctccggccagctgagcctcgcttctctctagtggatgccacctccctgcacattgaatcgctgagcctgggagatgagggaatctacacctgccaggagatcctgaatgtgactcagtggttccaagtgtggctgcaggtggccagtaagtggggctggcagggaccggggctggagaggtgctcggagccttggaaaggaggagaccatggtcaggaatatgggttttgggttcggatggcctggaaatcattctgggccctgccacatggaagctgagggacctctcacacctctatttcctcacctgtaaaatggagataaaaagaatttctgtggccgggcgcagtggctcatgcctgtaatcccagcactttggcaggccaagccgggcggatcacttgaagtcaggagtttgagaccagcctggccaacgtggtgaaaccccatctctattaaaaatacaaaaaatgccggccgggtgcggtggcttacgcctgtaatcccagcactttgggaggccaaggtgggcgggtcacaaggtcgagacattgagaccatcttggctaacatggtgaaaccccatctctattaaaaatataaaaaat

SEQ ID NO: 71743 - DNA, 1047 bp, Homo sapiens
ctgctctgccagcttcggccaatcagaggccagggagcggtgggcgtgacgtggggcggtgcgcggggctgggcggcggctgaggcgcgtgctctcgcgtggtcgctgggtctgcgtcttcccgagccagtgtgctgagctctccgcgtcgcctctgtcgcccgcgcctggcctaccgcggcactcccggctgcacgctctgcttggcctcgccatgccggtggacctcagcaagtggtccgggcccttgagcctgcaagaagtggacgagcagccgcagcacccgctgcatgtcacctacgccggggcggcggtggacgagctgggcaaagtgctgacgcccacccaggtacaccgggcggcgggcgtgcagcgagcggcacggcgcggaggcctgtgccggcctcctgggtgggacccagcggagacagggccaggggcggtggggaggttcagcctgcgtgtgtcgaggcccccccaggccagaggtcccggggtccatgtcccatgcctgggggccaccccgagcaccgggaacccggcctgtggcgtggccaggcaggttcggcctgcggcagaaattcattcacttttcccgggcttcagacccaagagggacctaggttcggaaacaggccggatccccctctccccccacaggccagggcgctggagagggacgtcgccgggacagagtaggctgtggctgcccggacgcccccagagcttcccctagggcctcagcattttaggcctggttttggagggctgaagcctcacccgagagcctgtgacgcattatgtaactggcgatgagcgcgccggccgatttctcctttgttaaatgggtcgagagcgtccagccggtacgctggagggcaacggtttagttttggtctttgacctcccacgcccacggctggggctgccgaaagtgaagaaactagatttgcagacgccactgctagttggttatgaagctccgggcaacagcgtaaaataaactgccccgaccttacattgttttggatgttcacagaatttaat

SEQ ID NO: 71744 - DNA, 1088 bp, Homo sapiens
gttatttgcactttcttccagtagttccctgagaccaacgtaacagactattttcccagctcctgttctagaactaaattactaatgacccaggaggcatttggctctctgtgggaaagcagcacaatccaattgtgcttgagtgtcttttagcttctcatgagccatcccctaacacaggacactgacctagatccgcccagccgctgggcttgctagaacggcattgccagccccaggtggaccccaaacattgatattcttgtgagcaagttttaaatataatgatttagatgcattgatcacaggactcagccagccttcctcggtcctcccgtagttcctgtgtgtgtgtgtgtgtgtgtgtgtgtgtgcgcgcgcgcgcacttcatgtgtgtgcctatgtgtgtgtgcatgtcatatgtgtgcctatgggtgtatcgcgtgcacgtgggtgcctgttaggagatgctttccattaagaactgcatcgtgcttctttcagattgaagaggagctggctgcccttcagaaggaacgcagcgagagaataaagaacctattggaaaggcaagagcgagagattgaaacttttgacatggagagcctcagaatgggatttgggaatttggttacattagattttcctaaggaggactacagatgagattaaattttttgccatttacaaaaaaaaaaaaaaaaaagaaaacagaaaaaaattcagaccctgcaaaaccacattccccattttaacgggcgttgctctcactctctctctctcttactcttactgacatcgtgtcggactagtgcctgtttattcttactccatcaggggcccccttcctccccccgtgtcaactttcagtgctggccaaaacctggccgtctcttctattcacagtacacgtcacagtattgatgtgattcaaaatgtttcagtgaaaactttggagacagttttaacaaaaccaataaaccaacaacaaaaaaagtggatgtatattgctttaagcaatcactcattaccaccaatctgtgaaagtaaagcaaaaaataataataataaatgccaagggggagag

SEQ ID NO: 71745 - DNA, 1071 bp, Homo sapiens
ggtaattcggtgaagctttcccaaggagatgagtcttaaagagtaatagtttaccaaataggcataaaagaaaaagttgttcctgacagaggatacagtatatgcaaagacttagagacgtgaaagaggatggcacatttgagaaacaatgagtaattgctatggcaagagtataggatgcttgttgagggaaagcgggaggatagtcagggtcagagcctcagaagccaggagtttgaatgttattttgtaagcaatggagagctgttgaaccgtgttttaagaaggaaagcataactggatcagatttgtgttacagaaagatattagcagaaatgtggcaaatataggtaaagagacctgttaggaagccattataatagttcaggaaaaaggtgatgagagaacatgctaatggagatggagaggagtggggaaggttttaagaaatatttaggaggcaagaatagaaataacttagtgaccaatttgagaggtttgacaacagagtagaataggtcattatcttaccaagctagaacaataaaagagtgagtttggatgcctgcaaggataattgactaagttgtagacctggtgtctgcgttttgtgggtgaccaggtagagaggtacagataatggaaacctgcagtttaggagggatgtcaagattaaaggcagaaagctagacttcattgttatatgtgtgcacttgtggctggtaggaatggatgagatctgctggggacgggaggtattcttagagaggaaagaactaaggacagagtctggtagacatcaacatttgagggctgaggtagaagtagaacaaaagtgaataatcagagacacaggaagggaacccgaagagagcatgtcacaggagccagagcaggagtttctaactgacagcgtcacatgttgcagagatcaattagaagaataaactttgaggtgttcattggacctagcactggattcgtccattgcttgtctcggacaatcagtggagtggtgggactgggagacattatagagcattgaatgagggattataaagtgaaatccag

SEQ ID NO: 71746 - DNA, 1052 bp, Homo sapiens
agtgagtagctaaccaaatgaagaaagaagagtatactgtactttcttaacaagtagtcttcttcttttcaccacagtttaacatcttaacagtcctgattcactgctttgtttcctttgctcagatgttctggaaaaattgtgaattttgtccttggaaaatatagatggtttgtttactctataatcccaagtgaagaatgttttttcctaaaattcaaactagtgacatttgcatagtcacctcttctctttggaatctgtctgcttctctcagtcttgtcactacttcctttgtccaagctactaccatctctcttgcctggacctttccagtagcctcccagctatcttcatatgttcttgcctccttcattctgttctccccatggcagccagagtaatcattttcaaatgcatctcattatgacactctcacatgcatgaaatccatttctcctatactaaagatcagtgtccttatattggcctgtaaagcctcaatggtcctgcctacctggccagacttatctcatattacgttacaccagcccctctgaccttctttcagcccttgatggcaccatgtttcctctccaacccctagggttttgcacatgctgttttctctactgagagtattcttccctttccttttccgctggttaactctgaataatttttcttagttactaccaagattaaatattttctattaaattcttctagggccaagtacgtcctcttcaaagcagtgatcacagtaatttttagttcatttctgcggttctttaatttttgattctataataaagacacacggtggcagttatcatggccttttactcacctttgtgtcctgtatcttgcacactgcctgtcacatgataggagcttgttaagtttgtgttgagtgaatgagtgaacaaataatttctgttagtgagaaaccaaagatacagaaactcacaagtgtccctctcacttaatactcaattaatgagcaaataaaaaaaattgggggaaggatgtgcaacactaagcttttctgt

SEQ ID NO: 71747 - DNA, 1015 bp, Homo sapiens
gaccctgaggaagacagtggtagttcctctctctttacacattaagaaactgagagactttaagaggttaagtaatttgcccaaggtcaattatatagtaagagatagatgaggtttttctccacacaatccactgggtagagcaaggtggtactgcccacttttagttgatcacatttttgagactgccattgtaaaaactacagttactacatctttataactttctcccatttcagacttactcaatttgtaatttagacttaccaccctctctagctttgacttttttgggtgttgattccctctattactttataacagaaaatagtcactctttttctgccttggtgatatgaatttcctcaggcaattcaagaaccataggaatccaaggccttctaaaaattaaagaggtaaattatatgtgaaagcactttttaaaccatatgcatgaaaaagttatcagctattattttttattttattgaccaaaaggtgtattcttaaaactcatagtgtacacttaagacacacaggcacatataactgtaaatatcatattttttgtatatttcatgttagacttttcaattgaaatatctggttatacttttatttaaattcatctatccagcttgagcatggaattataaagcttagtatctctatatatatacccaaaaagacaatttgaaacttggaaagtttagttgtgacaaatgaaaggtgatattaggagtttaagaaggtaattatccacattatgggaagcattcaaaagcaaaatgtctctcctggaattcagtggtgtacaatgatagcagattgagctctgtaaattttctttgccacatccttgtaccagatcaccttgtatgtgatctggtacaagtagaaagccaccctctttacagacacccacccaccaactgaaatagaaaattttcttgacacaactcatttcccttttatctttaggcatcctggtttagggaaatgaccatcctgagaa

SEQ ID NO: 71748 - DNA, 1011 bp, Homo sapiens
tcatccttggcactctaaactctctttaatcttttgcttctgaatctcacttctcagccaaaaaattattgaaatattagttgttttgcccaaattaatgttagaggtcacatgggcaggaagagttagtgtacactgcttggctattacatttagaacctatgatgacatcatccaaggccgacccagaaatgatcatttttcttgtcctattttttaaacctgatttctacttctatttctcaagtcttttaaaggcttcgattatctttgaaaattataatggattataacctttaaaaacccaaatgcaaggaaaaatggaagttaaagcacgtacatattgctgtgcctgctgctgtctaaaagcaagcaatttaatttaaactgcttataaataagcccactttaaagttcctttatgtagaagtttcttgtgatctctttgatgagcaatttttcattttaaaggaatgctacactatgtaatggagatcttaaaatgtccactatgtatttgctaatgattgttaggcacctaaaaatgtgcttttgagtctagataaagcatcataagattaccaaatagtcattgtcttcatgccatgatatctgacaaaagaagaaatacggtgctttagagaactatgactacttaccatcgactcttgtgagacttggacctttatccagacccgttcatgttgaaatgagtggggaaatgataacaagctctgagcaaccgagtaccatcagtggttttacatgtgaagcagacattataccaagtggctttccccctctgggacaggttcttttttctctcttgccacaccctcattcccacatcatatattcatgacctctcctacctcccagcaagagattactacagccatgccagaataatctcatgctcgcatctgtgaactcacccagggctactctgtgtgtatatcagccatcacagtcttcttctctgtggatgataaaagctgcttccctactatg

SEQ ID NO: 71749 - DNA, 1050 bp, Homo sapiens
tgcctgtaatctcagctactcaggaggctgaggcaggagaattgcttgaacctgggaggcggaggttgtagtgagctgggatcgttccattgcactccagcctgggcaacaagagcgaaactccatctcaaaaaaaaaaaaaaaagaaagaaagaaattagccatgcacgatgtcaggcacctgtagtcccagctactcaggaggctgaggcaggagaatcacttgaacccaggaggcagaggttgcagatcgtgccactgtactccagcctgagcaacagagcaagactccgtcacaaaaaaaaaaaaaaaagttgcattttatagtaatcttttttccttattctatgtttctttgctttctgacttttttaagtgaatatgaatttttttctttttctttttcaccaaatacccagacttcaaggagagaatatatatttttgagctaaaacgcacatgcaaagatcttcatacctattgtgggaaaatatgcaaaagccaattttttgaagctatgtgaaaaaaagaaaaaaacttttctttcactcttttgaaatgagttctgttaggagctttgccaatgtacatttaatgtccggcagcttcttctgaatggctatcttgggccaaccttagagattaaaataagtggattatgtggcatgatgacagtaatgagctattgatttagccgcaaagctttgctcatagtttcttatttctctgtctgcctggtttccttcaagaactactttattgtgtttctttcctcttccagcggaacggaagccgccccttttcaacatgaatgcaatgagtgccttatatcacattgcccagaatgactccccaacgttacagtctaatgaatggtaagactctgctatcattttaaatctctaagaaaatcaccgtatgtatttgacatttttattacattacattttaaatatctgacctagaaagcatttctttccttcactgtatgttgttacaagtgacactgatgcctcacaagcatcaactgtctacacatgcacacatgca

SEQ ID NO: 71750 - DNA, 1040 bp, Homo sapiens
gcatggtggcaggcgcctgtagtcccagctacttgtagtcccagctactcgggagtctgagacaggagaatggcatgaacctgggaggcggagcttgcagtgagctgagattgcaccactgcagtccagcctgggcgacagagccagactccgtctcaaaaaaaaaaaaaaaaaaaaaaaaaaaaaaaaaatttcctgctttatttaattactttaaacaatatgaaaaatactttatggaactatataaagcaatataatcagatgttccaaagtaattatttaagtactttatgtatattcatcctttacaaatctctgtaaagttgctatgagaattatctccattttacagatgaagaaactgatgtacagataggttaagtaacttccctaagatcaaactgatagtaaggggtggagccagtctttattgaaaataatatactgtgtcatgtaaatcaccaagtagattatattttgaatagtgtttttcaaaattatttgtgtaaggaaataatatctatatcagataaaatttcagaatacccttaagaacagctatttcattgaatcactttcctggagaaattttgtttttaatctccaacttgagttttgtaccttatgtttggtaggatggctccagaggtgatcttagctatggatgaaggacagtatgatgggaaagttgatatttggtcacttggcatcacttgtattgaattgggtgagtaaagagttatttgttttcattgtattttttaaaattctattttgcagatgaattttcattgtatttttaagaatcataatgattaggagttattcatctggctattacttaatgagttactggtatatgtgtgctaggcaatgcgaatttattagatttttttatactcataacacagattgctttctctctgctacattttcatgttcttatttttatttatttatttatgtatttatttatttattttaattttttaattattattacactttaagttttagggtacatgtgcacaatgtgc

SEQ ID NO: 71751 - DNA, 1054 bp, Homo sapiens
atatgacatagttttaaaatctgcatacatgaactcaactatggtgctggtttggcttggttttgtgacagtgtcttaccaatatgcctcaaaacgaggtttcatttgagaaggatagaaagcccactggcataaaaagaaacactctggctttgtataaaatttacaatgactttaaattgtgtagttaaggttggtgtcactgtgtgtaaactgagcaggattatcaattcactgaccaagttcaggttttcgatttcatttgcagtttcttttgaacttttctcttgaggcaaagcctccaggtaaggacagggcagcttctttcaccttccctgactagccaacaagcagagatggtacctttcagtgaaagaaatccaagttcttgtctttgttgagttctgataggttacctagcttgtcagtctggctcagagtttttcaccctattcttttccagattattttccttcctttcctagacacgttggaatttcattatgccttacagaatgacttagatctctgcaaaattacttgtctactaaaaaaaatcagctagtctttgaatttttttctatcaccaaataacatttactaagcaactgcttacacatcataatagagtacagttctgttcaaagcatattaaacagatagggcccctgccctcctaatgaagatgcattatggacaaacaagtaaagtaacatccattactacaacctagggtttttgtaggttttagtatctttggaacagctgattatattgctttatatggctccataaagtatttttcatgttgtttaattattttaaaagaatatggccaggtgtggtggcctatgcctgtaatcccagctactcgggaggctgaggcatgagaatcgcttgaacccaggaggtagaggctgcagtaagccaagatggcgccactgcaccccaacctgggctacaaagtaagactctcaacaacaacaacaaaaaaagactccaggcgcggtggctcacgccagtaatcccagcactttggaagtccgaggcgggt

SEQ ID NO: 71752 - DNA, 1014 bp, Homo sapiens
cagatttttattgttttgattttaaaggcaattcaatctcctaactaaagataagtagagaaaatatatttttctgttgtgaagaaaaataaataatgcatttttttttagttctgtctgccaatgcctaatgtcaccatgaggaaggaaactgaattttcaagggaagtttttataaaagttattttgaagcatttgaaccttatcattttcagcttgacataaatttcctcatcttctctgttttatcttttcactgaccatcaacttccaattcatggtttctagtgctcattacacctcatgccttttttaaaaagaataaggagtacatccacaccttctcattctaaattaccataatgaaaaatgaattttttgaattatatttttaaaactttttgctatataatacctctattagctttagtagtaaccacgtgcaattctttgtagtaatacaatagaaatgtaatttcctaacccctaatccttgtttgttttgatctttcagggtcttctttttactgtacagagttatttttaaaatatcaccttctatataacatgtacctcaaatgccttagagttgcagttacaattaaagacagagagaaagggtcacaggcaagaaagaaaaggtatgtgtgtagttgaggtttattggtaggtggtcaatacggaatcattgcaggtttgtttaggctccaaaaatgtcacataatttggaaaagcagaaaaagcagttaaaattggcaccaattttctcagcacagggaatactattgataactggatttagcctttaagaatatgcctttgtaagtgtagcagctgaataggttttcttgttcgccatgtctgccttttttctcatttgtattccctccctctgaagaaagctctacctttaagtaactagtatgacctacctgcaagtacacccaggaatctgggcccccttacaacatgcagtaattactaaatctccttctggctatctgagcaaggttt

SEQ ID NO: 71753 - DNA, 1031 bp, Homo sapiens
gttcgggtagatcagaatatttattcacctagtattcttagttccttgattggttgtttagttggtttcagcagtttttaaattaactttcattattctgaatattattttaatctcttatagttggtgatggaatattgcttaggctcagcctctgatttattagaaggtaagaaagaaggaattaaactctcctttctgttttactttgatcagaatgttatctaccgccatactaaagtgtagtttgggcagtctaattgaatgatggcttgagctttagggtggtgtggataagccatgcacacttcctctcttcaatgccactgaaagtgtctgagtgatgttagcagtcttcctgctgttttagttcatggcccatccagggcaggtactaccaaaatgtttggctaatgtgatatggtacatgtagccaaaaacatcatattcatgggtatatgtgaaagagaggtagatagtctcacgttatattgatgttaaaccctttcagaaatcttgactgaccccattcctctctgcagatgctgctataaccagaggctgtgttaaaaatttactttaaaaaaaatatcttgagccaggcacagaggctaacacctataataccagctacttaggagtctgagacaggaggatcacttgagcccaggaattcaaggctgcagtgagctttgattgaaacactgcactccagcctgggtaacagagtgagacccctgtctcaaaaaaaaaaaaaaaattaaatcactgttgatctctgaatagaaattgcttattagcttctttcacaaataatgaaaacctgtagtttgaaggggtaattaaagatggctttgtggcagaggaggaaaatgtaacctagaacactccagacattgaaatgttggaagggactggttaatttgggcctggttaattggaatcagtgtggcttggcttgcaactgataagtaaattaacaatgcatcatttaaggaatatcaggctttctttgttttatttttgttttg

SEQ ID NO: 71754 - DNA, 1047 bp, Homo sapiens
gggtttaatatatcaaaccaaacaaaaaatgtcatattcccaaatgacccattctggcttcaccttgtaaactgtccatcaatggagaaccagttaaataaataaatatgatatgaccatataataaaataaccacttaaggaatgaggtaatctatgtgcaatgcaatatgaaaagatgttaaaaatgttttggtcaaaaacaagctataaagtagaatccaatttttgcaaaatagtaataatgtgagtatacgtgtagaaaaaattataaaagaattgcttcttttccgagaaaacaacaaatggcggatgacgccggtgcagcgggggggcacggaggccctggtggccctgggatggggaaccgcggtggcttccgcggaggtttcggcagtggcatccggggccggggtcgcggccgtggacggggccggggccgaggccgcggagctcgcggaggcaaggccgaggataaggagtggatgcccgtcaccaagttgggccgcttggtcaaggacatgaagatcaagtccctggaggagatctatctcttctccctgcccattaaggaatcagagatcattgatttcttcctgggggcctctctcaaggatgaggttttgaagattatgccagtgcagaagcagacccgtgccagccagcgcaccaggttcaaggcgtttgttgctatcggggactacaatggccacgtcggtctgggtgttaagtgctccaaggaggtggccaccgccatccgtggggccatcatcctggccaagctctccattgtccccgtgcgcagaggctactgggggaacaagatcggcaagccccacactgtcccttgcaaggtgacaggccgctgcggctctgtgctggtgcgcctcatccctgcacccaggggcactggcatcgtctccgcacctgtgcctaagaagctgctcatgatggctggtatcgatgactgctacacctcagcccggggctgcactgccaccctgggcaacttcgccaaggccacctttgatgccatttctaagaccta

SEQ ID NO: 71755 - DNA, 1012 bp, Homo sapiens
attacaggcatgtgccaccacgcctggctaattttttgtatttttagtagagacagggtttctccatgttggtaaggctggtctcgaactcccgacctcaggtgatccgcccgcctcagcctcccaaagtgccgggattacaggcatgagccaccgcgcccggccatatgtccattctttatttgggtttttttgtccttttgttattgagttgtgagaccaagaggcttttaatatttgtatgtatttgtattgccaccaagtaaaatgtgttagaaataatttaatggcaaaccttatttttctacaggtactgaagatttaccccccaaaaaaaattgtcaatgagaaataaagctaactgatatcaaaaagcagagcctgctctactggccatcatgcgtaaaggggtgctgaaggacccagagattgccgatctattctacaaagatgatcctgaggaactttttattggtttgcatgaaattggacatggaagttttggagcagtttattttgtaagtacttaaaagagtcttttagatagatcagattaagaaaggttggactctaggcctggcacagtgactcacgcctgtaatcctagcactttgcaaggccaaggtgggaggaaagaccagcctaggcaacatagcaagaccctgtctctacaaaaaactaaaataaaataaagtttgaactctacatgttctctacacatagctgttgctcgtaaaataagcttggtttcagtgatttttctataaattaaatgatatctaccgtagaggcaaatagtcattgctgaaaagccagttccagaatcctaggctttattcaattcagtggtatttataatcaattgactcacttattaaagtagtataagaaagttaagagcttcagccgggcacagtggctcacgcctgtaatcccagcactctgggaggctgaggcgggcagatcacgaggtcaggagatcgagaccatcctggctaacacggtgaaaccc

SEQ ID NO: 71756 - DNA, 1095 bp, Homo sapiens
ttaagacagtaaagtcattatattatgaagctattgtagggattaaaggagataatatatataaggttttagtgctgcctggcgcatagtatcgattaataaataccaaccgttattatttcaacattaattacaccaaaatgaatttttgtaatatctctacaatataatttacattctataccctttgctcacttaaaatgtgtaactgaatgatttttggtatagtcacagttatgcagtcatcaccacagtcaattttaggacattttcatcaccctgaaaagaaagcctgtatcttttagctatcaccctccaaacccccatctctaaccaataatctactttctgtctttatagatttgcctattctggaaattacatgtatatgtgtgtgtgtatatatggaatcatacaatatatggtcttttgtgactggtatctttcatttggcataatttttacaaggttcattcatgttgcagccaatacttcattcctttttactgctgaataatattccattatatggatataccacattttgtttattctttatcagttaaaggatatttgggtttttccatcttctggttattatgaataatggtgctatgaacatttgtgcacaagtttttgtgtgaacacatgttttcatttctcttgggggtatgtgtgtacttagaagtggaaactctgggtcaaatggtaactcggtatttaagtttgttatgaactgcagggctgttttctaaaatggcacagctaccagcagtgttggagggttctaatttctcagcattttcacaaacacttatcttactttttgactatcactatcctagtgagtatgcaatggtatctcactgtggttttaattttcgtttctctaataactaatgatgtttgaggatcttctcatatgttaatggtcatttgtatatctttttggagaaatgtgtattcaaatcatatgtctgttcttttttttttttttgagacagagtttccctctcattgcccaggctggagtgcaatggctcaatctcggctcaccgcaacctcagcctcccgggttcaagcgattctcctgcc

SEQ ID NO: 71757 - DNA, 1097 bp, Homo sapiens
aacctttagtggctgggcgtggtggctcacgcctgtaattccagcactatgggagaccaaggcaggtggatcacctgagattaggagttcgagaccagcctgaccaacatggtgaaaccccgtctctactagaaatacaaaagttagtcgggcgtggtggtgtgcacctctagtcccagctagtggggaggccgagacaggaggattgcttgaacctgggaggcagaggttgcagtgagccgagatcgagccactgcactccatcctgggtgacaaagcgagactctgtcttaaaaaataaataaataacccttagtaatttaaacagaccacaaatagaactctgttaataattcacaaaattatcagaaaccttaagtaccgtagacccataaaaaacatctcaaaacacattttatgccttcaaagggtataatttattgatttttttaaagtactatatttgaactcaagatagctataaatggcaaaaggttatatgagtttgttgaatgttttttgtgaaattgagagaagtttatatagggaagaaaaaactgttgaaacaagtgaatattattcaaaagtttggaagattttaatattttgtgtatttgagggatcctacattttaactttttttgtataattatattttcaatttaatcttgtattttttactacctggtcttaaagagtttgggaccagtgtaacttatgaatttgtcattgcatagtatcatgcaagtacaagaggaacacaggaaccatgggaggaacttgccagcttaggtaacaaagagcaatatgaaatacaaatggctttctttctaacaaatatgaaagctagggaagtagtaccttccaggatatagattatgggctctggcatagatttaggtcagaacaacaaagcgcatctgcctgaatataaggtgatcacaagtacaaggataacctcaacttttcataacaagattattttttaaagtttattagccaccttgaatataccaacttctggaaatgtaaatgaaaaagtcaaatatctatatggaatatttaatatgttggtttatatccaagttgatagtaac

SEQ ID NO: 71758 - DNA, 1057 bp, Homo sapiens
ccccgtctctactaaaaatacaaaaattagccgggcgtggtggcacatgcctatagtcccagttacttgagagtctgaggcaggagaatcgcttgaacccaggaggcagaggtggtagtgagccaagattgtgccattgcactccagcctggacaatagagcaagactccgtctcaaaaaaataaataaaattaaaatttaaaaaaaaatcaaaaaggaaggtcctaagaaaggagagaggtgagcaaagaataaggaaatagttaggtgatagacacatacaactgttgaggaacagaaagaacaatagaatcaggaagaaaagagcactttacaaaatatccttcagtatactaaaaagtgtgagtgtgtgtgagtgtgtgtgcgtgcatgtgtgtgcgctatagtgagattatttagaaaacttgccctgagttcattttcacttagggttggttttagatttgtgagctttcttgactatgctaatcctcgcctctttggtactcaacacccaatcctcccacacaaacagagtctgtcagaattatctcttttatcacttgatattcagctcacatttactttctcagacttttggaagttaccactcagacagatgcaaattcagtgcgatgcctgccaaagtgctgagcagaaaagagactttcttttacaccttccatcttttgagcttttggtcctactctttcaatttttgctaaatagtaaatggggatattgttgtttttcagatgaacacgtgagtacatttgcattactgagcttgctgtctctagttctaaagagattctttacaatttccgtatcagcaaaggaattgccttgatttcctttgatgatgtttccctgctgatattctagacctagcacagaagcaattggtaccctcgtgaaaatggctcttgcccagtaattctgctttatttgtacatattcagctttaattacaggggtaagtgggggaaggagaagaaagccaaaaatacccactgcccccaagtggaagaacaagaagaagcttgactccctcaac

SEQ ID NO: 71759 - DNA, 1051 bp, Homo sapiens
cacacccagctaatttttgtacttttagtagagaggtggtttcgccatgttggctgggctggtctctaactcctggcctcaagtgatccgcctgcctctgcctcccaaagtgctgggattacaggcatgagccaccgcaccggcccaaattttctattatatcttttgtgacattttataattttcttccatcccagttcttacacattgcttttaaatttactcctggattttttgggttggttgttgttaatgcaattgttaatgggatcttttccacctttccatcttttccaggctgcactacagcctgggagacagtgagactccgtctcaaaaaaaaaacttgcaaaaataaaatatactcacaaaaatagcgatgacattaggtccttttgtagcaacattgccatctcagataagtgaaacaacaaaggaaatggaaattatgtacttggtaaaaatataggtgatggtagaaaaattatttttctgaaagtttaggttctctttttttgaaatgtcttgtaatctaactggattgctgaagcatatattttaattatgagtcgaaggcaaaatgactagttttcttgtttgaacttttttatgaaaaacatacttgcagccaggcgtggtggctgtaatcccagcactttgggaaaccgaggtaggaggattgcttgagcccagtagttcaagaccagcctgggcaacatggcaaaactccattctacaaaaaatatgaaaactagccagatgtggtggcgtgcaccagtagccccagcttcttagagggctgaggtgggaggatagcttgagcctggcaggtcgaggttgcagtgagccgtgattgtgccactgcactccagcttcggcgacagagtgagaccctgtctgaaaaaaaatgtgtgtgtgtatgtttgtgtgtgtgtgtgtgtatttgcatgtatacatgttaaacaacagtgttaaacaatatagtaatatacaacttagaaaatagatgcccccaaacaaatataaaagttacaaaccataccaacctttt

SEQ ID NO: 71760 - DNA, 1065 bp, Homo sapiens
gccaacatggtgaaatcccatctctactaaaaatacaaaaattagccaggcgtggtggcgggtggctgtaatcccagctactcgggaggctgaggtaggagaatcacttgaacccaggaggcagaggttgcaggttgcagtgagccaaaatcgcaccactgcactccagcctgggcaacagagtgagattctgtctcaaaaaaaaaaaaaagtacctgttgaataaactcgtgaaaggggaaacacggtggagatcttagttctgcatataaacactatgtggaacaatacatttatgactgattcagtaagtggaagttagtgtctaaacatatgctttctgaaaataagaaaaagggtcctgttgggattcagaagattataactttatagtcagttttatataatagtgtcactctttcagtcaaaatgggtctaaaattaattgatacagagcaagtggacctttcaaattttatttagcaataggaattaagaaggatcatgtttgtggtctgtaagtagatctttttcaggaagacataaaatggaaattctacatgccaataatcctaaggcttatttatgaacattatattttaggatttttatagaagttcttcttctgccagaaaggaaacttgagtttgagaaccagtctccaaggacttgatattgaatgaacttaactctgtctaacacagattgattttagtatttctggcaaaagatcaaaatagcttacacatagcatttataagaatgtttaaacattttccttcactattattatttcttaatatatgtttttctttcaaagtgaatatacttacattatataaataagtgtttcaaacttgtttcaactttagctttcatgctatgattagaaagttaagaaattgaactttcactaattctagttcttaacattttcagaacttcagcttcttcatctgtaaaagtaggataatagtgcctacatcttgggattcttgtgggagttacttgatataatatacataaagcctccagcacaaagtaagcatattgtagatggtggtg

SEQ ID NO: 71761 - DNA, 1176 bp, Homo sapiens
attctatacctagatatattttgacagcctttcagaattttttttaggtaaagtatttttaggaatagtaattaggacagttatagtacatatattgttttctatgctgctttatttcttttactttaacagtatatcattaccgtatcaatattcatctgtctctaaatataacttccacttcattttcaagcctgcatgcattgttgcatggatttttcaaagtggattttttttcttagtctttattcttacaaagtgttctaagtcgctccttaatcaatatctctgtccccaatacaactcttggtttctttccagttataaggagattctacatcaggtagaccataagaacttggtttccaggagcatgagttcatttttttttttcaagcaggatgggtgagcagcattattacattgtatgtcctgacaaaggcactcatggcttgaaaactgtctgtttttttctccacccaccagaacataagctagtgtctgacatttcttttgagcagccagggcttgaaagcatgcacttatcttcccaaacacatggctttttccttggtcttcatctgctctacaggagctcctgctacaagtcttctcttagactatcaccagccttccttcctcttctattcctgcctgttcaggatttgtttattttgttcgttttgcattcaaacttcttggttatgaacccttttgagatcatccttaagaaaggagaaatgttgaatttgtccaaagtaaccggttattacaggcatttaattaatgaatatttcttgtccattttgaagactatatttcagcctccttaatttaatctattctactttgtatcattttttaagtttctatcatgattggccttaaaaaatagacatttcattcccatcttagtaaaagtcttacttcaaatttatgtcactacactaaatataaatacaattttagtggaagctgcttccagaaagtggatatggttcagtaagattggttttttaacactttgcttaataagtaagtgattcagtagactaacctcatgaaatttgctagtgatcctttaactggctaacaccttggaaaaacagattaaggttctaattagcattgacaaggtgaagaggggcatgggtattaacaagaggaagttaacca

SEQ ID NO: 71762 - DNA, 1112 bp, Homo sapiens
cacaatctgagactctagggttcatatcttgtattgggtcagttaactttgttgacgtattgaaaatattaaaactaattcttacataagcagattttcatagggatgtgttagcaaaacagatgtgaaatttaggggacacccgcagtcaattcactaaaccaaacaaggaaactccttataggatacttgaaaaaaaaaatgtttagccgttgtgaatatacttttagtgtttaaaatttcagggtgttaatctgtaatgtaacccctttgtctcctagccagctcctggcttattccatgtttttccttgtttctgagaattcctaacataatagtctcaaggctcattacatcgctggtaaaatgcactgcacctcgtgcacctttcccattcagacccttgttgcctcgttcctggactaccacaggggcctgccttcatttcagtctctttttcccaactcatcatgatgaatcttctttaaatgctacttctagcatgtcactcccttttcagagagcttcagtggttccctgttttccactatgttaaatctaacttcttctgcttgactttcgacaccctttctgatttgcctgtacactatttatccagcttcatttcctatgatcttgggcctattctttctgttctattgaagtcggtctctcaaacacaccaaactcattcaagtctctgccttttacttcacccaaaaagcccttgcttggagcttctcgctgcctacgcagattttaccattccttcaagatcctgtgtgaagtgtactacctgttagatgcttttcctactcctactattttcctgcaaattctcgggtgatttttaatttagcaaaccaatgaacaaaaatctgtgtagtgtcttctatcacacactcttgtatcttcactaatgtaaacattttgaatacaaacaccatatcttttagctaaatctttcacagttcctagcataaggcggaggaaactgattttgaagagaaagaaaaaatagtaaatgtatttcatcatgcttatctaaagtcaactcaggccgggcacagtggctcactcctgtaatcccaacactttgggaggtcaaggta

SEQ ID NO: 71763 - DNA, 1032 bp, Homo sapiens
ggaagtgggtggtgcttcgtgatgacagattattgcagattatatggctgcctgccaaaatgacactcgttgaagggaaaagtagaagttacaaactccatcctattaatttgtacatgtttatttaaccacttataactgtttgcttgttttatacatagatgacaagttttaaactcctgaattacttaaaacgtgcttaaccttctctagtttattgtggctatattccttatctctgatctgcaaagatcacactgacccttttgtggaaagccacgtgttagcagaaaaaagatgggggaaggatgacagaatttaaaactacagctgctttgttttccagttaaaaatagttctgagttaaaaacgtaaggatgtcccatcacatgtggacaatttatataaaatatagcatactaatacaaataatcatgtcttatgaaaaagtttatagttctagattgttctggtttagcttgaaattgagattcttactgttgcaacataaaaggaagctttgtgaaggaaatatgacatctctgcccagatgcataaggagggaattacagtggggagttatttttagaagtatcttatgaatacatttcatgtactgagaacattttttaaaggttagtttcactggtaggagttatgcaagttgctcgggtcactggatattctattaagaaatcatttttatgttaccaaccaacctagttagtcttaaactggctgatctaagtagtagcttgcttgtttatttagagacagagtctcaccctgtcacccaggttggtgtgcagtggcacagtcatagctcactgctgccttgaactcctgagctcaagtgatcctcctgcctcagcctccccagtagccgagactacaggcatgtgccaccatgcctggctaattttttaaagtttctttttttttgtaaagagggagtcttgctgtgttgcctaggttggtctcaaaatcctggcctcaagagatcctcctgcctctgcctcccaaaactctggg

SEQ ID NO: 71764 - DNA, 1029 bp, Homo sapiens
taaaaaaaaataaccaggccgggcgcggtggctcacgcctgtaatcccagcactttggaaggccaaggcgggtgaatcacctgaagtcaggaattcgagaccagcctaaccaacgtggtgaaaacccgtctctactaaaaatacaaacattagccggggcgtggtggcaggcgcctgtaattccagctacccgggaggctgaggcaggagaatcgctcgaatccgggaggcggagcttgcagtgatccaaaatagcgccctcgcactccagcctgggcgacagagcgagactccgtctcaaaaaataataataataaccaaaagtcgttaagatggagccttacagttccgtatgaaggcttacagcagccacacattgcaaggtctttttggttctcaaactgttttcagtctttgtttagcaggatgcaaatacttcccaatatatacaataacacattttacactttctatactactggagtcgtatacaggcaaactattgtaatcttagagactaccttgatatctaatttggtgtaatgtttaagccaacctgaataaacattttcattgccggccggtattcatatttgttgctatcagtagcataggggaatagatgaaaactgttggtacttttttaaaaattagagtcttaattaagtgcccctttttttaaaataattttttccctagttttcatttcttccctcgctctccccaccccccgccaaaaaaaaatagaagggagagagggagggaggattttgtgactctccgaaaaaagatgacttttcagtaatgtatagtttttgaattcatatttttaagttgtaggatattataagattgcatatcagcatagggaatttaatttgtgacaatttagctttatcacccatttaattggttgctttattatttgtaagctatgttaaaagtttttttactgtttcttaggctcagctaagtaaaagaaacataagtgatatttatctatacacctataattatagattagttatg

SEQ ID NO: 71765 - DNA, 1087 bp, Homo sapiens
gaggtgagagcaccggggcgcggggcatgacagtgggagccgaggcggcgggaccccaggcagagtgaggggagttgcgggagcgggctcgacagtgcagactgtggagaggagaccccgggagggaccgggacagcgggtgaggagaggggactccgagagggaccgaggcagtggctctgagtggagaggactccgagagggtccaagactgaaagtctgaggggaggggtctccaagaggggccgggacagtgcgcgtgagaggaagggacccggagaggggctggggtagtggggtgaggggtgggtgcctcatgaggcactaggatagggggatgaggggagggggtcccctgaaggaccaggtcccagaaaaggtcagggacagcggggagaggggaagggtccccgagaggggccggcactgagagtctgagagatggggaccccgagaggggctgggacagcacccggggagaggagaccccgaggtgaggggaggggacccagagagaatccaggacagagtaaagagaggggaccggtcaggggatgtgaagacaggggatccccagagggcttagaacagagtgtgagaagaccccaggaagggccaagacagtgggagaagaggaggggtcccggaagggggctgggctgagacagcggggctgagagcaggacacctagagagaggccgggacagcgggtgggagcagggtgaccccgagaggggccaggacagcggggtgagaggaggggacccccagagggctcgggacagcgcatgcgagcgtgggactccgagaggggctttgagcgtcgggtgcaggcgcggaccccgagggaggagcggtgccccatgggtgcgggtcgggcccccagtcacatagcgggggcccggcgtgagcagcgagggagcgggcggggggtcgcgcccgctgagttgcgggagcccccccaagaacggctgcggcggggagcctgggtcgcagtcgcggcgtcgggcaaataggaaccggctgcagcgcagacgagtggagcggggaggtgctcccagggtctggcatcagcgacctccctga

SEQ ID NO: 71766 - DNA, 1073 bp, Homo sapiens
attgcagaaggttctactggagagcgttgacctagaccttactgaaggagaatgaaccttttccagtaaaggaaggcccgttgattcagactgttgcagcaactgatcagaatagtgtggagatattggcaattttccactccccctcactcactacagacccttgatccactgggttgggtagactttgaatgggcccctagtggtttctgctgtgtgccttggttaagaaccagagttaactttgctgaggtgtgtcttcctttggtgttactgaaacagtcagtgttgatgctagataataattttaggaagcaaaatgtagagcagatttatattcacaataattttatttttcaaatgttcaaaatcaggtacattacaggaatatcagaagagaatgaaaaaactagatcagcagtacaaagagaggatacggaatgcaggtaaggctcctttaaatggcaatgaatcatctttcaatgtttgaccatttgccgatcgtcggtgtaatgcagccctaagagctattctccaaaacatatcccagatactctgtcagggagagttttcagaaaagagacttccaagctgcagttatggaaagtggtttcatcttctgcttctgttgctaaggaatggcccagaagtggagggtgtctgaggaggctccttggagttaggttgttctccctggtaccccaagagtagtcttgcaccctcttgctcatttctgcatggctggcctgatgtacagtcagaagtgcggatgaggaaaaggattgtaggttgtttttgtcccattttaagtttttttttttggtattttgtgctaggattggggagggtcttcttgttattttccccaagtattgtttttataagaatttagagaaaacgcacacttgattagttgtatacagtaaatgtattcattcaacaaaaatgaattgagcacctgctacatctaagcactgcgagcaatataaagtcatgtaacacattgctttgactttaggacacttggtgtttcattgacaaaagataccacatgtataacgtgtaaagttaag

SEQ ID NO: 71767 - DNA, 1026 bp, Homo sapiens
cttcctcatagagagagttggcaaaagaaatgagctccttgaaggcctctgaaagcagctcagaaatgtttttttgtgagaatggatgccaaaacagcagctaacagcagcttcaggcagtatagtcttgttcttgtgaaagtgcttatttaatgagaccagtagcaccgtggtaccttatctggtaccagtctgcctgccggcttttggacctgcacaccattttctctgacagtggctgtgactggcattgatgcctcattgttctctgctagagccaccagatgtttgggagccttcattaggctagtgggaaatattatccgtttacagctgctccctttccgtctgtggggaacgggtatcatcaccttacctgtgatttggcgtcctaattattgacaagcgatagacattgtttggccaggcagttttacagccagaatcttaactgggacaggaggcatcctcagtgacttgaggctgagcctgccagggtagaaaagacaaataaatgtagggaaatcatttgtaacgcaataaaatagattacagaagtgtttaaagctagccatgggcattaaaggtatggatgtccttcctcagggcacctttgatacccttggtatggaaagcactgccaaggtaatgatggagtgttggaagacaaggtgctggagctagaagggtaattaacatttccacagatggcgctgctatggtgttggattaaaggcttgatttcattcctctaattgagtgacttagttcatctttgtggattgatgcccaatatcattgttgcccagctctgccctgaaaaatactttttaaagtctccttttttggttcaacatgaacgtctcttgaaaagcaaagtaggataagacgctgatgagaagcttagtctaaataacccactggaaacgggtgtatttggcgacctgctctttcccaccatgacttaaagcgtttataaacctccataggaattggcaggatgtactgttcaccgcccaaacctct

SEQ ID NO: 71768 - DNA, 1479 bp, Homo sapiens
tgtttctgttcctttcgaggagatggtgaatagctctctgcccaaaatggcttagtcatttgtgtaccatcaggaaagggcataacttcaggttgcttctccttcacaacaggagttaagttgctgagggaagattggccttaccttgggtgagtgtgtgtggaagtctttagatctttggaacaaaagcgctttatacattcatgatgaaattcttattttactgtttcctttgctgtgttattgtagatgcctaatgaagctcattccaccttctcatcctagcagtgggggatgtgaattcttttatgtattgaagtaccatgacatttagtaggagaatcataaatttctaagaagcaaactgttactgtagaaacatcatttaacaaaatcatactttgtaaattctaaaatactggtaccattgtgttgattactctttgcctggaaactgtacttttcacatacagtcctttaactctcaacaccccagctaaactatttgttaacagatgaacagatcatggaggatctgagaacattaaataaggtacggtttgacttttttgatttatttgaaaactcaggcttttgtggttttctgattttgtttgttaacatgttacttgttaatcattatgatacctttgacacctgaagttgcacctgaaatgattttctctaagattttttgttgttgttcttcctacagcttaagtcacccaagagaccaggtgagtgcatgatgtgttggcatttgtgcaacctttttatcatgttgttggaaaagggtgtgaatacctgtcaggaaatggttgcaattttcaaaaatgaaatgttcatcatttgcctaagagtagtcatcatgaaaactgaaggggaccttaactatacccctccctgatttctttttttttcataacccctgctttgttgtttttatttttttcttaggatttatcataaaagagacatttgattgattgattgatttccttctgtgtaggcatcaggcataagatttaagtacacatccatttttgaaaatgaaaccagaaggatttttaagtattactggctttctaaagccaagtcctaggcagttctgctcccgtggcttttcgtggcctgactctggtaaggcattccaaggctgctctgactcgcagttcatagaagagaccaaccagctcagtattcatagttgttccttccggaacagcacttgagatcatcagtgctagctgccaactagaattctgaattggtgacatcttttttttgtttaaagcaccatgattactcgattactcgattactcacacatccctctacttactgagtcttgtggaagaaaacaagagtcttctttttctaggtaatatcttcctgggggccactgcggtccacagacatcctgaccttctgaggcacgatggggaggggtgagggagttgtgtgagtgtaaagttagta

SEQ ID NO: 71769 - DNA, 1338 bp, Homo sapiens
caaaattggggtaatgattatttattttgaattcttaaaaaaacccagcattgtgttaggttggttacccgataacattgtacttgtcaaaaatgcttagggttctagtcatggccgaagtaaatcatttccacctattaagttgcagtgagttaattgcccagtagatgctggaggctggctttatctctaaggctgatcttgatgacttcttcccctctgagttggtgttctttggcattcttcagaaaggtcggtttgtgttatatcttaacattatgtctcagaacacatcgccactaggtggcaggctctaacagcttaacactgagaagggcaaaatgagatgaaaaatgtttctaataatgaaaaccaaataacctttaaagatcaagcccacacataagaaccatctttgaaaatgatgagatttatcactaacatttttacaaatctatgagtcttaaagccatgtgatatttccagtgatgttcattttgtaattgtgttgctttgaatcttcctctttctaagcttaatcctcagactttacgagacatgtcttgagggtgaaaatgcagtaaaataaaattcttgtttttttaaagaagagatccacaatgtctggtgtttcctaatgtaaacaaaatgatcagatttgatgtgttagaactcctaagcattttgaaggaattttcaccatctttcttacattaacagcagaaatttagaaaataatgtcactggatgcattttactttttcagtgaaattgaaattgcttattctcttgttaaatatactttgagaatgttgttttttttctctattctgtatacttttcatttttggccttggcagtcagagatcataatgcagttgttgaaggtgggtctccctcttccccaatgacaattgaaaagtgttcctgggaatactggctgaggtgttcactggtgcagtgccagcctctcccatctcaccaggctcatgtttggcttttgtatcagtttggaggttttgtttttctttctttggcagacgtggcctgtggctgagaggtcagctacattgctttatgctctttccagagggtatggagtattttggtgcagccgtatttttggcagaagatgtcttcctgagttttaaatgacttcagcaaaacaaatgggattcaggcatcgcatcttggtgtgaatacttgccaagctccctttcattttgaaagataaggatcttccctttgccttggtcttatactgcttttaaggcattctatatcatgctatgtaaatttgcctcacattttgatttggactaatgatctctcaaaaaa

SEQ ID NO: 71770 - DNA, 1322 bp, Homo sapiens
agagagatggctgagaaacgagttcaaggctgatgcctgttcccagcggcatgcctttagatggcccgaggtcaggggtgcttatgaagccctcacaagttgagacagtttattccagcaagaggctaccagccttctgcttgcatctcactcgtgcagatattttgatggtgtaggagatttgctcttctgtatttaacttttcatcttgttccctttcctctcccctgcagatctgggtgaggaagacaagtgacagcaccaagatgaggatctacctgggccagcttcagcgcgggctcttcgtgatccgccggcgctcagctgcttgactttctacagtgctcttctcttgaccctttttctggagtgggttttatttttgttttgtttcgttttctccttaatagaaaaatgttaacttactgggaatagctactcagccttggaaatggagagcactgcagtgaattctttagggcacttttgtggccggatgcttccaactttgtcagtcttttctgcctcaacttcttccagacatcagtcaccatgagactgttttactttcaggcgtattggggggtttgatttactttccttttatttctttattttttgcttatacttgtttttgaaaacctcctctgagtttgaagggacagctatttttattgattatctttaagtctctctaccatggagaagagcaggaagggatacactctccagtgcattttcatgttttgaatctgattagtggatcacgtagctactttccctgtcgcgtccaattcactatttgcccagaagcttggggcagaggtcctagcaggagatgatgaattctcgtggctctcggccttctcagagaaataaatgctttgtgtaacatctgtgcacaccatccattccgctcgctgagcgatggaaaagcttgcctggaagactatgtgcactgaagtaaatggggttgggggaggggacatttcatatttataatgtgctgaaggtaccatattttaaatgttatttaatgcaggtgatttattcaaacatttgttctagcttaagctggaataagcagtggtcatttcagaagttttcatttgtaattccttcctctcccttgttcccaagtaggtagtagtaagtatgtgccacaggctgattatctgggtaatcttttacgggtgggaggtgagattgatagtgcaataatcagtgatctatagaccctcatgcacgattcaagtttcactcttgtggctgatgccattattgcacattggccattccaaacctgtggagaactttgttgt

SEQ ID NO: 71771 - DNA, 1026 bp, Homo sapiens
tccccactgaggatgtccccacttggaaatgaccagttcaggcattaacaaaacccaccttccacattcctccatcttttcttcctttatatcttaccttaggtttttccccttccggatttccaactctctccctccccccgctgttccttccttttatttcctatctttgcccataaaattaggaagcagtagtggttaacagctagggatttggtgtcagactcatctctaccatttactacctgtgtgaccttgagtattttaatttctcagagcctcaggtccttactctgaaaaatgaggcttattgtgaggatgaaatgaaatatgtaagtatggtgcttagaatcgtgcctggcacatggtaagcactaaatttctattagaagtgattattaaattcacaatgaatcaccatgtggactcaattttcctgagtaaatggttttacatctgttaagaataggccgctagtcaagggtgaatttggtctggcttcatgccatggttgagaagacagaaccaggttgaaacatgacctccccaacatactgactttgtgaccttgagtgagagacttaaactctccaggcatcagtttcttcagctgtcagatggaggcaataacagtccccacctgcagatcacgaggtcaagagatcgagaccatcctggccaacatggtgaaaccccgtccctactaaaaacactaaaattagctgggcatggtggtgcacacctgtagtcccagctactcggtaggctgacgcaggagaatcacttgaacctgggaggcagaggtttcagtgagccgagatcacgccactgcactcagagtgagactctgtctcaaaaaaaaaaaaaaaaaaaaaagtagtccccacctctcagaaatgttcagaatctggtgcatagcaagttctcaatcagcagttattattagaattgcagtagacccttctctttacagcccataaactccccttgtacatttttagcccttctccctctctctgcttagtc

SEQ ID NO: 71772 - DNA, 1037 bp, Homo sapiens
cccaactatctgactccattactttctactactttgggttttagtttttttcctcttgtcttttggcattaatgaggtacctgctctctaattgcatgggctacatggttatttaatactccaaggatgacttgacatcgattatttgaaaatgcgtagctgagaaagagagagagaaaaagagggagagagaaaagaaagcagtttactggctcaatgttattgcagggaatagaatagttcttgagaaacatgttggctcatactttcaaagtgacagattattgctttcagttatattagcagatggattctgtttaaaggtgttgagtatttctcctctgctgccagattgttttaagtaggggaagcaaatgggaggagtcccaagggccttgggaaaacatattatcaggcacaagcttgaacctactggggaagttttacaggggtcactggctccccacctttgggtgtttgctcaagccgttttcccaaaatgaaatatcttttcttttttactctgcctgtgcaaataatattcaacctcagagaactagtttctctttgaacctttccttgatcttcccagcctctaatactgttcccctctctaaactggttgtactgggttgaatagtattcccccaaattcacatcctcctggaaacctaagaatgtgaccttatttgaaatagggtctttggagatgtagctggttaacatgaagtcatactggataagggtgggtcctaaattcaattattggtctcctaataagaaggtgcaaagacacacagaaagaagacagccatttgaagacagaggtggagactggaatgatgtagccacaagcccaggagtgataggatttgtcagcagccacgagaagctagaaaggagcaagccaagattcttccctagagcctctgagggaacatggtcctgctgatgtcctgagttcagacttctaggccccagaactgagagataataaatttctgttgtttcaaggaagcagtttgtggtaatgtgtt

SEQ ID NO: 71773 - DNA, 1021 bp, Homo sapiens
aattccagcaccaacttggctgactacatagtccttatccttaaccactattctatgttagcaaggggttgagggtagggtgagggtcttggagagtgagacacagcttgctcaatggaatgagaggcagcatagtaaagtagttagatatttagactccagagccaggctgcctgaacatgcatcctaactctgctttcagctgagtgaccctgtgaaagttacctaacctatgtctcaattttctcatctataaaatgaagacagcaaggacttttacctcctaaggttgttatgaggtttaaatgaaataatatctgtagatgtgtttaataagcacttttaaagcactgcttagtaaacactatgtaagtgttaaataaataatttatgcatctctgtgtgccaggctttgtcaccaacattatctcattgaagtaaacagaaaatggaatatgcaagggtgagctctgatatcaaactgccttggtttgaatcctagctctcataacataccagctatgtgtccttaggcaaattactgaacctatttggcctcagttttcccatctgtaaaatgggggataataggttcttcacctctcagggtagtagtgagaattaactggaataataggcatagtcaagtgctgtgttagttataagcatttatttttatttaacccataacaatatatgacgtaggtactattattacccccatttgcagaataggaaactgaggcacaaaggaatgatgtcacttgtccaggtcacacaattgggaggtggcagcatcaggattggagtttatacctgtctgactccagtaaaactccacttttgaggggtctgttcttttttgagagggagccaccagcccctcccctacatgcatatggggactcagagggatatcattggctgaatctaggggattcttctgcagaccaaggtctaggataactcaacaaaagcaaaaagacaaacagtcattgcaatggaattgctgccttgctta

SEQ ID NO: 71774 - DNA, 1036 bp, Homo sapiens
atgcccgtggtcccagctccttgggaggctgaggtgggaggatcacttcacctcaggaggttgagactgcagtgagctgggatcatgccactgcactccaatcacagtgacagaacaagaccctgtctctaaaataaaaaatggcaaagtgctttgcacagtgcccggatcatagtaaacaatcaccacctctattaaagcagcatagacatagaggcttgtcatgaagagtatcatgagaaattctcttctgctttggaatgtttcagcctgaatattttgagatttaaaacatttctaaagcagggaaactttacgggataagacttggacaaggagtctgatttgtggatttccccttattctgagccaactgcaccatggggcttcacctatcccagtttctttgtgtcttgtttaagaaacctttgcctatctcaagctcaagatattcttctatattgcctctagaagttttatcatgtttccaatcacatggagatctacaatccacctggaattgatttttgtatataatatgaggtagagaccaagattcaaatttgtccatgtggatggccaattgacccagaacctttcattgagaaagctattgtttctccatcactctccaatggcacctttcttataaatcaagtgtccctgggctgggcacagtggttcatgcctgtaatcccagcaccttgggtggccaaggtaggaggattatttgaggccaggggttcgagaccagtctaggcaacatagggagaccccgtctctacaaaaaattaaagaattagctaggcttggtggtgtctacctgtagtcccagctacttgggaggctgaggcaggagcatcacttgagcctgggaggtcaaggctacagtgagccatgatcacaccactgcactctagcctgggcaacagagcaagaccctgcctcaaaataaaataaaataaaataaagtgtctctatgtgtgaggggtttcattctgagctctttatgctgttccactggtctatttttttt

SEQ ID NO: 71775 - DNA, 1088 bp, Homo sapiens
agtctgggcagacagcagaacacagtcatctaattagaagtctcgtctcctctggggctcggggctactggtgcatggctcccacatttcccaggcagggatgggatgcctcatcagctaggctagcagtggaggcttccccacaaaggcctgagaggcaagagtgtttcccaaaccctggattaggaagtcaggagcctggatattgcagacccaggaccagggtttacatggatgtggctgctgagaaggacatcaccctgtctctctgagcctcactgtctttatctgtatggtagaattatcattgtacctacctcccaggcttgttgggcttatgtatataaagtcatgacctcaagatcccctgacctctaccccattcctttaatgtcccccttgctttttctcctccctttctaaactctttattggtatggttagagaggaagaatatagcagtgattgagaacatgcacattggagtgacctgcttaactatatatttggtccctgactttttcagctatgatatcttgagcacatcacttcacctcactgaagcccaatttcctcatctataaattggagatgatcatcctggaccctccttgtatgattgttgtgattgtaaagtggggcatatagtaagtgctcaataattatcctctgtcattatcatgaagcaaatatggggatgcactcttacttctcatttactatgtggatgatagagcaatgttctcttccaggaacctcatcatctatgtgctttgacaacctcaggactcagcttgtgggggccctcctctgcaaagcttttcctgagagttgtcctcctcctaacctgtgttcagctttcctttcagccctctgagcttcctccatcatagggctttgcatatggcattctttaagtctgtcttctgtgctggacttggatttctttgggacagggctcatgcattaatacctgtgtttttggtaccttgggcagcacctcggacagcaccttgcatctatttggaactttgttgaaagaatgaagacactaagagcttaaagcagtgtttctcaaagcaatttga

SEQ ID NO: 71776 - DNA, 1099 bp, Homo sapiens
tttctctgctgcctgcccgggctggggcgtcccatcccccgccctgaactccgatctctcccaccccacccctctctgggtttcacccggacagagccgggagctgggtgtcgcccccgtttggaatccacgtttcagcactttggacagcgccccggacgccccggcccctttgggttggcgatggcgagcgttcagcaaggcgagaagcagctttttgagaagttctggcgaggaaccttcaaagcggtggccaccccccgtcccgagagcatcattgtcgccagtatcacggcccgcaagccgctgccaaggtaatgatctccttcttagaaggggggatcctgaaggtcctcctttctggcctgtgccccagagcccggaggggtggatgcaggcagccgggccagggcgcctgtcttttcccgtcactactcggcggctcccgctgaaacatgggaactcattgcttgtgtgaggtggaagatggtgagaagggacaggaattctttgggggaaagcaacgcttattggacccccgtagctcctattcaagaggttttgctacctgagggtgggcggtgcagatggggtacgacttgactgaaaaacttttcttggtgtcacagagtccagagggcaggtgggccaaggaatggtggatttgagatgtttggggggtgttgtaccagaaaaggagaactgagccagctcaagcagcgttcagagatagcacacatttccatcctcggctcggaaactagcgagctttgaacatttttgacaaaagcccatatgctgttccctcaaatacacccaaaacagcaccctcctccacgcctttctggcggctgctgccgctgctgctgaattctctcctctccagcatccaaaaccaagactctgagctcaggagtcagggaggagccttccaagatcgtgaagatgatcttggaagagttttattttgtttttttttgttttttttttttttttccaaaaagaatctgattgctttgaactcagggatgagaaccgatccttggatggtggtagacatggtgctgatggaaggaagaataagggaagaaatgaaaga

SEQ ID NO: 71777 - DNA, 1040 bp, Homo sapiens
aggtcttagaaatggattgtggtggaaacgaggcgatatcaaacacaagaccaagagaggtccacgccccctgctggtgaaaacaataaatagctccaccatttttcctgggcgtggttccccccagttcttgggtgggtgggtcttggtttggtctgttttgctcaaatggtgatgggggtttgggggatagggagtccgtgggagaaagagagagagatttaccagaataaatgacacccagactgcagaataccataccatgtgaggcggaaaatgccccaggagttaaggatcatcatcagaaaatagtttttccaatccagaatgcaaacagattgcagggccttgtgggtggagctggtggggaggctgggaggcagggggagagacagggtgtcaccggcccttcagaatgaggattggatttctgttgaattttttatggatgcctgtaagcctccccatcacattatagtctggatgaaaaattatccaccaaggaaaatagatctgcgtgaatcaagatttcattgccaagggccaggttatcacatggaatttctttgtgggtcagcatggctgatttatttatatgtgtaccctgtgggtgtctattaggcctcccagactgtgatcactgtggggacagctggcttatatatatgtgttgctgggcatgtggtggaactgaagctgaacattcgccgaagagaaggggaaggaaggcatggaaatgtatttgggctgcttctaagcagtcaaggccagagcccagatttaggacttgaaatatcggggttctcattctaattccattgattgctggatacgtaaatttgaataatagcatcaccttgctgaatttcagcttcctcaactgtaaaatgaggatagtaatattctctgctgagccagcaggtcaatgaagtatgatggtggctgaaatactataggaatgactaacttgggtagggattaataatgctattatatctatttatttggtgattcaacaagcacttattgagcaactacta

SEQ ID NO: 71778 - DNA, 1071 bp, Homo sapiens
ttggtttgggccataaaccacaaacctgagccctctgttgtatatcctttgtttgtttgtttgtttgtttgttttttagacagagtctcactctgctgccaggctggagtgcaatggagcgatctcggctcactgcaacctctgactccccggttcaagtgattcttctgcctcagcgtcccaaatagctgggattacaggcacgtgccaccacacctggctaatttttgtatttttagtagagactgggtttcaccatgttggccaggatggtctcgacctcctgacctcgtgatctgcccaccttggtctcccaaagtgccaggactacagtatccttttagtcttttccttcccctgtaaacatacacgtgtgtgtgtgtgtgtgtgcacagtgaacaccaggaacatgggcccagttcatgatgcgctgtaactaccgtcactgcatccccatgcaccagcatgggaaatctcagcacagccatgtttttcaacatgatctcattctctagcatgcaatggactgacaagaggggcatttccttgggaatttggaataaggaacaagacagagagattcagtgtctccttgcaacttggcctgcaacatggagagatggggcagggtgcagccatgtccctcatggggaccaggagacagcgggcacttcaggtcccaggtgggtcctgtcagctttccactccttgttctagccccttgctcaggcctggctggtccctgagtcactcctgcttctttataatcaagtcctcctctggcctcagttagcatgtgtggacctctagtcttcgcagccacagtcccagcttacacaagacacaaatacgtaaaaagacatagataattgttttacataaatgacatgatatgcttccagatgaccttttagtgccatcaactgtcctccccaccccacctggggaggtcttgtttgcagagaaaaaggacaatacctgcgtcgcttgtgtttcttggaacttttcttcttctttttcttgacaggcgatgggctataggatgaggacctgccagggccaagaagacac

SEQ ID NO: 71779 - DNA, 1078 bp, Homo sapiens
gggcctccaggtggctcggggagtctctccggcgctttctcataggcgagtaggaccgacgtctccgacgcgctcgctcgcgctcccgctgctgcgagtccttctcactgtatttgggatcccgctccctgaaggggcgcggggggttactggggagctggggctgggctggattttctgcgtgagcgcgtgggagagggacactccctttctttcccaccccactgggtcacgggatggggtctgcacgttgccgcaagggagaccggagggaggatgacggggctgcggtaagagtctgcgagggttgttagtaccgtaggggtgggggctgggcttgtgcaggggtgtcagcatttgcaggtgggcatcatagcagggcaggtgctgcaggggtgaggacgtgaatgttacgcaggccctggtgcgtgggtaagaactgggggctctgaatatggggacggtctgtagaggctgagggctggggatgtgaattctggggtatgtctgcgggactgtttgggctggagacattaggaaacaagggtatttgatgcctcgctgccactcctgattggacaaagggaactgtaagaatgctgagtcagggtcagacctaagaggaagaaggcccgagaacggggaggcggggccagagaggaggatcagagcaaaggggtggggcctaggacgggcctagtttgaggggcggggccggtacctgctggggctgtagcgggagtagctagggctgcggcgggacctagagcttctgctgggcgggctcctcttgccagacttggaggaatagctgggagagcgggagtaggacctgggggagaggtaacagcctctgaggagcctgctgagtgtccgcctgggttatccaagacggcttgagctttattcagcgggtccctgggcagtgacctttttctttctggaagccaggcagaggaactgggccccgatcaaagaatgaaagcccctccccaccggtggttaataataataccaacaacttctattttgtgcctactatcctggccacttactagctgtgtgaccttggcagatg

SEQ ID NO: 71780 - DNA, 1023 bp, Homo sapiens
agggctcttcaacatcgagaaccccaaccaggtggcacagacaaccaaaaaggtcacacaactgtatctggatgggccaaaggagctttcgaggagagaacgagaagagattgagaagcagaaggcaaaagagcgttacatgaaaatgcacttggccgggaagacagagcaagccaaggctgacctggcccgctggccatcatccggaaacagcgggaggaggctgcccggaagaaggaagaggaaaggaaagcaaaagatgatgccacattgtcaggaaaacgaatgcagtcgctctccctgtataagtaaccgcgacccatgggaggagatgccggggacctgggccgcgctgccaggacctctgctgtgtctcgcccaccctgtgccctggcgccgccgcaacagcccctcgtggccaggagccccccatggcctggggcctcctcttcattttggcacagaaattgtttgggggatgtggggggagctgggggaggggcagttgctatctttgagacagaaagatgagggacagcatttcacatgtaaccatttgaatgtttttgctgtttttagaattcagagcccttgctggggggtgcctgggagatggggtaagaagagctttcatttttctggtagatagcatgtaagggggtggttgtcccaggaggcagctgctgacaggtttgctacacccagccccggactgtgttgcctaggtgctcattcagagaggggctgtcatctgggagcctgtgcccctgggtcctcgagggttatggcttgtccctggtcagtcctgtctgatcgaggcctcgcctctctgcccctccctgcccagttcctacccacctggctaaggccagtgcccatttttaaccctacccattgatcatttcaagaaacctctgtttactgtgtggcacccaggcaaaacatgttccacaagttcaacttgtatatttggcagattaaacttgacattatcgtaaaaaaataaaaataaaaaatataaaa

SEQ ID NO: 71781 - DNA, 1044 bp, Homo sapiens
ctcagtaaactatcgcaagaacaaaaaaccaaacaccgcatattctcactcataggtgggaattgaacaatgagatcacatggacacaggaaggggaacatcacactctggggactgttgtggggtggggggaggggggagggatagctttgggagatatacctgatgctagatgacgagttagtgggtgcagcacaccagcatggcacatgtatacatatgtaactaacctgcacaatgtgcacatgtaccctaaaacttaaagtataataatacaaaaaaaggaattagcctcgaaaccaacaagggagagggagagagaggagagtcatggtgtgattaaattgtcgagacacattcccgttgctatcaatggctggtttctcttaaagagtgaaaacgcgaaccagatcagtgagctgggccatcctattagccagtaattccaaaatgatggaataaatcagcaatgacactgtagaacatcagaaaaaaattaagatgaattgtaggtttgccgtctgcaggacttactctcagagatctgctggtctccagaaacaggcatatcccctctctctatggagaggctgcagagggtcaacttttggtgttcaaaggctaggtttgccacgcaccagctgtgtgactttagacaggtgaattgcttagcctctctgaggctttatttccttgtgtctatgaatttagaacaggaacatcaactaggcagaagcagtgtgaggactaaatcgaataagctatgaaaattgtccactgtgatgttaacgctggataatgtgtttatgggacatgaaacagtgttgttgatttgaaaaacaaagaaaaatcgatacgtactgaatgactggagttaatggttcctgttttttaaatgatcataactggacgagcacaactgtaagtgtgcatttgttattgtatcctcaaaccccactttgcatggactggccaaggtcagcaatgctggtccactctagtgcatccacaaggcacagttgtggctcacagtcatgccccagg

SEQ ID NO: 71782 - DNA, 1067 bp, Homo sapiens
tgcctcccagtacctagcacggggcctggcatggagcaggtgccagtaaatggttgttgaatgaatgaatgtggtgaaatgggggttcagaggcttgccaagggcatcagtaagtgcctcaattattcagaattttgcctttcaatccaccacctaaaatcagggatttcaaatgtaaatgtcttcaagacccaggcaggaaatacaaatgagtaaattcagcttggggataaggacgtatacctccctatcaaacacaagaagagaccaggccagaccagctttgaggccgcttcaggaaaggtggtcacttaacgtgttccaacatgcctgaacctgtccaacgcctgattcagtcccataagcccaaccctgcacttagacaattccaaacaacacaatccattttaaagttccatttctctccaacccacagaatccataatgaattaaggaaagcatatcaaatataatcatgcactattgttaagttcttggcaaagttgccaaatgtcaggcagacagtgcgccccgtggtgcattccacatccgggactatggcttaagttgtcatgataatgaattgccgtgctcacttaggcttgggaatagatccagaatatcatgtcgagttgagaaaagaagtgcctcgcaaaggtgacaccttatacctcatttgcaaggcaacaatcccaaacacacatcacaggtatggatggatgagagaaggttattttcaacacagctctttaaaactgtacttgagggcctgaagtctatgtgaaggggtcacgtggatggagcagtccactcctccctgctcatctcaggaacagctctgacatctcaccaacaacctaggccttgaaggctgaaatgcagaagttcagtaataatttaagcctggaactggtgggggcattcatcaaaaacacttactcttcaacagtttggtttagaatatgaggcaggcatagtggctcatgcctgtaatctcaacactttgggaagctgaggcaggatgatcacttgagcccaggagtttgagaccagcctgggcaacatag

SEQ ID NO: 71783 - DNA, 1026 bp, Homo sapiens
aagaaaagaaaagaaactgctgtttcctccaaggaaacctttctgagggctgtcctgggccaggtggggcatcccttttgtgttcaggctgcttcctcccacaacatccagacccctgtgtgctactttcctgtttacctttccatcttccctactggactgttagctcccagaaggaaagggcaaggattagtcttctccaaccctagccccagagcattcagcccattagtgctgtgaaaatgagagtgcaacgggctatgatgcaaactttgttgtatagatgcattcatcgggatggatggtctctggagtcaaggagtaagctagaaagggcagaagttattgggttatcagaacagggaagaaaaactttcagtggctttctggtgctcttaagatcaaatcccgcatcataactctggcatttgtggcttgcgtgatgcagccctcatctaccacttgtccatcctcttcaaattctccatgtcccttctggacttgggactttgcatgcacttttccttctacctggaatgtcattccaccttctcatcacactgctggctcttcctcatccttcaggactcatctaaaagtcacctcctcagagaggtcttcccagatttccccatctagattaggtacctatgctctctatctctgtctcatagcaccctgttctcttactgtaggacaatgattagaatttgtacctatatatttatggatgcagttattttgtttctgcccatattttccagaagactgtgagctccctgaggacagagaacaagttcttcttgtttgtgatatagccccagcacctggcacctggcaggcatatagtaggtacccagtgaatgctgtttgaatgaatggatatatatgtgcgcttacttcatgaggatttccatcttgtcctgcaggcagaagccagcctcctgggctacgctgtaaaacttggccctcatggtgttacacaccccactcttgtagtggatgttgatgtcacaattagtgcgg

SEQ ID NO: 71784 - DNA, 1024 bp, Homo sapiens
gaaactacctggaacatgattcatacagttcgggggaagagggttgcgatctaaagtgttccccttcttggaggcgggggcttaacaattcctggactctgagggaggcagtggaaagatgccctggcagaatatctggcgccctaagaaaacagattccgttcgttgacaggagagttcttcatcattgtctagttaggcctggaagttctgccaccaggatttcttgttaccagttcagaaatcacagtggtaaaatgatcacaatgggctcactgtggttgacagtttgttgagcaggacttggaaatccgaaatctgtgcttttatctgggtaattagtcttttagagatatcatctagtttttttgcagatagttgagaatcagggaatggaggaagtgtgcccaaatatcctccaaaatatataacttactgatacatgtaattttaagccacttacaagctttttagtcaaatttccacctagggaaaggaaacggacccctcactgatacgaagctaattccacgttctctacagacttctgtttcgacacttacttcctcaaaatgttatttactccttatggctcagttttctgcacttcatgcttttctcagtttcttgctgtgatatggttgggtcacataaacggggcttgtcccctgaaaaatgacattgagggaattggcagagctggggcatagcagattttccctggaccagtcccaggatctggcgaccagaaccatcccacgcgttctttggatgatggcttggtaccttctggctggccaaacgtcactatccagtgttctagcattatgaaatcctgctcttgtagcagcttctcagtgtatctgaataatccagatactcaagcaagagtttggaaggaacttgagtgtaatggagttaaagagcctttagatattgggctttcaattttcccccccattttgaaatgtgcctcgtttagcctgttttctccacggcctctgtgtaaacagactgcctcatc

SEQ ID NO: 71785 - DNA, 1234 bp, Homo sapiens
ggatctgcagccctggccccgcggtgcatgaggctgggtgcagttctaaacctacattctcgatttttcttaagccaaaaatgaatgctaactcctttgccagtaaaattctgggaaacagggactgaggccacacatcatttccagtcatctgtgtgtttttaaggccagccacttgtccctgttgaggcctggctatggaactaaatacagtgttggtcttgcctgtccttcaaaatcaacaacagattgtctctcggctccagggaggtgtcatttctatagaaattagaagctttctgatttctagatgaggttttacaattgtttcttacagtcatgtgcactaagtactctttttgtaagcagaggtggctggctctgcagccttaaggccattttttaagtcaccacgtctagaagtcacatgaactctgctcagcaataatctgttctcagaacagacttttcaacctgctgccggatttctccattcagctggatgatcctcaggactgaccagttagctggcaggttgtccagctttttattccagtcataataggtgacagtgttaaccgtgaaaacttgagaggcactctgccctcttccctataaaatcacacagcgtgattttacaaggtcccgtggcaccttgctcaggacctctgcccctagttagcaagactgcagcagttgctgttgcttattctgaaaggaatgtagaacttgacagcagccttctgagtctgggtcaggaagatgtcctttggaccaaagcagacttctttatacgcagctcagtttcccgggagtcgccacagatgtacccactagcccaggttgctgtgagtcagcggaagctcccgttatgccctttgctcctggtgggagagggaggagtgagctccctgggttccagtatttacttggtatacctgagtttgggggtacccttttttgtgacttttcaaaacagtgaattactgtcaccttgatggacaagtttcaataaaactttgtaaaaataattggacatgtgcctggaggagctctgattttattcagtcccttggagaagagactggaactcttcgagagttgcgtttcagtaccgttcttgtggctctgagcggacagggctactccagctgcccaggcctgagaaccagtcctgtgactcacacccattcacacagtttggaaccttaagggacccctaaaactgagcccc

SEQ ID NO: 71786 - DNA, 2153 bp, Homo sapiens
gatttgaatagcgacgtatttcctgttgtagtcatttttagctcgaccacatcatcaggtctttgccaccgaggcatagtgtagaacagtcccggtcagttggccaacctcccgcagccaagtaggttcatccttgttcctgttcattctcatagatggccctgctttccccagggtgacatcgtagccaaatgtttactgttttcattgccttttatggccttgacgacttcccctcccaccagctgagaatgtatggaggtcatcggggcctcagctcggaggcagtgacttggggccaagggacctcgagacgctttccttccccaccccccagcgtcatctccccagcctgctgttcccgctttccatatagctttggccaggaaagcatgcaatagacttgctcggagcccagcactcctgggtctcggggtcggggaggggacgggggcacccacttccttgtctgtgacggcgtgttgttccccactctgggatggggaagaggcccgtcgggagttctgcatggcagttcactgcatgtgctgcccccttgggttgctctgccaatgtattaataccatcccatagctcctgccaaatcgagaccctctgacgacttgccgactaactggccaccacaagctgcagtctgtagcactgaacaaacaaaaaacaaaacgctcaagccttacgaccagagaaggatttcagcaaaccaccacctcccactcagtgtcccctccaaacttcacacttccctgcctgcagaggatgactctgttcacacccaatccagcgcggttctaccccacgaaactgtgactttccaaatgagcctttccctagggctagacctaagaccaggaagtttgagaaagcagccgcagctcaactcttccagctccgccagggttgggaagtccttaggtgcagtgcggctcccactgggtctgcggaccctcctattagagtacgaaattcctggcaactggtacagaaccaacctagaggctttgcagttggcaagctaactcgcggccttatttctgcctttaatctcccacaaggcatctgttgctttgggtcctccacgactcttaggcccgcctcaacaacccaggcacctcctaggtaggctcaaaggtagacccgtttccaccgcagcaggtgaacatgaccgtgttttcaactgtgtccacagttcagatccctttccagattgcaacctggcctgcatcccagctccttcctgctcgtgtcttaacctaagtgctttcttgtttgaaacgcctacaaacctccatgtggtagctcctttggcaaatgtcctgctgtggcgttttatgtgttgcttggagtctgtggggtcgtactccctcccctcccgtccccagggcagatttgattgaatgtttgctgaagttttgtctcttggtccacagtatttggaaaggtcactgaaaatgggtctttcagtcttggcatttcatttaggatctccatgagaaatgggcttcttgagccctgaaaatgtatattgtgtgtctcatctgtgaactgctttctgctatatagaactagctcaaaagactgtacatatttacaagaaactttatattcgtaaaaaaaaaaagaggaaattgaattggtttctacttttttattgtaaaaggtgcatttttcaacacttacttttggtttcaatggtggtagttgtggacagccatcttcactggagggtggggagctccgtgtgaccaccaagatgccagcaggatataccgtaacacgaaattgctgtcaaaagcttattagcatcaatcaagattctaggtctccaaaagtacaggctttttcttcattaccttttttattcagaacgaggaagagaacacaaggaatgattcaagatccaccttgagaggaatgaactttgttgttgaacaattagtgaaataaagcaatgatctaaactaatgtgtgctttagtgcaatgacctcttctttttttgagagactgtgaaagaaaaactatcaccagcgtgtcagtgtaggtgtattatcatggatgggaccttctttacgttgtggggagggttttcctctggagtgggatagaggaagccacgtggtggttagggcacact

SEQ ID NO: 71787 - DNA, 1029 bp, Homo sapiens
gtcccatggcatagctgaacacctgttcacttaaccagttctaattaggcaaagcagtaaggccatgcccgttttgtttgtaagtgtaaacaacactacgatgaacatccttgtactaatctttttgcacttgttagatagcaccccctgattataagctcctaaaagtggaactgttggatcaaagactaaacacacatacacatacaagtatgtacatacgtatctgtgtgaatgttctgaaatgccgtcgtggcccagatacccttcgaggctattttgtttctctcttgctgcataacaagccatctgaaagcttagtgacttcaaacaacagcttattattggccccaactccgtggcttgactggacagttctgcttcatgtggtatcagcagggccactgggacaactagaaagcccaagacaggctcacaaacatggcacgcaatgagtgctggccataatgtgggcgcttagctgcggctggtggctggaggccttgttgctttccacgctggcttcttccaagaatatagaagcggaagctggcaagcgtgctcacttccaccacgctctactggttagagcagaccgcagagtcagcccagattcaaggccagggaactgcaccggggcacgcataccagagcccatgactttaaaagtctaataccaagtcttgccacaaggaataatagtgctttttccctttaaggcagaaaatatttccagtcctgtgtgctctagtttcagtgacactgtcatgcagagatagagtattaagaagaccagcaatgtctaaatagctgtgaacccagtcttttttttaaaatagaacccagtcttttttttttttttttttttgagtcggattttcactcttgttgcccaggctgtagggcaatggcacaatctcagctcactgcaacctctacctcccgggttcaagtgattctcctgcctcagcctcccaagtagctgggattacaggcgcctgtcaccatacccggctaattttttctatg

SEQ ID NO: 71788 - DNA, 1076 bp, Homo sapiens
ccaaagtgctgggattacaggcatgagccactgcacctggccaaaattttttttttttttttttttttttttttttttgagacagagtctcactctgtcacccaggctggaatgcagtggtgtgatcttggctcactgcagcctctgcctcccaggttcaagtgattcttctgcctcagcctcctgagtaactgggattacaggcatgcccaccatgcccagctaataaaaattagttttttaaattagaaattattttcattctaatatctgaactgttcaaaaaatgtatggaacatatatgtaaatcataaagcctaataatgtcgtaagcatccacacactcactacccagtccaagaaatagaacattgctaacaatttcccttttcttgtgtgttcctcccttatcccggcccatcttcattctcccactgtaccagctgctgaccttcgtgccaggactaatttgagcagtaagcctcatttggtgaatgataaacatctggttgtagcaggagacgttaaaagggtttcagctgttctagaaaaagagcgttttgatgtagaactctgcacgtgtatgagttcttagctaagaacttttccttttggattgaaattttctctaaatgtgggccgggtgtggtggttcacacttgtaatcccagcactttgggaggccgaggcaggcggatcacttgaggccaggagttcgagaccagcctggccaacatggcaaaaccccatctgtacttaaaatacaaaaattggccaggcatggtggtgcgcacctgtggtcccagctacttgggaggctgaggtgggagaatggcttgaagccgggaggtggaggctgcagtgagccgagatcatgccactgcactccagcctgggcgacagagtgagactccgtctcagaagaaaagaaattttctctaaattcgtttagcagtctctaccacctttcctctcccttccctcattctgtcttctccctcctcacaagggaagtttgtcaaaagattctgtctccagcagaaggcacatgtgtgggaaaggtgtgtggtgtcagg

SEQ ID NO: 71789 - DNA, 1038 bp, Homo sapiens
cccgcgactgtgtttcttacgagcttctgcctgcctgggttcaggtaaagagatgcagaggcgtgctggctcgctgctaacacggcgcctttgcacttctgctgcagccttatgggggaaggagtctttcatgtgtcttattaaccctgcgcaggtgaaatctccttagcttcagcttatttcttattacagaatagctttccatgtctactaccctcccttatttctgcatcccagccaaattataactcagatgctaattaacagctgccccagagataccaatagcactcgcattttgcatttggagctcagatcaaaatacgggctgagctaagagcatatgtgcgtttctgagcatttccaggaataacttggccttaaccttctcttggtttctctggatggtttggtcataaacagatcagcctcacgatgtcttctgtttttcttttctttcacctatgaaaagaaactgcttggaaactccctgctgaaactggaaggtgatgaccgtctagacatgaactgcacgctgcccttcagtgaccaggtaatgcttgcatgggcacggccagctggtgtctggttacagccacaccccatcaagaaagaaagggctgtggaggccttgttgctcttactagagattgttctggtgacgtgaccgtgcttatgttctgccttcggacttctgcccttgcaggtggtgttggtgggcaccgaggaagggctctacgccctgaatgtcttgaaaaactccctaacccatgtcccaggaattggagcagtcttccaaatttatattatcaaggacctggagaagctactcatgatagcaggtgtgaggccaaggacatggtgttttttctttactttcaagggagccaatatgttgaagccacgtttcatgctcgtaaaacacaaaatagtagagaggagccgttgtagctcttatctctgtgtccccatagatgcccaagcctcagctaatggaccccctctgtccagattcagttcccttccagtatccagttt

SEQ ID NO: 71790 - DNA, 1912 bp, Homo sapiens
cctgctgaatatgccacacacttcaccgaggccttctgccgtgacaaaatgaactccccaggtctccagaccaaggagcccagcagcagcttgcacctggaagggtggatgaaggtgcccaggtaccatgtcagggtggcttgggctggagcaggtgctggcacaagccactctgtccctgatgttttctagggaagtgtcttttctaggaactctgccaccccctcatcctatcctccagccggatgtttcttctgagttcagacatttttcttttccatctttctttccccaggaataacaaacgaggacagcaaggctgggacaggaagtacattgtcctggagggatcaaaagtcctcatttatgacaatgaagccagagaaggtaaattaataattcagggggaaggtcattgcacgtggctaacccaggtctccccagtgctggcgcgaaggctttgttttttggactgccttgcaagccttctacgcttttccatttttgaaacttacaaaccaaatgacttctctaaaggttattggtgcgatactcacatctataggtctcccccctgaagaacccgcagggcgctgccctgaagattccacctgctaatacaccttccgagaacttctgcctcagtcaactaacccataaatccgcatcgtcatcagaaatttgactgtgctactcatctgacacactttatttttttttatcttccctctctgccttctctgcacacctctgtcccttccttgttctcgtgcgcctctctttacacacgtaccctgtctctctctcccttgctgtctctctcgctctctcttctccccttgttcttgttcctgttcttttgtttttctttctgcccttcctctttgcaccaagctggacagaggccggtggaagaatttgagctgtgccttcccgacggggatgtatctattcatggtgccgttggtgcttccgaactcgcaaatacagccaaagcaggtgaggaggagccggaggagccccgccctggaggtgggccgggcttggccaatcagcagggacagaaggggtggtacagggaagattggctctgcaaaggaggcccatcttcctccgctccccgccttggcggtaactgggatttgcgtggtttggtgggcatctttgatctctcaggcccgtccctcccagtgggaacgggggaaatccacacccaatcctgtgctctctgaaatctcctagatgtcccatacatactgaagatggaatctcacccgcacaccacctgctggcccgggagaaccctctacttgctagctcccagcttccctgacaaacagcgctgggtcaccgccttagaatcagttgtcgcaggtgggagagtttctagggaaaaagcagaagctgatgctgtgagtatgaaagcgggccctggaggttgtctttgtaaagggggctgacttggtaactggtgttaacgacgagaatcccattggccattttgattcccctcaggctctctctctgagggctgatggctctagactgtgtcatggccaggagtctggtggtgatgaaggcacaagcaccaaggtagcttgtgtggcatcatgatccatttagaatgtgggaatcagggatgcggtggctcatgcctgtggtcccagtgacccaggaggccaaggcaggaggatcacttgagcccaggagtttgaaaccagactgggcaagatagcaagatcccatctcttaaaaaaagagaaagaaagaaagttagccaggtgtggtgacatgcacctgtagttccagctagtagggaggctgaggccggcggattgcccaggagtttgaggctgcagtgagctacgattgtgccactgtactccagcctgggcaacagagcgaggcatgg

SEQ ID NO: 71791 - DNA, 1046 bp, Homo sapiens
ttcatggctgaataatactccattgtgtagatggcacatctgattatccattaatccattttcattagtccattttcacactgctgataaagacatgcccaagactgggtaatttataaagaaaaagaggtgtaatagactcacagttccatgtggctggggaggcctcacaatcatggtggaaggcaaaaggcatgtctcatgtggcggtgacaaaagagaataagaaccaagcgagaggggtttccccttataaaactatcagatcttattcactaccacaagaacagtatgggggaaaccacccgcatgattcagttatctcccaccaagtccctcccaacacatgggaattatggcagctgcaattcaagatgagatttgggtggggacacagccaaaccatatcaccattggtggacatttgtgttgttttcactttgtagttgtcataaattatgctgctgtgaacatttatgtacagatttttgtgggtacatatgttttcagtccccttggatatatagccaggagcggaattgctgggttctggggtaactatgtttaaccttttacagaactaccagactgagttccaaagtggctgcaccatttttacattctcaccaggaatgtgtgagggttccagtttctccacatcctcatcaacacttatcttcctttttttagactgtagacatcctagtggttgtgaagtggtgtctgcttggggttttgattcacatctctctaacgactgataatgttgagcatcttttcatttgctcgttggccatttatcctcttcggggaggtgtctatttaaattcttggcccattttaaaattgggttgtccttttattattgagttgtaagagttctttatgtattctagatatgagtcccttatcagagatttgatttgcaagtattttttccctttctgtgggttgtcttttcactttcctgatgggatcatttgcagtactctaatgattttttaaaacattttcctccagaatttagtcggcgtcttaaggaacgc

SEQ ID NO: 71792 - DNA, 1047 bp, Homo sapiens
gtactgtttgtgttggattttcatatattagtgtcctaacaacttcactttttagtttcttaaagtaccaactttaaaagtatacttctgtctggatttgaggttagtttgttttcttgaattttaggttctctattctcatgaaaaggtgaaaatggaaggcactatttctcaacaaaccaaactcattgattttctgcaagccaaaatggaccaacctgctaaaaagaaaaaggtgagtcaaagtgtttgaaaagtgggaattgtcagtttcactcatcattcatggctcagtggacaccactgtgatatatgatcataggaacatagaagaaaacaaagtatactttttttgttgttttattttgggttgaaaaatagattttgagataattataataggtcttactgaaagatatcagtgatcaagtctaacaaactactttttgtttatgaccattcaaatcatagtatctttgttaaagaagtaatccctccccagcccacacacatagcagttggggcagagggatgtatgcagagagaaagatttataccaagtcatgcatacatgactctagagggagttagcaagtcacaagtatggggcttcagcagttcaggtctctcgtaccacactccagaaaggactttaacagtgatctagtccagtccttttgatcggctcacaaagagactagaactcagggagctggggtgacctgcctgaagtgtctgactggacacttctcccctctgccaagtactgaacaacccttttagattgcaggagacaaattacaaactaggggcagggttatacatagtgcacatgagaagattgtttttcataagcctgatctatacatgctttcccaaaccactaaagccttcatactaggtttggccaggtgttctcagttccagaaaagtcttgaagaagcttgcagtttccttccaaatgcagaagcataccatagcagcagtggcagtggttttgcaggagaggccttgatgacttggaatacctaggaggaaggagtggag

SEQ ID NO: 71793 - DNA, 1069 bp, Homo sapiens
ctgcatggagtaatttctcatagcaacaattaagatcttgaaaacagaaaataaagacattggaacttagttgtcatggcactgagtcgaactgccttagatgtcaactcagatggctcatgccatccaaaatatcctcaccttaatgtaccaaaatatcctcaattggaactctgtctgggaaggccatccctgcagcctggacttcctgtgacggtagggatcctcggacttgttggccagcagaggtttctgtgcaaattcattttaactgtgcttgcatccttttggaatagatgacaattggtaattctgaattgagatgatttcaaaagctgtacttctggtgccatgcctgaaattagtttgaaataggaacagcaggggaacaaattgtattgtgtgcagtatcaagcatttccctggcccttctccccactagcaagccaaattacagcagcagatggacctgcagaaaaatcacattttccgtctgactcaaggactgcaagaagctctagatcgggctgatctactgaagacagaaagaagtgacttggagtatcagctggaaaacattcaggtgaggactggcagagggaatctgcttaaaaatggtctgcacggctgggcgcagtggctcatgcctgtaatcccagcacttcgggaggctgaggagggcagattacttgaggtcaggagttcgagaccagcctggccaacatggtgaaaccccatctctactaaaaatacaaaaattagcctggcgtggtggcgggtgcctgtagtcccagctactcgggagactgaggaaggagaatggcttgaacccgggaggtggaggttgcagtgggctgagatcacaccactgcactccagcccgggcaacagagcaagactttgtctcaagaaaataaataaataaataagtctgcagaggcaaagcatgattgtacagtcatctggtaaaatggtcagtatctttgtgctgcatattgtgtgtattttccccaagattttattttcaaagattgcaaacattcagagaagttggaagatttctatagtg

SEQ ID NO: 71794 - DNA, 1050 bp, Homo sapiens
aactatacacttaaaaaatggttaaaatggtaaattttatgtcgtgtattttgcctctgtaaacaatttaaaaaataaaattaatactaaacacacacacacacacacacacacgtatatttggtgaacacacataggaattcaccccgtggccttaagaacaacactacagtggaaatgttaaatgtacctcgtggtcaaatagagaattagggtcttttatctgcagtgaatagacagtgttcccacttaggcacatcctgcaaacagaaagaacagaaataatcaatgctcttgcctgtcctattttccttctgagagggcgagttggccctgacagcccagtactttggtccaaggttatgtggtgagtcagtgacgactctaggaatagagtgccgggatcccaattcagttccctccttctcacttctaacctacatgagaacatttccagtttcccaggatgttcctcacagaaagatttttgagcacagacttctggctgacattgagccggaggcagatttcagtgacagttgaaaccattctggaacaaagaatgctctttattgtccacattgtgattgggcctcctggttggtgtgtgctgtataagcatatgtgcccaaggcttccacctaagtatcctcttcgtaggtgcggagacttttattttttatttttatttttattttttgagacagagtcttgctctctcgcccaggctggagtgcagtggcgtgatcttggctcactgcaacctccacctccgagggtcaagcaattctcctgcctcagcctcccgagtagctgagattacaggtatacaccagcactcccggctaaatttttttgtatttttagtagagacaaggtttcacgatgttggcccagcttgtctccaactcctggcctcaaatgatccgcccacctcagcctcccaatgtgctaggattatagcatgagctaccatgcctggcctataaggagacttttaaatggagccagaatcaaagtctcagaattgaaagaatttttatatcatcc

SEQ ID NO: 71795 - DNA, 1020 bp, Homo sapiens
ttcaatagctttaggggtacaagtgtttttttggtgacatgggtgaattgtgtggtggtgaagtctgggcttttcgtgtacctgtcacgcaaatagtgtatatcgtacccgataggtaatttttcatccctcactcccctcctcgccttcccccttctgaatccacagtgtctattataccacttgtatgccttcatactcatagcttagctcccacttgtaagtgagaatgtgcagtagttagctttccgttctaggtggaattttgaaattgacaatttgtcagatccaaattagatattttgaaattagaattttcaagtaagagtatgggggtcatgtaatacttgtcttaaggtatttaacacattaaaagactatgtcatgaaggccagagggtctctgtcatttttatccttctatgtgatgcttaatggagtgtcaagcacatagtaagtgtgtgccaaatagaagtttattaaatacatgggtgaatgaatattgagttaaattgttctttagagctaatatccaaagtatattaagtttcatgccgataggacatccatgcaaattagcttcctgcacagggcagaattttatcagattattctgagtaccaaatttcatgaaggtttttgaacattgggtaatttagttaaaaataatgtgtgccctgcttttgaagcataatagacaagctcagactgatcttctaaacccatcccttacgtgatggctggtaccttttcacagaactctgagaacggctatttaaattgatgactacctcccactccccaaccagagccctgtgtgttgaatcactgatgattccgctttgttctttaggattgacctgcaaggacaaatgcactttataatgaaaaattggactccaaagagtattctgtttaacccttagtgagcctgacagtttaattaaccagaatgccctgttctggctgatgaggttttgtcacgtgatacccatagctcctgaggcactttgctgataga

SEQ ID NO: 71796 - DNA, 1019 bp, Homo sapiens
tctcctaattgggttgaatttctttcccaagcctttcttatcaaacttataagctgacagagcagtcattatttgcatacatgtctagttatgggcctttctgacttgacgtaagatccttgagagcttggttatcctttcatcctaaaagctataatgcaggtagtaagcattcagcgtatgattatttaattaaattcagccaaagcatgtcagataaataagtccttgagcagttatcctcctagaacttgtcacagccatatttaagagccatcccttagaaataatttccatcctcatataataacctatggaagactcaccagtgacagggacttctgtatttagaaaaaagcaacctttacgttctgacctttagaactcaatattctttctccgtgaaggttcgtggacattcataaacgttgtcagcatctaacattcctaagtgtggcattatgccaatctttccaaatgtctagctcaatgacctggagaagaagcatgctatgcttgaaatgaatgcccgaagcttacagcagaagctggagactgaacgagagctcaaacagaggcttctggaagaggtgagtgtgaaatacctgggagaagggccaagtggattttttttttcttttaataggcttcttttttttggagcagctttaggttcacagcaaaattgagcagaaagcacagagagttcccacatactccctgtctcctcctcccacagtgtccccagctatcaacaccctgtaccagagtgtccatttgttacaatcaatgggcctgcactgacacatcgtcatcaccccaaatgcatagtttaaattaggtttgctattggtgttgtatgttctatgggttttgacaaatgtgtaatgacagttatccacctttactgtatcatacaggatagtttcactgccctaaaaaccctctgtactctgcctgttcatccctccccaccctcaactcctggcagccactgatctttttgctgtctccatagt

SEQ ID NO: 71797 - DNA, 1047 bp, Homo sapiens
agtgaactgtgatcatgccactgtactccagcctgggtgacagagctggaccctgtctcgaaaaaataaagatagataaaaacaaaatcaaatgctttgggggatcaatgtaaatggcttgattttaagcttggtcacttcccctggctttgctttggatcctgcctctaaggtggctgcagaactggcccttcatccattcttgcctggtccccttgggctgcagaagcaaaagacaaaccgcatttcaaactgtagttagaaacttgtgcttttctgaaactgacccgaccaaagtaatctccaggaaatccttgtttaaagacaaggcacaaatcagtgctactgatttgcagacgatggaggctctgaagaccacgtgcaccatgctggaggaacaggtcatggatttggaggccctaaacgatgagctgctagaaaaagagcggcagtgggaggcctggaggagcgtcctgggtgatgagaaatcccagtttgagtgtcgggttcgagagctgcagagaatgctggacaccgagaaacagagcaggtggggctttgtgtttgtggaaagctcatgacaggtgaccgcaggaggatcggcctgagagttgtggacagggtgatcagctattcccgccgagactgagaagtttcctgggtcacaagcctcctggtgctaaaaaccaggagactcttgggcaaaccaggatagggtggtcaccctagttgtaaacgtagatagtgtgagttggattctgtggctatgactggtatctgttttccccatgcagaggcctgggcatcagggcaaatacctctgttttctgtgcagaaaactctcatgaggtttcttgtcagagtgaccatagcaaggccatagcaaaaccattaccattttaatcctggtcttccctccaccccagggttcctcaaccttggcactattgacatgtcaggctgggtcattctttgttatgggggctgtcctgtgcattgtaggacgggacagcatccctagtctctactcactagatgccaccaaca

SEQ ID NO: 71798 - DNA, 1448 bp, Homo sapiens
ggaaagaggtagggggaggaattagtagttaaatggagacattatgaaaaacatcttaaggaatgggtttactacgtacaggaaggagaccagttgaactactgggcattgtttattcattgtttctggttttaggagatttaacatgccacagaaagggaaaggcagggaccctgcaagtcataagtgtctgttaggaatggcaaacgtacagattttccttatttgtcttccttgataaagaatgtatctgagctaagaacctgaccagataacttttattccccctcttgtagctgacagtgtacttcaaaatcgtacataggaattaatgtggcttttgacattaaaaagcaaattactagaccattagaccatacactaaaaggttatcagctcagttaacaaaatgaaaagttgtatctcctctgagtacatttgtggacaagtgtacttaattgatgttctttaatttcatgtgcctgggaagatttttttttaaattgataatcaaagagggttaaaatagggaattagtcatgaaagcaatggcaacatttcataaacgaaatcgactctaggtttgaaaattggaaacaattaataactgtaggcttaacggcatttccttttaatttccttctttttgttacgtaaaatttaatttactgcctgtgtgcctcagtccaactattattagaaaattgcccttaaacttccaaggtattatacataaaagctctctgcaagccataatactaaatctcagcaaagagaataggaaagctaaatgttctgaaattgaagtcattctgctactgagcaggagagtaatttagcaaaccccgattaaatctctctcaataaaataacaatttcatatacatggcttcccattgtctgatagccaactgtatagtaaaatccattaaagtcatgccatagtacagtgtattgtattttcagggtttttctgagtttccctgaagtttttttcctttgttgtatgaaattaaatttattgcttgtgatattatcgaaataactcctggcgtctttccctgtcagtcttccttgataagaacttcattttgctttctaagactatggccatctccaataataaggtcctagtgatagtgtcatgggcatttttagcttaattagtggatggtgataccagtctattcttaatttgcattttctttccacattatattatttccgtcaatttgatctcattcgaagtcatccgtttcatgcagtgattacttttgattgcttttgccatattttttagatgtgtcctgagttagagagaaactgagtctttttcttccactgctcgtgtttagagttaagtggctgggcataggagcttggacatggctctcacggtcaggtgggcaaactcatgagcggcacgttgattgccagtgtcacgtggg

SEQ ID NO: 71799 - DNA, 1089 bp, Homo sapiens
cctttcctgcctcagggtctttgcaaatgctgctccctctgccgtctcctgtccattgcatggctggctcctcatcatcctataggtttcagcttacatgccacctcctcagagaagccctccttgaccatcccatctaagtaagtttctacctacctttcttattccttttttttttttaaactggtccctatttgttttctttataacatttgtcccaatctctaatcacgcacttattcatttccgatcttccgtcaccagaatgaaggcatgggtcatggatgcctatatccttccacagtgtcaagcatatagtatgcactaaaaaagtccttgtcaactgaaaaaatgctgctggtttaaggcagctttttcctggagaaagcctatatatatttatttcaaggccgatgtagagttttctgaatgtccgcagcttttaatgaaaaaacaacacacacacaaagtccctttgtcttggctattgtcctgtgtgtgcgtttctgtgtgtatgtgtgtgtgtgtgtgtgtgtgtgtgtgtcagggagtaggctggggaggagtcagttggagggaagagggaaaatactcatcttttcagaatgggaataggacaaatgaaggagagtaaaacttcatcctttattgctttttttcccttttctcctaatagcctgtaggtgttaatataaatgttaaaaatatttgtacagggtgtgcatgtatggtctaaagaattaattgttattaacacagcattgtgtattcctgtaacttatttctggtgttggggatgatttgattaattagttcttagaaaaacagatgctggtgccgcattctcggctttccaggcaaattgctattctctatatttgacccgtagcatgtagaattgtattctaccctatgaaaaatttataatcaacttcttaccttttaggcacatagagatgaaatccagcgcaaatttgatgctcttcgtaacagctgtactgtgagtattaattacccaaagacgattaaaataacatgaaactaaaacagaggaggaaaaggggacgtctctttaaaatattggtgact

SEQ ID NO: 71800 - DNA, 1341 bp, Homo sapiens
tcatttttgtttctcttaatgtaacatgtatttttctctggctgttttttttttttttaagattttctttttattattggacttaaacagtttcattatagtgtgctttaggttaattttcttcacatttcttatgcttggtacttacttgttgaatattttgcatctgtgggtttatggctttcatcaactttggaaaatttgtggccattatttcttgaaatattttttctgtctcctgtactccttctgggtctctaattgcatgtatgttaggctacttgaagttgtccacaactccctgatgctctgcattttttgaaaatgcctttttcttttctcattgtgtttcattttggtttctacttcttgtcttctacttctttgtttctacttgtcttcaagttcactaatcttttcttctaaagtatctaatctgccattataaactgacaatagtatttatggaaaaatagacatattagaaaaaacatcacagctctaaaatttttgactcagttatcttatagacttttttttttttttttttttgaggcggagtctcgccctgttgcccaggctggagtgtggtggcgtgatctcagctcactgcaagctctgccttccggttcacaccattctcctgcctcagcctccagagtagctgtgactacaggcacctgccaccacacccagctaattttttgtattttttagtagagaccatcctgttagccaggatggtcttaatctcctcacctcatgatctgcccgcctcggcttcccaaagtgctgggattacaggcatgagccactgcgcctggcctcctatagaccttcttatggagactttttttttttttataattaaatagaaggatcactcttacatctgccctaaactgggttctgggttcttatttgggttttcatacataagcagatgggaccatatccactttgtctatcaagtgaaaagtctgttagggcgtctttgactcctctttcctcttggccacacatctatcagtaagtccttttccttatgttttcaaaggagatctcagtttcatccactttctctgtttggtttgtttgtttgtttgtttttgccaccatccttctccaagccactatcatctctcgcttgaatgacagtaacagtaccttcattggtttccctgctacgttctacctttgttctattttgatcctcttctccctgtaacatctaccgtgatcttaaaacaacagtaaaatccgtcactttctttcttaaaattttccattggttttcaattaattgaattttgaatgaaacctaaattctttactggacct

SEQ ID NO: 71801 - DNA, 1069 bp, Homo sapiens
tccccatttccgtcagtgaacatctctaaacctctctttgattggggttacttccgtggaatgaatggccatgtacattcattgcttacactttacctcgatgtaatgcacgtgtacatctctatatctctatctatctatctatctatctatctatctatctatctatctatctatatctatatatatttaacgtagtttcattcttagaagttattgcccattgttgggtttggggatcccagtatctgaaccaaactgggaatgtgatctgacagtgccagggtctgtataggaccagtccaaggtttagtggcttccagtatgtttgtgcatcctagattttctaggacttacaccaagttcagatattgactgcacatttaggttccatagtctctatgagaacactcattaaatgatgccacatcatgcccccaaaatttgctttggcaaaaaataaccacagtatgtctttgtgtatactgtcttgtttcacagtggactgaaaaccacttggaaagatgcaacacagtaaaacagaacaaaataagaaacaaaaggcaaagagaaaataagtctgtagaagaaaaaatggagctaggaatgaagttgatatataagagttcatgccaagaaggcttatagacttgctggagttgggagttgggtgggtggagagagacagataacatttcttagcttttaaagggaggcacctaaatttcaaccactattatatttaacgcaatgtatattaatattttcctcctgtacctatacccaacctctgaaagaaaaagagacatcagcaatttaatccatatttaataagcccttgctatgggcccaatgctgtgtctttagctttttctccccaggggattggtctgtaattcctcaaatccgtttatttcagagcagccgagaaggacacatttatcttgctgctctgttggaattgggaaggaggggtgactgtgtatcttatcctggccctgtttggaaggaagagggcataaaatagagcacgtgtcactgctctttatctatggggaaattagtcctt

SEQ ID NO: 71802 - DNA, 1036 bp, Homo sapiens
cattaaagcagattacctaatgaggacacatcagagaaagcgtgtttaaaataaatagaattcagtctgttgtttcatttacaatcgaattgaaaagatgtccttgttactaatatgttgttatttatatctgcttagctttaaatgtttttctaataagagtaatcatcatcattttcattagtgattcttgctgtgtggcttttccttttaaagtcttcccaggcatttgaatatatgtaagtaaggggtggttaggagatatagcccttacctgttcttactcctgttgaattcagagatgcatggaactcaggcccattttgttgcattttcctctcctctatcgagtgccgagaaggtggttccaagaccaggtttcagctgcaggttgagtagcaggtcatgtcttcactttctcttttgttcagaccaagcaagggtttatctctctttctctctctctctctgtctcaggtcagtctagagcacgaggagcagaaactggagctcaagcgccagctcacagagctacagctctccctgcaggagcgcgagtcacagttgacagccctgcaggctgcacgggcggccctggagagccagcttcgccaggcgaagacagagctggaagagaccacagcagaagctgaagaggagatccaggcactcacggtaggtctggggagcaacatcttcaggttgctaaaggcctcagctaggatgagtgtggaactggcactgagtatactggctcacccttagaaattccaggagggaaaacatgatccacaaagatattcagtggccaggaaattggcttacataggctgctgcttcattggaactagtagatgagcttggttggttatattcaaacttttcttagtatcttgaatagttcctcctttacttatatattttccttcttttgaaaaaatcatcattatattttaaagtttggtttcagtttgtttaaaagtttgtttaccttggctttctactttagttttcaataatcatttaaaataataat

SEQ ID NO: 71803 - DNA, 1056 bp, Homo sapiens
tgaactcctccattaggttcacctggagtgtctggttttattttcattttttctagcaatggggtcttgctatgttgcccaggctggtcttgagctcctggctttatttatttatttatttttcttttattatttcttaggtcaggatttctcagaaggaggacgtctggctttaagcagtcctccctccgtggcctccaaagtgctaggattacaggcatgagccttaagccttaggcgatggtttaacttttatcatccaggctatactttcactcttctgtaagtttaacagcaagatcacgggagactcgcccttaagtttgagtctaaacaatccagatggacttctctagcttgggggccttgactggctgtctcttgccttccctttgcacaaatgttcctcttaggagcctgccctgctgctgtagctcatctgggctattaaagtgtcccagggaagctgttgtttttcacttgaatcagtagagccagcccctcaaggatggtaagagaaacttcaaacgtttcacgagaggttcaggctctatattctccctgggagttttgcagtttagctctaaatataaccagatcagtccctcttcttttggccacatgctgctactgagattgagggcagaggcctccacctggagtttgatccgccttaaaggacctgggccttcccccaactttgtgtgtgcagcgttagctcttctctagccaggtgtgtggagtcacaaagatgcaggctcccgggttcttccttcattgtatagcatccagctcccgctcctccccttgagtcactgtcacctgcctctcttggttttgccaaatggcatcggaagcattttcaggcttgctagtagaggtccactctgctgtgactgatggtgttttagtaagacagaagggtacagtgtttaccctgtacatggtcaagtgcaatggtcaggacacgtagggatgttgcaggaatacagcaacatgttacatggactcttgagccagactttctgggtttgaatgccagtcctgccttttaaa

SEQ ID NO: 71804 - DNA, 1138 bp, Homo sapiens
aggctgtgttttgggtctttgagtcgttctaggttttgatacttctaagcagtttgctggagaggtgagggagatctgcagagaactagaaggaataccattctttctccttagtcctttttctccagggcctgccttcatgagttactggggtgcccttgtacattaatctaaggaggcccccttctgtccctacacagactcacagaagaaataaacaggcctgtcaaaggagtgaaatgttagtatctcttgcatcctcctggaccttacttaatcccatatgtgagggactgacactgagtggtgatgagtaaatggtccccacgttcgtcatgccgggatcatgcttatgaggccagatcaggagacagctaacccaggaatggccctagtccacttagtgaggagacatgtctaactccgtgtccgtctacctcccgtggaaacgggctcaaccctaatgagactgtgattttgtttggatcctcccaccacccccaccaggaaggcccaagaagagatgatttctgaactcaggcaacagaaattttacctggagacacaggctgggaagttggaggcccagaaccgaaaactggaggagcagctggagaagatcagccaccaagaccacagtgacaagaatcggctgctggaactggagacaagattgcgggaggtgagagcgaggagtcatctcctgggaggatttgctgggcgattcgggctctgaacaagtcagctttcgagcacaaatcaatatctatacaagagacattgtgcttggtggttaagggggcagacttgaggcaggagaaaagggtctggaggcaaggaacctaaggccaattcatgctgaatcaaggaaaaacaccaaggtttatggcagggaatctgaggcccttgtgctaacctcttttttttttttttttaagagagtcttgctctgttgtccaggctggagtgcagtggtgcgatcttggttcactgcagcctccgcctcctgggttcaagtgattctcgtgcctcagcttctcgagtagctgggactacaggcgcctggcaccacacccagccaatttttgtagagacagggttttgccatgttgaccagactggtcttgaacttctgacc

SEQ ID NO: 71805 - DNA, 1016 bp, Homo sapiens
gggtgagaaggaatcactcagaaaatgacaaccctcgaggaggtggtgataaatgcgaatgtgcagatttgagttaagagacttgcaggcccaggtcacatgtagatgagatggggtttaacaaggcctgattactcccaggatgttaggttcttgaataggtccttatgtctgttttaaatgcaagccacttagccagtgtggggagatttcatcactgaaaaaacaaccaagtaccatccatttgagtggtaccatctgtgatcctcagagtacagactagttgagtgccttgttacctctagccaaattgccgtcatttcagatgaaacttttaccctggcccgcactgcccctgttactcctgttctggtgtgtgaagtttcataggtgccctgtgtttcagatgatcaatgctatggattccaagatcagatccctggaacagaggattgtggaactgtctgaagccaataaacttgcagcaaatagcagtctttttacccaaaggaacatgtaagtattcaaattctaactgccctacattattacactttggtctcctctcctgtggcataaactcccttcttctgtttgatggagctggagtggattgaatgacttctgtagctcagcccagccctcagatacttacgtcatcttgccctgtcttaagtggtctcactctgccacttttgagtcgggttttcttaaatgccttcaattaccatcacattacagagtgttttgctctctctaatgaggctatttataatttgcttgtggaaagctgcagttcttgttccctagacttgcatcctgtaattagtaagaggtgaaattgtgtgtgcccagttgggccatccatttagttgtcactaggttagaccctatggaaggaagtttggggttcagcaagggctgtgttccaggagcactttgagctgaatcttttcccccagagaattagaatctccaggatttttttcccccttaggtttctctcttcagagatc

SEQ ID NO: 71806 - DNA, 1928 bp, Homo sapiens
ctcataattttagaatcatgctcagacatccaagagagtgggccatttctcatccttttgagcttcttcctttctctcatgaccctgttcccaccttttggtcttctcttccaacttccattctattttttttcatcagtcagttctagtttaaagacctctttgaaatctgttctttcctttctttctcctgtggactccctccccgctgactggctctttttagggacgtcgtccccatgagctgtgacagtcctttcacaatagacattgttggaaaggcagattttagccctctctgtgaccccagctctttcagctttattcccaggatcctgttgtcctccttgatgttgttggtgttctttggaaaagtcgaatggagcctctgtggtgaggaacgtagggttgtggtcaaaggcttgggcatgttctgatgtcgtcttcttttttccttcctttttgcttgttgttttggcaactcgtagggctgtgtgtgccccaaagaacattagatcaagttggcgattggtgataccattactgttttatgtttcctcttgggaacagtaggtgcttacagtggcattctgagcactgagaacacatgatctctcttcccctgggaaaggtttcttttcccagtgacttttttttctccccctagttggatcagaggaaagaaccagggaaagaggcatttttttctttcttttatgttgtctttttaatctgttgaccatccacctacgttattggtggccaaaagcctcttgtccctggttgtttctgagcatcatccttggtcacatagacttcccctgtcttcggcttctctccctcttgcacacagcccaggagtatctagaattaatctgtataaattaggagtgaggaatattctgaaaactacgggtgcactggcgaagaaaaagttgtccccaggtaatatctgcagattataagaaatttattctctaggtctggatctagagcaatcttgtttcctcctcccttctcattctggagtctgcctcattttgaatatatctctctggtctttgggctgctgattttaaaataagttcttggttcaagtcaacctgttacttgccattggatggtaatatttgacttttcaatcttatcctgattgataagcggactcccagtttttgccttctctttgccccagaatttggagacctcgggcctctcccctgcttttctcctctttcctagattttctcaagtgtccccgtttagtcttccctcctcagcttggctcctgagaacatttgctgctgcttttgtttttgtaggtgttggacaatcagataaagaaagacctggctgacaaggagacactggagaacatgatgcagagacacgaggaggaggcccatgagaagggcaaaattctcagcgaacagaaggcggtaggtagaaggagttgccaagccagtgttcaaaggagggtttttgaaatatgccaagaatcacccctgataagactctatttcacctggtgaaattccttctgttgaatcctgtggagttgttggtaataggaggctttctctgaaactgtttcctttcctaaaagcaactgaggtggtggctctggatggccagttttgtgtttttcaagaactcatgctgttctgctgtctgctaaaatactgtccttctaaatgcccctgacaaaatgtccagtggctcttggtcttcctgctcttttttttttttttgaggtggggttttgctctgaagcccaggctgcaatgtggtggtgcaatcatggctcactgcagcctccaactcctgggctcaagtgatccttccacctcagcctcccaagtaactgagactacaggtgcatgcccccatgcttacctaatttttaagttttctgtagagacgagatc

SEQ ID NO: 71807 - DNA, 1059 bp, Homo sapiens
acaactccactatgtgaagtatttgaaggtctgcttctgctctgttgtttctcttggttctttgtcatggtgactgttttattttccttggagaattattaatggaaattctttgaggccttggatgaaatgtgtgcccaccttggtgggtggtcgggggctttcatttctgccttttcttgaccactgaggctataaaaactgaaacttaagttaatttgtttcagtaaaatatctcaggttaaacccttcttacctctccctgcttctgttttacttagtttttggcaatttcttactctcttgccaacttgtaggtgcttttgggaaaatgttttttatattttatctagcattttaaatcattttcaagagaagggctggcctgacatgtagcccactatgctattagaaatggctgccgctctatcaatttcctttaaaatcacatcccattttcatgatgatttggatcaagcctttaattcattcttatgttcttgagaatcagatgctgtttattatatcttgaatattgtcgcttcccttttccaaccagacattgaagggggatttcaatttttgtgatgatcttgttattgatttggttggtattctcaaagaattgagtggtcctttcttggagaatctaacacgtacatgctcacacagcatcatcaccatcaccaccctggcatcttttaccgctggcgttatttttggttgtttttcagtaaaagaaatataggaggccaggcacagtggttcacatctgtaatttcagcactttgtggggctaaggtgggcagatcgcttgagtccagggattcgagaccagtctgtgtaacaaagtgagacgcccttctcatcttgtctacaaaaaatacaaaaattagccaggcaggtggcacacatctgtagtcccagctgcttgggagcctgaggtgggaggatcgcttgtgatcaggaggttgaggctgcagtgagccacctttgcatgatgaaagtaaccttttgtgaaacatattctatgatttggtgatatattgatgttcctac

SEQ ID NO: 71808 - DNA, 1087 bp, Homo sapiens
aaaacttgaagtgcttggatcataacattagttttcctttttagctagggttcttgagcaataattctgttaatgaggaaaatacaaagtatttttaaaaatcataatcatatattaaaatgacttttctcatttaaggctcaagatagtggtcagggctttgtcatgtactaaactttccagtgttgccttgttactcttatttctctatgcaaagatgaagagctgcctttgttcgacctgtcatactgacgtatttgtggtctcaggccttacagcccaccagctatgtgtgtatgtgtgtgcgaatacttggacttggaaaacccagggccaaggcgtggtggtttccttcccaagagccttaggctagtaatggaggaccagatgaccgttacctgtggtacctgtaccaaagtcatgtttcctgtgaatgtctaacgtgcattggcggtgtcctgccctctgcacacctgactgtcttttcttttgtgtctaggagctcgaagagaaacatcgggaggcccaagtctcagcccagcacctagaagtgcacctgaaacagaaagagcagcactatgaggaaaagattaaagtaaagacattttctgatcttccctggccttgctcctatagtaccatgtagctcccatctcttcctgggcccttgtggccatttcttgctggaccaaagtactgtttggggtgaataatgtccttattccatggtgagagatttcagggtgttacttatgtgaaggattggaaatctgaagttccaaaaaaaaaacctttttttttttttaaatgtggtcatcatttatctcaatttcatctttaaactgattttttaaactcattgtcatttaatccatgatcatttctataatcctttttcttttttaatttttgtgggtacatagtaggtgtatatatttatggggtacatgagatgttttgatacagacatgcaatatgaaataagcacatcatagagaatggggtgtccatcccctcaaacatttatcctttgagttacaaataatctaattacattctttaagttattttaaaatacacaattaag

SEQ ID NO: 71809 - DNA, 1082 bp, Homo sapiens
attctgtctcaggctctgatcaccaaattaacttgatcaaggaaggttcgggtggtatttgcagatgtgttgacgttttgcccctgccagggtggaagacagcacctttgaagggctctccttggacctcagtcccacagccagaaatttgacatcatgtttgagactcaaggatgacttggagtccattcctatcccacctgggagagagtctctgaagtcattggtcattcctctccaccctaaggaggcaaggtcgtgagcagggcacttcatctctctctcttcacatcacttctgggaaatgagtcaccagcaactattggaattccatagtggccaacttataggtctatacttaataccaaatcaaactgtttacaactttacatttctgtttgtgtgtatttataaatatatggatgttctcgaatcaacaggtaaaagaaaaatgggttaaattgttttgctaagacacccagtctttgtatatatgtctgcacacaaagacaaatgtgactgttagtctaccctttctgttctcttgttccgtcatcaaagtttctcttggctattgtcaagtgtttgaattttatcatgagtataaaattagatcccactgagatcccaccgctgctgtcccttgcttggtataaacggagtggttaactctcttgtggttgcaaagtgtttctctgtttaatggtgatgtgttcattcattcattcaacaaatatttaatgagcttctactatgtgccaggcactgttctaggagctggaaatttagcagcaaacaacagtatttgcataacaggactgaagagttgatccaatatatctagaaaatacctgtttaaaaaatgacaacaacaacaaaaaatgccaaactaccaaggagtcagatttttagaatatctgctcttcctaaggttcacttacaattaaaatggaggagtagagagttctgcattcttggattatgtgttataaactcccattcacaaatagaccagaaatttggtcttaaagttgtcagtctcagatacctgagttttttgatctaatcttagattctgattt

SEQ ID NO: 71810 - DNA, 1126 bp, Homo sapiens
tcttccccctcctctcctgtccttcctcctgcaaaacaccatataccacccccctccagagctcacgcctctctgatgtctctgctcaactgtccaattaaaagtcctctttcctgcctgcaacctcctgcagcactttgtacctctttgctttatggttcttcctcctcttaacctatattatgattatttgtgtttatcttatctcctccaagggcaggaatgatgccatcttcctctgtattttccgtgatgcctaggtggcactttgcagatagtaggtgcttggtaaatatttgaatgaatgaatgcactcttgtaacctacacaactgagtacctagattatagaatcttattttctctgctgttgcttcgggtgcctgagacttttcttcctgactcgagtgtatgcttcttgagggctctttccctcggtgcaggtgttatgcccatagcggttactccattaaaactctctgattgattcatgatctacaggaacgccgccattctctggagaacaaggtaaagagactagagaccatggagcgtagagaaaacagactgaaggatgacatccagacaaaatcccaacagatccagcagatggctgataaaattctggtgagcaggaatgaaagtcgcaaagttaaaagataacaggttagagtttgcaaagggaagggggtaagaagaagaattaaccgccacaataagggaggtatctccaagtagatgaattgagtgaggtggtttcagcatatgccacatcgtagagtagtatgaataaccaaataacggacatttcagcactggtaacagatccgtaaatatcgttttttgctctgtttgctacagcctggctttttttttttttttagtggaacgtgcatctatcattttcaatacatttttaaaggcgtgttgacatacttctatcagcagagctttggatagctgtcaacttcgcattgccaatttaaaaagctgtaggggtttagacctttaagaccgaaattcagattcttgcttttagagaagaaagcaattagtcatacagaattgttttgctaggagtagtatttgtcatagatccatgttcacccactcactttctctgctac

SEQ ID NO: 71811 - DNA, 1024 bp, Homo sapiens
atccatttagatctttctatttccattcattacgttgcatcgaatcgaagatgctaatgatggtcagatacaccattatcttatataccccaagaaagaaaaatgcatcaattttaattgtggggtggatttcaaattcagtgatgttaaaaaaagtgcaccttagaataatgaaatatagaattaaatgattgtgtatttgttttgacaaatggtaaattcagtattacctgctttttaaatttaggacactgtcactatctttttttttttttttttagattatactttaagttctgggatacatgtgcagaacatactgtcaccatctttttatatgaataaatttgcccacctatctccttttccttctctcttcctaggctgtaaaagccagcacggaggccaccgagctgctgcagaatatccgccaggcaaaggagcgagccgagagggagctggagaagctgcagaaccgagaggattcttctgaaggcatcagaaagaagctggtggaagctgaggtgagcagggaacctccagcccaggccccagcggcctcggcctttggctgtgcccaaggaaagaaactgccagaccatcacttgcttatgtttgaccaaagctgctttcccttctgaagatccctttgaaacctgagaggctgggaatcatttccccccaggggaaagaaagatttgtcatagcagcttcaagtagaaagatgtcttcatagaagttttttctttctgtttattttcctctgacctacccactaatctgggagaattttgatttttataggtaaaccgaagctccatcactggttttttctttctcttccctctgttttttccttgcctttcccctccacgatattaatagcatattaattttcaaggcttcacctattacctgcgcgtcaatgactctcagatctatatttttgggcctcttgtctacttcaaattctttgttgttgttgttgttgaaatcatttgtataattttaccagaaccacatg

SEQ ID NO: 71812 - DNA, 1306 bp, Homo sapiens
tgcctcctgggttcaagcgattctcctgcctcagcctcccaagtagctgggactataggcccgcaccaccacacccagctaatttttgtatttttagcagagacagtgtttcaccatgttggccaggatggtcttgaactcctgacgtcaggtgatccacctgccttggcctcccaaagtgctgggattacaggcgtgagccactgcacctggccaggtcttttctttgccagtctctcttcactgtgcatcttccctgtgtggttaatactcttccatcctcactgcctgtctattcttttcggagttcgaaagttctcttttatttcattgcctgctctttaggagtaccaggctcaagtggaagaaatgaggttgatgatgaatcagttggaagaggatcttgtctcagcaagaagacggagtgatctctacgaatctgagctgagagagtctcggcttgctgctgaagaattcaagcggaaagcgacagaatgtcagcataaactgttgaaggtagtcagccaccctccaggagggtgctttttgggtaaaattgtacatgatcttagcaagaaaaaggagaacctagtttaatgagaaacaacctagtttgagaaatagtaggataccttggaaaactcttggtctttatttacagaagataacattattcttatttactattattatcttggtcacagagaccaagaaagtagtctacacgacttttttaggttgttgagatttcccaatatgttgtgtctttttaattacaggctaaggatcaagggaagcctgaagtgggagaatatgcgaaactggagaaggtatactttccatgattggttttgctattaatattttgggtagataacttttttcatgttattatcagtggcccatcattgatgaagagtattcttcatcaatgaatagagacctctcttcgaggcttattttgatagtccacctttgggtgaccacatatgactttatggctctaaaagaggtaaaagacagctcatttttgtcacacctgcccacagcaacaaacccagacacttagtaaaaagtataggaaaattgttattgttttaaaggactgagcgactttctctttttgccatttgtatgttgctggtcctacatgcatcatcaacatggagctttgcactgggacaaagtcttccctgagaggccactgttcttcctctcccttaataggttctggaaacccaaagaaaaagaccccatagaaacctcaagagaataggactgcaataaatgtagcaagatgttaatg

SEQ ID NO: 71813 - DNA, 1143 bp, Homo sapiens
actgggtcttaataggttttagtcctgaacatgcaagtaagtatctcctaggacaggtagatggtggcaggagacaggctgatgcagtttccggctggatccctaaggtcaccaggttgagatgatgtttcttgaaccaaggggttttacaggatggaaaccggagtcggcaaccaactggaagttgtgaactgtggtccgtcactcgaaactgtcctggtgtctgcgaagcagcttgcagctctcttaatgagtcttttcaaacaaagcaggatccacagggcatccctattaaaatttttgctttctgcagagcttaaagcgaagtttggagcaagcacggatggaggtgtcccaggaggatgacaaagcactgcagcttctccatgatatcagagagcagagccggaagctccaagaaatcaaagagcaggtaggcctgcttgcctgggagcacagcagcatctcggcttgcttggacctctaatttcaggagaggcgtgtttgagagagaaataggaagaaagggagagagagaaagggtgggggcagagtggaagagagacaggtatgtaggtcattcagaaacttcagatttctcataatttatatacatcatagaatgcttgttccagctccttttgaagctgataccccataatgtctgcttttaaaaataaagatgtaggtttagagcaagagtgggcagacttcagcctgtggggcaaagctggtccaacacctattttctatggcccacaagctaagaatggggttacgtttttaaacagttggaaaaaaaatcaaaagtaaaacaatatttcatgacatttgaaatttatatgaaattcaaatttcagtctccataaataaagtgttttttttttggaacacagccatgcttggtaatttgcatatcggccctggctgctttcaggctacagagtcagaggtgagtggttgttacagagaccatgtggcctgcaaagctgaaactacttactatctggcttcttacagcaaaagtttgccaatccctgctttagatggttaaaaacaattaaatgttttaatagcttctcagatgcacttttaagtttttgagtgaagccaggctaattcatagttttacttacataaaga

SEQ ID NO: 71814 - DNA, 1640 bp, Homo sapiens
cactaaaggtggggccctcagctgagctaattttgagtcccctcattttggcttcaagtatactcattcttggttttcccaagaatatctgggatttgtgatctgtgttatctgtggtttggtgtcgtattttgcaggcatagggtcctattcctaagggaataaatggatggcttgatgcttaagcacgaacttaatcatcgcagtagtgattaaagagtattcaacatgtacacttgcttgtaggaaggagtacacattgtattctcttttgatatgcaatattttattcatagccctattaagtaattttttttaacaaagttatatggattatttacaggtacatcacgggaaaactgcattttataattttcactgaaatgttgaggttacatgtaaagcaatttttatgtcatatctgatacattttaagaaaacatgtcttcctgttacagcggtaatgaccatgcctgctctttcttctgtgtcatatgccattatccctattaatactctttgggcttctataattataaagcagatgtgtatatcagggagagatgttgatttcagagtaagtttttctagaaaatagaagctggaaaaaaaaggaaaacccaaacttggcttcgtgctcgaagagacagcactgctgtgtgtgggcgggtggctgcgtgcacccgctgctcagaagtgccttttctctccatggggataactggctgtgtatccgagatgtggccaggagtaggcaagcaacgtgtgggcaggctgcatgttcttttattagcatcttcattgtactgcatctcgtcgagcccagagcatgaactggcctgggtttctaatatctaccctgcttcccacctaattactcccctgaaccctaaagtgagggagggagagttgctcttgtggggtgagctttccctggggtggctgtgaaccaacctggcatgtggatgttcttgggtatccagagctgtcctggactcaggcttggagtcagcttcttagcactgaatgcagccagtcatggatggaggtcactgtatctcacatgttccgctctccctttcctccatgaccttgcccctctgagcctctgtagcacttttcttgagtgtgtccaaggccatctagctaagaagtagcagaaatgggatttgaagccatgactgtttggtgatagagcctcagctttgaactggggttctactgcctggcacccctgcacaaatcatggtaacgtggtaggagaacatagaggtatagggcaagcccctccttaatgccatgaataatacccatcttataggattgtggggaggactcagtgaagtaacccatgaagcactaaacacgtgcctgacacgtgctcaataaatgagcacttgtcctgatgacaaaggtcgtggcattaattctctctcctagattgttacttccttgaggacaggaattgtggcttccttaatggccactgcagcagagtttctcaagttggcactattgacattttgggctggataattcttgttgtgggagctgtcctgtggattgtaggatgttgagcagcatctttggcctctacccactacatattaatagcacccctagtcatgaaaataaaatgt

SEQ ID NO: 71815 - DNA, 1036 bp, Homo sapiens
aagatacctttaggaaatctaatccagacaatcctagcccagtcctgaagattaggctccagaagatctgtcaagtgtgttttttgctggcctacacatgctaatttgcatggttgcctgggatcccttaagaagacagtcattgactaaatggcgctacatgttcccaagctctgcgccagtctggcaactcttcctttgtctacgtgaatttctcctagttctttttgctttgcttgctgttcatctcctgacctctctccgacaaacttcctgaaagaagagcctgcactcaacacctcttttttccacctcttcaacaatactgaaatgactgtctcagaagccgttgattgtacctaaccaccaaatctggtgatttccatctcaccacgtgataccattaatactacctttcttcgagacaacgttctactttcttctcttctgtattatggacacttggtttccctcctacctctctgactgtcattctcactcttttgtggctgccatcaggctcttgcaatgtacgtaccatctcctcaagttccatcctcagttatctttctagttggttcttggtgatctcattcagttccttgactttagttcttacctccccatggcctcctcccatcgtacactgtgttcctcatcaccaggatgttttaccagtttctcaccatcccatcctctgttcccttcctacatagacagacccactcgctcactcagtaagccactaggtgctagttttggcttcttcattttatgtaagaaactaccaccttccctacccttctaggcaagaaagctgagtcatcgtaaattcttttctgcctcccccgccatcccatcagttgccaatttctccaagtggtgcctctaggatgccacttgcatccatacccatctttcttcctcattggcacccatcatggactcttgcttggtctggtgcagtagcctcctcagtgattcccttgcctctggttttcctggctgtaatccattctccacaaagggtggaatt

SEQ ID NO: 71816 - DNA, 2374 bp, Homo sapiens
ttacaaacttgtaagttttgagccacattaaaaaccatcctgggctgcatgcagcccccggggccttgggttggacaagcttgctgtagaaggtaaaaatcagttggttttatgtttttgttttaaacatgctggttgtatgcttttggaagagttggggaacactgagggtaatgggatcttgatggggctggaatttgtgggaagatggtgtctgggtaggctgtttttaggaaggggcactctcttccttttgattcagagatttttcctttcttttcgggtggttctgaaaacacagcgatggatccaggcattcaaacaccatggaggaaggaagagtggctgttgccattgcttcccgagttttctgggaaccagtttttggtgcctcttccttgctctactggggcttctctgcatgtcagtttcttcaactgcgaagtggaaggacagcgatacttttcttacaggacttttgcggggatggatgaaatacgtaaaacacttggtctagtacctggcacatggaaaagccttggtaaatgttcactgttgttatttttgttattactaatacactagtccatgtatgtatagtgtcctcctatacacaccaagagaatatggaaaggactcagcaatgattaggtagtccaaagtcataccagattggaaaccaagcttcccaggccctgggacttttctgctagagacacttcacggttctgaccaactacaaagagttaatatgcagttgccaaatacctgttggtaaaaggtggatgttggggaggagtggattggggaacagaattagaaggtccagtcccagaatgggtaccttcccatcaagttgaacaagtcaaaacaggttatgttgaaacaactgagagaaagtaaagcaaacaccattgctgcagaatatcatggtacaaattggacatctttgggagttagcggagtaaggcaaaatccagtgagggacgcttaatgggtaatgccaattcacaattcttgttaaattacattgctgatcttccttggaatgtctgtccattcccccaagtagactgtgatctcaaggcaaggctgggtcttattcatcctggttttcctggagcagtaaatacttgtgctggaactgggcttataagcatactaatggaaagtaaaatatttgggttggttttttaaaaagacagtggatttggatcagtggagaggaaggtagagggaatttcaggtgggcagggtgctaacaacagcccatccttacagggcaccaactgtgttctaggctgtgttccaaccactttacacagatgaattcatttaaattgcacaaccagcccaagaggaaggtaccattattattctcattttggatgtgaggaaactgaggcgtggggagatcaaacaacttgcctaaagttatgtagctttgagtggcttagctgagatttgaaccctgtgggtataaacgccacagatgggaaatttgtgtggggtacccaggttcatgtgcttgttagaagtggaagctatttgtagagaatcacgaatgatgaggttggggcagggtgtgatgggagctgacaggcaggtctaaatgctgggattcattttcagtctctgtgtttattgagtaggtagacggtatagctcttggatttctcagattttttcctcttttcatttagagactcttatctggtgtgtgtgtgcccgcacacatacataaacccacgcgtatatactctttccctgaatgttcttatttgctaaagcttaagcttggcaaagagaggaaactgcactgaccttactctccaccatatcttcaggctgatcatacacaagttgcttaataagcatttggttaatccatctaaatcattcttatggctgcaactctcattttgttgatgactctactatctatgtctattcacatctacattttgtacttttgtttgcctcccatctgtcctgggatggctgataccagtggaagacagcctgaactctccaatcagtcctgtttcctttttatgaaatacttggaggttggaggatcttcccttaaaaagtgttttcctttctacatccagccaaaggctcttggtccttgtgcttgctacctagatccctattggaaagagtcttgcctgcaatttgattttttaaatagcagcaataacagagtcgtctctgctacacgaagacatgcatctgctgtatttcccagacaagttcaaaaaccttaactagcttctgcccatggttattgctctcaagtgccttgtgttgttcccatcccctcattatctggattagatgtttaacatttgcctgtgtgtgttgtgttgga

SEQ ID NO: 71817 - DNA, 1003 bp, Homo sapiens
tcgccagcgccgaaggagtaagacgatcttctccgcaacagtgttgaatccggctgaaattttttttcctccccgcctcctttcttgtttttctttaaccagctcctccccccttcgttcccaccctcaagtctgacgatgacacctccaattttgatgaaccagagaagaattcgtgggtttcatcctctccgtgccagctgagcccctcaggcttctcgggtgaagaactgccgtttgtggggttttcgtacagcaaggcactggggattcttggtagatctgagtaagtgaaaatttgactttctaaagggacctgcattgatgcaaggcttttggagccaaaggtggtggtgggggggtgggggaataggtggggggagtgcagtggagggaagctgctagtcacctgcattgggaaagcagtctacctgttagggctttgcgggggtagcctgttaatattctcattttgcagtgtgtaaggtacctgttcctgtctgtggtatgataattgtcaattgggtactttgggttagttttccaatctttggtcttctttaaaggggagagagtgggagatttccagcagtgcagatccccggtcaaaggagaaatgtgcaggagttaagatgagctgcccatctatctaaccatctatgtatctgtctctcaagtgggtggatgggggttgctatcttggctgtataaagaatcctaaaaaccttgtctcataagctagaggtttcctgatgggtttaactgagctgcaagtggctgaaccagagctctaacagagagatggtgctcggctcctctccaagtatgctgcaagatcagggatctggcagctgagcctctctgagctggtggagcgctggcagccagagaaagccccgttactgtgagccaccaggagggagtgtgatgtagccgagtcattgattcacagaaactgggcttcatagggggaaaaaaaaccaggagactagaaaatggaaat

SEQ ID NO: 71818 - DNA, 1056 bp, Homo sapiens
atggggtcttctgacctacaatcagacaaggcagaggaaatttctttatggccagctccaagtcagaaaggtgggggaagattagagtcctgccttgagcagatgaaaggagggctggaggaggtcagagagagagagattctgtttttcaaggcctgcttctaaagcctaaagcacccctaaataacaaaagattgtaacaaggactatgggagtcataagccaggaaccgtggatgaaaacctatatatatgtatatatatatctcataataattcaaacctgtctcctgttaatcccatcctctctgtttctgttatcatttccttagtgtagatctgcctaagtgtagaatttgtagaatttgtcatgttgactattgtagacttgtcttttagagtttctagcactagcctcttccacccatcactattgagatgattgtatccgtctcagtactgacactaacccagcactctggttttacatctgtcaatccatcaagacttcactttcactttcttccctgcctcattattcactatgctcttgggccattgctctggcttctggggcttttctaaagtagcacttttccccactccagcccatgaagataccttttaaccagctcttgagattaaatcccctccgtgacactttcctgcaggaacttgcaaaaaagtactgcattccccactggcaaaacttgccatcagccagtttatgtattctctgcttttcacacccatatcttgacctctgaacaacacacatattctcctcttcatttatttcacagttctgtcttcataacattgataagtatgatcacattagcgctctagattttaagcaactggaagatagctatttttttggtactcttcctttaaatttgaacatagtgtctaattagtcaattaacatttttttaaaagggcgagggacatcatggtagagagaacgaagttgaacgtgtttttggttgaatattagcgcatgcccactgtattctaggcacagtcctgattcattatatcatcacacaataat

SEQ ID NO: 71819 - DNA, 1098 bp, Homo sapiens
attgatgaacacatttgggtatggccctaccttcattgaatttagagtctaagagcctaaccggtcttttgcttgaatagagctgtagtcctgttaaattgctgtacctccaaatggtgggaagtttaatgcttcgtaggcctcccctcactagtttactgaaccacatgtgcttgatttttttttgagatggggtctcgctctgttgcccaggccggagtgcagtggcgtgatctcggctcactgcaagctccgcctcccaggttcacgccattcttctgcctcagcctcccgagtagctgggactacaggtgcccgccaacacgcccggctaatttttttgtatttttagtagagacagggttttaccatgttagccaggatggtctcggtctcctgacctcgtgatccacctgcctcagcctcccaaagtgctgggattacaggcatgagccactgtgcctggccccacatgtgcttgattttaagcaaaatacagactataggctgtgacctggtgatctcttccccacatacagcatcctgctaacctataactctccccatgtctcagatctagcctgggaaaggacaatgttggatcgatggcccacttctaatcttgggatttctaatctcaagatgagttgagaagactcaggatgtgtcctgttttctgtttatttagaacagggtttctcagccttggcactgttgacatttggggccagataattctttgctgtgggggctgttgtgtgaattgcaggatgttgaacagcatcgctgtgctttctccatggataccagtagcaccctccccctgcagttgcaacaaccaaaaatgactctagacattgcccagtctccccttgggggctacagtcaccttcagttgagaaccattgatttagaagaattggccaggttattatcaggagagggaacatcacagtaatctgaatctctcaatactgccactgttactgttaacgaacagcaaaactattacgtggaggcagtaggaccttgctactcagagtgtggtccgtggaccggcagcatcggaatcatctaggagcttgttagagcttcaga

SEQ ID NO: 71820 - DNA, 1039 bp, Homo sapiens
tcttacataacagtgtcactgtctaagtgtttgaaaaactatttgtcaaaactaatattggtacattattgttaactacacttcagactttttttggattttaccaattctcccactcatgtcccttttctgtttcaggaatcaatccgtggtaccatattgcagttagggtgtttatatttgatgggactggtcctagtttagatacttagtgtagctcagccagcaggtgggatcttcatgcccaccgaggattggtattgtgttttcctggtggttttatggcatttccgactatgcagagaggcatggtattaacttcagtgtctcctagcaaattttcctgtttttcaccaacctctgatccctgcattatttgcaatcaactcagagatttgtgattgaaaacattgcttgactccatgctctttaagctattttctaactaggtaactgtaacataaattatgcttttatctagcactgtttttcataaacacatgttgagtgattttcatcaaccgaaatacttcgaatcattaagtttcccaagttcatggatgctgcttaaatgcctggtggttccaggctgtcgaatatttctgccttctgcaataagagattgtcccttgttaaaagcaacattagcctttgtgcggtttcacccccaattcttctttttcttgttgtaaccaatgaaaggaagtactgcttaacacagcaggtaataatcttctaaaactcattatctcaagaggtggtcctggcaggatatataaatgcaatttaagaaaggtcttggcaaatttatgaatgacagaactgggagtggctaccgagagaaactaggatgcgcctttgctttgacactgaggtcaggcgtagcttctgtacactcctgggtcctgcctcttggggttgctgcaggcagcaccccatgaaccaggcatctgacccagttccaggatacttattcttccagcaagtcgaacactctgtgatgagtgactgccatgctcatgggtcaccaggctctcat

SEQ ID NO: 71821 - DNA, 2147 bp, Homo sapiens
aggtactgttaggtagcaggtttacagggatgagcagaagaagcaggccctctctgccttctttctttttcatcacactgaaatcacagcgcattgtgtgtgtgcaaaagtagagtgcagagggaacatgcagaaaggagttataggatagaaaaggtagccaaggaaagcagcaagaacagcatgatttgttcagggatctttaaatagctcatcattgttggacagcaaagggagagatggggaatgtggcaagatgagatgagaaggggagccggggtcaagccatggaggacgctgaacccctacaaaggaactaagcctattgatgtgaacaggccacttattttgggaacacgcctttggtccaaagggaagagggcacgaaacttccttctctaaaaaacaaaaaaaaagaaacttgcatatatgagaaatactttcttcactttgcagcatgagaaacggaatccctactaaggaaataattctcttattttttttggaacagcggtttttgaaatttccagatgaccccaaagtgagcagtgactttcttgatctgattcaaagcttgttgtgcggccagaaagagagactgaagtttgaaggtctttgctgccatcctttcttctctaaaattgactggaacaacattcgtaactgtaagtagggctgttttccttaatttgggatgttgggattatgaaacactcaagagagatctgagattgttctggcccaaagaagcttctgtaaattacataaataaaggctttaattatctacaggagtagtaaaggctaatgatgtagctgtctttgagtaataattctgccttaaaattgtttgtgtagaactgggtcatttatcaaactctgtgtttatgtggcctttagaatattatccctcagtaagttagaggcacagattaatggagtttgaaggttgtcacttggtttgacacagtttcttccaaaaaagtggatctaggtatttcattcacatatcaggaaaaagactcagattaggcaacatgcccaggttgttctgctaatggctgagtttaaacaaaaaccataaacacctccctgtgtttattcatttgtttccctcgataatatttgtctttgctcacaagcatgtaaaacctataatgtatatgcacagtagattcattcatacatcactttttataatcagttagtgcaaactgaatgaattcattaaaaacaaagacctggtttattatcaacagaaaccacacaatgctcttttttcttttaccagttggtgatcttttaaaaatccttttaattcttggatgtgttgttgattgaatgtgttctactgaatgatcagcacggattagagccagtaggaaagcagttatcctgtttgagtatgtgttttgtttttggtgatggagggaggttgggaaatggaatctgtttctaggtgtcaaaaccaggcttctgattggagatgtgttataattataattgcttgcaccttcagctaggacatagtatggtaaaaaatcagtattgtccagttgtaaaccattttgatggtttctctaaccttctgctgaaatatttaagtaggtcgcatttccataaatctttcttggcaaatgtttttattattcgggtggccacattgctttatttttctaaataaatagacatctccccccaaatctccaaggttcagaccttctaatcagtaatatattttcagggcattcttccttttatgcttttagaaagatgtaatagactttcttttagatgctgttcaagtacttaatcttttcttgtcttgcctttttatctctgtaatcttcttgaataagcagttaattttttttattcatgaacctgctgatcatgtctaagaatgtatctccacttaagtaagtcagtgaatggtgattacctgagtagagttaaagtagtcccccaccctcctatctgtggcacatatgttccaagtctcccagtggatgtgtgaaactgatgatagtactgaaacccatctaccttttttcctgtgcatacatacctatgttatataaagcttaacttataaattaggcataatatatttgactcccagctcccagtgtagtggctctgaagact

SEQ ID NO: 71822 - DNA, 1249 bp, Homo sapiens
ctggggtaggagggttgggggaagtggggtttgagaacccttagttgatcatgcctgcagtaggttgagaagcatcagaaagctaattaattagacaggaatatgtgtttgcagtaagaaaacctcagcaaactaatcaagttccaaagttactgcttggtaaataaataggaattaagaataagaccctatctctgtgtctggggtcattctcttcggagctcttggtggagagacagggttcccagtttcaattttttagtgcttcagactgcccttttcagttataattgtaacaaccttcactccaggtggggagcctcccaggtttatttacaacaaggctcaatctctgattattttggtcaaggagatatgacactctataccacacacttgagaatattgcctctctttttctcttgagcttttagggttggaacgtgacaggcagataaggaattttttgcattaagtgcaaagtcctttttcttatagaagagcaataatctgcacactagatcaagtcaagtgtggatataaaattataatttttggggggatatttttaatagtggttttgggttaaacatatttcctttaaatgaaatgtctgtaggcctaaagtaggttctaaatgttgcctgtactcatagtataccatataaaatataatccacatttactggaactaccatatattacttaccccaaatcaatcaatcccttccctatcacccccacgtaatatcttcgtattttggatacctgtgaatcttagatctgttcagttttccattatccattgtcttatttcaagcttctcattcagaatgttgctttggagtattttctgttagtaaacacagggcctagtgactctaggacctgctgtgtgacttaggtcacccacttcactttattagaatctcaaagaatggtgaacagctgagttccaatctgtctcatttggctctcatgaaaacagtcataaggagattgtagataaaccacattatatagcatagtaagtgataatcaaccccatttggcagttgcaaccccacaagagatagccctttttagatttgtgtaggagtgaaaagctttattttccacaagaggaacgacatagtaagaactccttttccccctgcttctgcaggtatatgcttatgccctaggcaacttgatgggtaaagttaggtttaaatagttttatttgtaagctcttctcttctcttctctt

SEQ ID NO: 71823 - DNA, 1033 bp, Homo sapiens
cccgccaccatgcccagctaattttttgtatttttagtagagacggggtttcaccgtgttagccaggatggtctcgatctcctgacctcgtgatccactcgcttcggcctcccaaagtgctgggattacaggcataagccactgcgcccggctcttttttttcttaaactgcttccagaaaagtggatattattaggttgatgttaagaaaaggcttggagttgcattaactttttgctttctagcatctggcctgtctgttctgcagacctgagacctacttgagataattttcttggtgttcaggcccttggaaaaataagttccctatgttgtccagtgtcaaagtttctcaacctcagcactattctttttttcaggttattttcttgtaatctgttcacttgatcattacattaagaattagattatattgctataactacaaagcattttatgttttaaaaattatgtacaatttagaaacaggcatgaaaacttaggtattaaatttagtggaataaagcacagaaaaaaagttaaaataatgcagttttatcacttaggattaaacatttatatgggccgggtgtagtgcctcacacctgtaatcccagcacgtttggaggtcgaggcgggaggattgctggagtttgagaccagcctgggcaacaaaatgagacctagtctctacaaaaaatcaaaaaattagccagacatggtagtacatgcttgtagctccagccacatgggaggccaagacagtaggatcgctggagcgaaggaggttgaggctgcaatgaccgtgtttgcaccattgcattccagcctgggcgacagaacaagaccctgtcttaaaacaaatttatatgctgcattcgtgaaattaaaaaaaaatcatggatttagaaataaattgaagcaaggtacattgacagtgtaacctcagcactactgacattttgatctgaataattctttgttgtgggggatgcgctgtataagatgtttagctgcatccctgactcctacc

SEQ ID NO: 71824 - DNA, 1025 bp, Homo sapiens
tctgagaatgttgtgggaatacaatgattgttagtccaggaatcacaaaatttgagatagagtctcagcttttccattgcctagctacatgaccttgggaaaatttcatagctccttttggccttagttttcctcatgtgaaatgtgtgtctctaggagaaataatccattgaataatatgtgtttcatttctcttccttttctttctctcctatccttccttgctccctctcgccctttttctctttccccctctctccctctctctctccttccttccttcctttcggttaaattcattttgcaaaatgtatgctaataatttatatccaccaatagaggaggtctatataacagaatacataaacaaagatttttggctcaattgagattctaggttagcacttgcttgctgattgggatggaggaggcaattcatggtcctgattttcttacagagacatcaagcctgagaacattctcgttgaccgcacaggacacatcaagctggtggattttggatctgccgcgaaaatgaattcaaacaagatggtaaaaaatggaataagatagcttaatagagtttatactaaaaagtattcttggtcctcctaagtttgggaagtgttgggataaaatggtgaacaatgttttggagcctttggcagtgtatgggggtggggacagggacacagaaccatttcccagaccgtggcacctttttatttatagtgcctgttaataccctccaagacatttttaggagcattgttatagtttggttagaaataaaggaaaatgcttattttgtttctctcttcattttccttgcctgttatagactgtcttttgttatattatcttttttactttaaaatattttgatgaaatggaaactcctgcatgtcaaatcctctatttcctatgcagcaaaattgaaattaatcactggagcatttgaaccaaatatccttaagtgttaagaaccaagtgctcaaaatatcatttttaagtcttggatcttt

SEQ ID NO: 71825 - DNA, 2283 bp, Homo sapiens
gtgtctggcttaatgtctgctgttgtcagaaaccatgtgaatggagtagattcccaggttataaggagcccccagggaggatgcgcgagtcactggcttctccaggggtctctggtttggggttgccttggtgctgggcacacttcctggagattttactggaccagcctgaggcctttggggctctgtgcagatgctctacttctgacttgtctagagctttcttctaattctggactaaaagcaagcaggagtttggaggatgatggtgagaattcacatccccgagttggcttttggaatgcagtagtttgtgagatttagtgttttttttaagaagtatattcagatcttgcctttttcccagaaagcatatgagacaacttccaagacatttatagcatggctaataaaatgggaaatcagggcgaaggacaggagaactcaataagggttaacatggctacagcgattgtctaaatgggttctttttgctggccagagcagaaaggatcatgcagtaaagtgggggggaagaaagggaattgaatggtaggtgaagacttcatgttggtgccaggcactgtgccaggccctcctaggaccttgtcttactcaatcctcacacagtgctgcaagaggattagtcttatccctgttttagagaggatgaaactgaaaggcagcgaggtgaagtcaccagcaggaggctgaagccgcccaggctaactggccttatagctacctagggactcaggaatatcacacctgtttatcatcaaaaggagaaaggatttcagttccttggggtagaagagtttctttttgctaatcaaacattttacttgaggcttcatattcttcttcaagatttttttcctgtgtatgtaccaacacatgtaataattccttgtttatttcaaaaaaggggttgtactttattctttacaagatttcactttatattgtcatggacaattttccatggcagtatgaataaatggaatctgtttgtttttaatatctttgtcttatcccattgtttacatatgtcatattttagccagtctctaactgatggatagctgaatgatttccatgtttttttcccctgttacaaacaatactgcaaggaatctatttatctttctatttatctgcaaactattgtaagtacctgtaaattgttagaagtggaattactaggtcaaaggggatattttcacatttaaattttgaatagaggctgtcagttgccttccacactgactataaaaggaaaagattgtatcacatttattgcaagccttctgtattctgctgggtgctgaggggaatacagaaaggatataagagtggttgccctctaggaatatccgtctacactgtacctaatcctagggaatgtctggggtgtcaacttgtgggtgggaaagtgggtggatttaattcaactgttcaagcttgccttgcaaacactgtgcatggtgtctgggactagtctttcattatattgattcccctgggtaacagatgtaatttccttagggcagggacttcatcctacatgacttacagcgtgccttacacatcttctttgctttgtggagaccttgttattataacacgtcaggtgatattcgaggatctaattgaggcattccctatttttgggtgtgtgaagaattaataactttggcattctatacaggtcatggaatatcagcctggaggggacttgctgtcacttttgaatagatatgaggaccagttagatgaaaacctgatacagttttacctagctgagctgattttggctgttcacagcgttcatctgatgggatacgtgcatcggtaagtgagactctggtagcatttttatgctgaggattttcctgtgtcgcataagagttcctgcatggaaatgagtggatgagtgatttcaagatcaagataacgccccatccagtttttagccagtctaccaataactggctgaaagcaaactttccaagatggaggacatttcagcttgcttatccagcagtgcaatagatctagaattgtaatgtgctcaagtttgctagtaatatctattaatgtagctaaataagactgggaactcttgcatgagttctttgggttatatgatagaagaactgaatttggtttgcagaaggaaatgtcataccacatagtagtgtaagaccatggagctgtacttctctaactctgcccgttagaatttacaattttttttttttttttttttttttgagacag

SEQ ID NO: 71826 - DNA, 1048 bp, Homo sapiens
tatggatacaatccaaggaagatgaaccttgggctagtgggataaaactaagcgcatgtagttagaatggaatgatctggaaaccaggtcccaagttggtctaaattagactcatgttgactatgtcacactgtaaaccagtctaaatgctaataagcatgcttgaccaaacactgccctgcagccttcagagaggaagaaggaaaacataatttgtatcctctctccctattttctgagtctatgggattcaaattgtagctgccatggaaactgtactttggaatttctagagcccttaattttaacttaacatataaaaacacttttgtactgattttataattattcatgatggatgagaaagtgaatgtctttgacagtgagggaagctatccgaatgctattttcttttttttttttctttcataaagatgcatatatttgcatgctttatttacctggggctaactcttgcatcttttgcagattccgacaccatagctgagttacaggagctccagccttcggcaaaggacttcgaagtcagaagtcttgtaggttgtggtcactttgctgaagtgcaggtggtaagagagaaagcaaccggggacatctatgctatgaaagtgatgaagaagaaggctttattggcccaggagcaggtaggaggattttaacatcatgcttttccactttctgtaccggagtgttcattgcaaagacgataatctgctgcactggcgtctaggatcaagcacgttttcctctgtgactctatatttaattatagttggggcaaaaaggtctctcatgttcttagctcatcttcttgaactgatgttggctaattttgaaggctcacaaattcctcttgatgtatcatgtttctatcgttgtaatttatttcagaaccaaggtggccttttagctaatgaatttaagatgatcttttatgaccattagctgaggactcaggatatacatatggtggggtgaatcagattgcttttgtacacgctttaggtatttgtgttgtgggcatatg

SEQ ID NO: 71827 - DNA, 1229 bp, Homo sapiens
tacctcaatattcagtgcccactgggcccttagatactgcagctaaaagtgcacaggggtggagtgatgtgacggttttggggtcacagaagcagctggtatagagagaagttgtgaagttttttttttttttcctgagacagagtctcgctgtatcccctaggctggagtgcagtggcttgatctcggctcactgcaacctctgtctccctggttcaagtgattcttatgcctcagcctcccgagtagctgggattataggcatgtgtcaccatacccagctaatttttgtgtttttagtagagatggggtttcaccatgttggccaggctggtcttgagctcctgacctcaggtgatccgcccacctgggcctcccaaagtgctgggattacaggcctgagccattgcgcctggtcttttttttttttttttaagtaatcataggcttgaatgtagcctctcatctgttcaccttaataatccaaaagcctttagataaagaaatggagatttggaatggcttctcagaattccaagagagtattgtcatggttttgcctgcaaagcaccgtggtctgtctccttgtgcagttgagaaagctggtggtcgccactgacaggcccagagttattaagttggacactgctttaagcaactttgtaaacaatccaaggcatactagagaattaggagagattggctttgtgtatgagcaataacaaaatcaagttcaatccagcaagtttttggggaattataattcaaaactcaaatacttgatctggaagaaacttggaaagagggaaggaagacaggcttgttacagcattgtcagggtaaaaggaaaataccgtgcagcttttaattttgcttcttcatggcattccccatgtaggtgccctagatttgttttttacagtggtcacgacttcatgtggatccacccaccactcttgcctggttccccaagggaccaagggaaggtgtattcaggatgattgctgaagtgaggggtggggtctgtggctgagaagactctcaataccgcggcactcattataagcctctgacacaggagatttcaactccacccgtgcaacaaaggaacagggtgggcaagagtagttacagttgcaggctgagtgcgatggttcatgcctgtaatcccagtgctttgggaagccaaggtgggaggattgcttgagtctaggagtttgagaccagcc

SEQ ID NO: 71828 - DNA, 1051 bp, Homo sapiens
tgattttgcccttccctttttcccgttggtcgcgagtcaaaggaagatgcaatttgattggctctccccttcactttcctccatgcctttagggacatgggcggggcctggctgagacgcccatgtctatcataggagcggagacgctgattggtccaaacacggctgagacccgcccgcgccgttcctcgggttcaaacgcggcggcgggaggcgcggggcggaacagatcgcagacctgggggttcgcagagcgtgagtctgatcccccagacccaattctaccgcacccggctctgcaaggccaggggagggccgcctccacccatacaagtcccgggtttccctcccgccccggggagggcggcgattccacccccagggctgcgggaggcctggagggtcttccggggctagctgtgcgcgcgcccaccttccttgggagccgaggggtcagccgagtggtgctggggcaggaggcttgctcctcccctaaaccaggcggagtgctttgtctcttcagctctgcctcctgtcagcactaactgcattattctgcccagtgtagtcggccggttccttattatctgcgtgaacttagccatttacttaacctctctgtttcagcgtattcataccccgtgcccaccccatcacctcatgatgcccccgcctctttcgctctgctccagtccgtctggcctcgctgttgctggagaggccaggtcctgcctcagtgcttttggcttggctgtttcgtttgccacggatgtctttctttccccagatatcaacatggcttgctggtcattcgcttcaggtcttcaagtcttgggtcaaatggtggcttctcagtgaagtcttatttgaccacactaaaaattgcaccatctcacccccattgtccttttcttgctcgattttgtttttaccccatagcacttaacaccttacaacaagctatatattttgcttatttcagtcattcatttaataactattcgcacctatttgtgtgccaggctatgtgtgcccccactgcatgggggca

SEQ ID NO: 71829 - DNA, 1071 bp, Homo sapiens
cccaggagaactaagcagtcaggagagggagccctagagagcagtaggaggagggaggacttcggaaaccaggcatcttcatgctgatgactcagggatatgaaggaccagatgcttcgcagatcagcagcccggagagaaagggtttctgcggagaaataacggaaaaaactgctcacagatgggaatacgaagcaaagaacctccctaataataactaccgtttattcggcactcagtgtgtgccatgtcctgtattaagtgcttgatagtcattattttagataatcctcacaagaactttataaaatcagtactgccgcttgtcattttaacagagaaggaaattaaagcctgagagatggcatcgtctgcccaggtcattacaactggtagagtcaggattgagatctagccaggccgacgccagggatcacgtgaatcattattctttattttcttcacatagaagcagtcttgaggaagataaatggtcctttgtgaccaagatggattgggtggatatggaaggaacatttcctcaatgattaaaggaaggtttggagagcctactgggtgacttgcagtcattccttggtgttgacctcgttggtggtgctacgtgtctcctatttccagaaacaatcccatctaaagctagaattcgtccctatgcttccttttcctcttggacagacaacccattttttacttggatcatgcctttcttcttttcatcccagtgagatggaaatttcagaacatcaagaggctgaaatgggtcaaatagtttctcatggtttttatcgcttattaaattcagagcctaaacaatattcaagttttaacatcgttacccttagactgaaggccagaatctgaaaagctcctgggcctcagggctggcattgttcacttgttgactggaaaggagacagacagttgagggattcccacatcaatcttagagctaaatttctgcagttgaccatgttaccattccagcaaggaaatgttctaacactttttattatgacctcccaccttgagctggaattgtgggccagaggt

SEQ ID NO: 71830 - DNA, 1010 bp, Homo sapiens
tgtgagtgccctgtagttcggttgtcctgctaactaggtctgccagtcgatgaactcctgagatacctctctgaaaagtcgtttgtgaaacctataggtagactgccaaaaagcagcctaatgaattgaattgtttaattttcacttgaagtagaggtctagaaataaaaagccttccttttttttttataaagagattcagttgtacgactttgtaaagaagtacaactacagagatttatacttgtgatttgaaatttcttcagtgaaggacttgattgaagagacagctgacttgaaaggagcaccgtatcagtttgattagtgccagatttcatagtaatcctgagtgtgcaattacatacattctgggttccatgtggagcctttatacatttcttcaacatagggcaaagatttcagaatggtaacaaaaaaaggttgtattgtaaaagaataaattatctttgacattttgttatttacttaatggacaacaatagtttaaaactctttaaactattttttaaaaccttcattcctctgcaggtcagcatatgaactctagttttaaaagttcaattttaagttctggagatagtcgcacaacaatgtgaatataactaacatatacttaacatatacttacaggccaaatattgatcattgttgaaactcagtgatgaggggagtcagttatattatttcttataggtaggtttgaaaattataaaaaattttaaagttttaaaaatgttcattaaagatactaagagagtaccattagttgcttgttaatctttctagtgttaatgtgagagtgacaaacctggtttacagagtactgttttatttgacacctccggtttagttttccccacagtacattgtttgaacaatgtaggttttagaatgtctgtttagacaatactttctaacgttcagtacaaactgctgtactttgtacttttttcttttttagacaagatctcactctatcccccaggctg

SEQ ID NO: 71831 - DNA, 1120 bp, Homo sapiens
gctctgttgcccaggctggagtgcagtggcgtgataccagctcactgcaacctctctgcctcctggattcaagcgattctcctgcctcagccttccgagtagctgggattacacaacccaccatcatgcctggctaatttttgtattttttagagatggggtttcaccatggtggccaggctggtcttgaactcctgacctcaggtgatcctcccgcctcagcctcccaaagtgctgggattataggcgtgagccactgcacccagcccagatgcttaaagttctgaaggcatttttaaaaatttcttttcatctacaattagccgttttgctttaaaacttatatccggtcatgtccttagctttttccccagaatatgaagtaagacagtaacttgtatttatacaccttttttcttcaggaattaaatatttgttgttaatgtacagtatctcccttttttccatcatggctgagtggattatctctttactgcagagattgttctcttccctcagttatattttcctccttccccaggccaggccaattctcattagtccagtactgtttttttaagaggaagaacaaaagatgaaaatgaatacataatgggagtcactagtggatttagggaagaaaacccaggggttctgatttgcatttagttcttggaccttttaaagaacagtactttttcagaaccatgtactggacttctgagcatattgtcagttttttggttctttttttttttttggcagaaatccatttctgtaaagacctgttttatgtaaactaatgatcttaattttgggtggtggggtttttttagttttaaatagactctttttttttcgagacggagtctcactttgttacccaggctggagtgcagtggcgccatcttggctcactgcaacctccgcctcccgggttcaaacaattctcctgcctcagcctcctgagtagctgggactactggtatacaccaccatgcccggctaatttttgtatttttagtagagacggggtttcaccatcttggtcaggctggtcttaaactcctgacctcgtgatctgcccacctgggcctcccaaagtgctgggattacaggc

SEQ ID NO: 71832 - DNA, 1005 bp, Homo sapiens
agggaaataccagaatgtttgtgagagctgaggattcaggcaataggtagagctaaagatcttcttgcctgcaggtttcccatctggagaatccagtcaccatttgattgtctgggaagtaggaattggacagttcaggaagtcacttcacagagccagctcagtaacaggatttctgattcagttctaaaagcttttttcagcaactgggaatggaatctctatccttgtaaaaatttttatgtttttgactattttcattcattattcatgaaagattcaaccagagaggcctggctagattgatttatttgttcaaaaacatttaatacatactttgagtaagtgtttcttacggagacttatagaatgaatgcaacaaaccagaaaaattaaaggggaaattaagatttcttgggggctaagttcatgttacaaaataacatgagctaaagcagactctgccccgtgaaagataggtgaccaagagagacgaagggaaaaagcagatttcaacatgacatagcaaaagctcatggagcttggaatctgactctgttactcattaactgggggaccttgtttgtgcctcagtttccttttctttaaaatgggtgtaaaaattatgcctcatacaagtattattgaaatgaaaaatgagataatgtgtttatgttaaacagcgtgtgaaggtaaggatttgtttcagtgttgatggttgttttactaaagcagtgtctttataatttgttcactttgcctaatttcttatagaaaatcctgataagctgctcctaaaagaacgtaggaagataacatttctactagatctagatttttgttatcctttctggccttgaatataggcccttggtgagttttatagctttttcccttttttcaagcaggaccagcccctggggtttccatcagcagcaagtttagatagcgttttattaactgagtatccaggaactagaggagttaaatattttgaagtgaatt

SEQ ID NO: 71833 - DNA, 1055 bp, Homo sapiens
tttctgactttgaataaatcctcactctgggtttcaatttctgtcagtaaaacacggagattgaacgagatgattccttcgctctctaaatgtccacatgtacgtatgcgatctctgttggaaagaaaattagtagagagatagtctcacatgatgtggtatatcatgtctggtaactttgtaatgctgccgcctttgcatgcagaacatattcatccttctctgggaccgagggcggcttctcctctcacccaaatttactcctttgtgtaatgagaaatagagagaggttgagatgattggtgccacaacaaaatttattttccattccagtcatgacacataaggtactttccctgcacacgactgacggtgtggggaatgaggaggtgtttatgtgattttcctgtttaaaattatgcatcatagtactaaggttttatgaggttgacattctgtaattctccacgaataagtcagattttccgcattgccctggtatgattagttgcattcaatgctgcatgtttgtcatttgcagaactgtaagaattccccctatacacacctctcgtcatcagttgctaggttacggcttttcacattgtcccagtctggtgatgttgccatggataccagttatacctcctcctatgacactgtcctggtcaggctcagagggcgggcaagatgtaactatgatgtcagagatgttttagcatatgtctttccctttacattaatgataagatctaagtaatagatatcaattctatgtgttctcatatatgaattaaggacatgaggtattagctgaatccctcaaacagtccaccacttagaacctttattccattatgtattttttttcttttttaaaggaaagggaagggaaaggaaggggaaagcctttattccattataattctgcagaaatggaactaacagattataaaatatgaatataagatctgctatactgtgtccagctcattccctacacagaccagcaccccacctcccatagggtgggctatacatggaatatcattatc

SEQ ID NO: 71834 - DNA, 1534 bp, Homo sapiens
ctcagaattaaaaatgtcttatggtcaaataaattgatctcttaaagatttgcagtatatgttagtacactaaaagcttttgtaagtcttagcagtaaagaaatctgtttaatccagtgtttcccaaatttttttgaccccagaattattattattattatttttgagacagagtcttgctttgttgcccaggctggagtgcagtgtcgcgatctcactgcagcctccacccgccggttcaagtaattatcctgcctcagcctcccaggtagctgggagtacaggcacccgtcagctgtaatctttgtatttttagtacaatggggtttcgccacattggccaggcaggcctcaaactcctgacctcaggtgatctgctcgccttggcctcccaaagtgctgagattataggagtgagccaccatgcccggcccagaattttgttttttgttgctaatacccatcaaccttcttttaaaatagtcttttttcttccagttttattgaaggataactggcaaaaattgtatatattcagcgtacaacatgatgagttgatagatgtatacattgcaaaatgattaccacaacctaattaacacatctgtcaccacacttggtaaccctttgtgtgagtgagtgatgaggacacttaaaattgtctctaagcaaatttcaagtaaacaatactgtattagtaactatatttagtaaacaactgttggggcagaacatactctggaaataatagctatataacaagtggattgatctggaaatgaggcgagatgtagattattaatgtagccccatgatttagaggaaaggtcaacccttcattaaacccaagaaagagcctaataatgactatctgcgctattttcctgaagagatgggtgtattttggaaagtgagacaggcttgcgtcacttggagctagtaggttgatgaagatacctcacacttgtattgtgctttaagatttacaaaaaaatgtgcatttccgtgatcaaaaccccaggaggtagaaaggcttatattgtctcctgttttacaaaagaggaacctcaaactaaatgacttgcccaaggtcacataacattattgataggtagcaagactgatgttgtctggaaccctgggcttcaggttgcaagtgcaggatgacccacatcactaaaatagttgcctagaattatatgctaatgagtgtttcttttatagaaatatatacatctcatattcactttatttttcttccttacaatacttcaagttgcttttctacccctgggctattttttgtctttgctactttcaacagtaactgagtgaagagcacagcctgggtatgacaaataaccagtttgcctcaaggcatgggttttggcctcagaggatcagaaaccttggacttgaccaaatttcaaatttctcttatagaacatgtttctagatatgagtttagaacctactgtgtttaacctgttttggttttcataaattcaaccaacaattattaagaactgaccac

SEQ ID NO: 71835 - DNA, 1036 bp, Homo sapiens
tcccagcactttgggaggccaaggtgggtgggtcacttgaagtcaggagttcaaggccagcctggccaacatggcaaaaccccatctctactaaaaatacaaaaattagccgggtgtggtggtgcacgcctgtaattccagctactcgggaggctgaggcaggagaattgctggaacccgggaggtggaggtggcagtgagccgagatcatgccaccacattccagcctaggtaacagagtgagactccatctcaataaataaataaatagagaaaaagtattgactgcttattgtgtaccaagcattatgtaagataccactttctctcatttgatcccatgttaaccctatgtgatacgtagccttatcttatttctttgaaatgaaaaaatgaagctcagagatgctaaatttatcacctaaggtcaccacatatagtgaacaagtggctgaactgggattcacatcaaaggcagctgactctaaaaccctgctcttaaacccctgctaaactacttactgtaaatggagctctgagaaatgcccttgcgtcaaaatcttttttaaagaattttttttcaaaaaaccatgctctatacagagtataaaacataaacatacatattaatgaaatgttataataaaaggaaaacctttgtaaccaccacacaggttaagaaatagtgttgccagcacaactcttatttccctccataagcacgacctcttcttcccccaagaggaaccactaacctgacttttataataatcattcctttcctttgctttataatgagttttacctgctaagtatatgttcataaataataccattttgttttgcctttctggaattttatataaatggaatcacacattgtgaattattttctgtcttctttcacttaacatttagtttttacaatttatgtttatgcatgtagcttagtaaattattttgctttggtatattatatttcattgtatgaatattcacagatctgtttcactggtgatggtttataggttttagc

SEQ ID NO: 71836 - DNA, 1032 bp, Homo sapiens
gatagcctgttgccctgctcggtaaatgacctgaggatgtttttcctaaagtctgtcaatatcttctcttttctcctgcctcctattcccttccttccccctttcccttggaatgcctactggtattgagcagcaggtccttgaagtaagtagagtttgttccagtggggtttggcatgcctgtgtgtgaccatttgtgtgcatgacttgccattcacctgcctctgccagcctctgactccttcacgtttcctgtcttcctctttcctcacccgttcattttttctagaccctcatgaaccgggtcgtccccaggaatgtttattgccagattttttcacaagtttcagggtgtatagcgctgggtgagggagttggtggcctaacactgattccctgctttgtccatgaacactgctacctttaaaaggcaagctatgaaattgtttgtttcaagtaagttactttgtgtagctccgaactaagtttttttagggtcagttgtgtatcagaatcttattaccccatcacttcactgactgaaagttgggaaacaaagatgattcatgggaaggaaaatttaaaggtcagagggtatttaaatgaaaatcaactagagtaagaattgtcttcacatgggtaactttgcttcagtgtaggaaatagtggacccattcacaaaaggggcttgctccttttggtcccctacccagatgcacacttgagagacaatatttctttgtttggccagatatctgatctctctggacaaaggccacatactttgtttccccaggacaacatcctatctgattgaattggtggccagagaagatctgtgccctgtgagcagaattctagttcagagaatgagaacagataaaaagtaaagggaaaagtgtatctcgtaggactgaaacaagctagacattcatttcaggatttcccctggaaaagttctaaggttggtccccaaaacttgcacaagtaaaagccttaaggaattgttatcaaagctggactagagagctt

SEQ ID NO: 71837 - DNA, 1799 bp, Homo sapiens
ggagcaaatatttttttgaatgttcaaagacagtgataacatgatgtcaaatacaaaaactgcctgatttcccaaaataaagcaagaacttcaaagatgtttcaagcctgcagcagactctgaacagcaggaggtgactcctcagacctgctctgctgcccaggggctggccctcccgccctgttggtgccccgggcgggcagggggagtcagtgctgccgcagtagcctctcctgctggcctgttgtggctcgggggcatctgccgaggctgagtgagagcccaggctccagggccaccctcaccttttccgggtcagtgtcctgacgtgggcaggtgggtcccggcaagggggtgactcctgtcggggttgacatgctgccgcacactctggccctgcaggtattatcgggggacccacggggtcattgtggtttacgacgtcaccagtgccgagtcctttgtcaacgtcaagcggtggcttcacgaaatcaaccagaactgtgatgatgtgtgccgaatattaggtgaggctgcactcagggccgggtcggggttgggtgggagagaggcagccggctgcgcccctcagggctgcgctgactctgccttcgtttgaagtgggtaataagaatgacgaccctgagcggaaggtggtggagacggaagatgcctacaaattcgccgggcagatgggcatccagttgttcgagaccagcgccaaggagaatgtcaacgtggaagaggtgaggccctgggccactgtggctctgccacacacccgtggccgccttctccatgctgctggcctgcttgaggcatctaaatgaccaacagaaaatgtcatagtaactgccatttattgagtgcctactatgtgccaggccctttaacgatcttagttcatagttcaacagtcctctgaggtaggtacaattatacccacatttcaaatagggaaactgaggctccaagtgttgaagtaactcaaggaccaccacctggctagtaagagactgagtaaacctctgtcccacaccaaagccaagcacagtttccactccagtcctctgcctcattggccgccttgtgctgtgtggagcccagaggcctgtggaagtcgaggatcccactgcttcagggcacaggggccacacagcagcgggcacaggctcctttgtaagtcaggctggtgtcctgatgctggcccatccacctgggcctgtgggcaaggctggtatgaccttgggcggtgacttcacctctctgggccccacatgccatgaagtggcgtggagcaggcagaccccgggtcacctatgtccgtgaacagcaggggcactttcatctgtcatgtcataagattccagctgggccgggcgcgccggctcacgcctgtaatctcagtgctttgggaggccgaggcgggcggatcacgaggtcaggagatcgagaccatcctggctaacatggtggaaccctgtctctactaaaaatacaaaaaaattagccgggcgtggtggtgggcgcctgtagtcccagctactcgggaggctgaggcaggagaatggtgtgaaccagggaggcagagtttgcagtgagctgagatcacgccactgcactccagcctgggcgacagagcgagactccatctcacaaaaaaaaaaaaaaaaaaaagattccagctgaaggaaaggggttggtctctctaaaagaaggactggaaaacccctgtgagattgacttccccaagtccacacagctcatgggcctctgatggtgttccttttttcagactt

SEQ ID NO: 71838 - DNA, 1041 bp, Homo sapiens
accagcccacccggcggggacatcagccagaaagatggtagccattgagttctagctatgtgggccttggtttcctcacctgcaaaatagccctgatgatctcaagggtcctttcccgctctacagctcttcattttgggcggctccctaactgatgtgctacaacgtgctgtgcacttttctagggaccatgttgtagacgcacttgggggccgtttcgtgtggttgaccttcattctgctttgtcgtctggcatctccctttgggccagccctcagcctagggcctgggcaccagtccctttctcatctctcccccaggggatttgggagcagcttgtcttacacaaggacgaaggaaaaggtcagggatcgagtggaagagatgttcttggtgtgtggccgctcagggaggtggaaagagcattgagaagtgagctgggtcccaccgagcttcttaagagttgggactgaggcatcctctcccggaagaagggctggggctgcggggaggggacccacctgcccccctcatcgcagtgctttctctcttgcaggtgtgggcaagagcagtttactgttgcgttttgcagacaacactttctcaggtgagtcctcccctgcagtgctgctggggtgtcgtttttgtttgtttgttgacatcccctccctggcaccaaacagagttgcctctgcctgatgttgggaactgtctcattctggttgccagaggagggaagaagatggagtggggcttaggaccttgtggcgcttctgtcagaagcctctgtggtctgtctaatgcacctgctcacgaaaaccctttggctggcccatcattttcccacccatggtccaaacaggaaggttcccataacagcgtctatggtgccacccgggacacagtccctgctcctgccccctatgcctccctggcagcctgtggtcagcgtgtgtctttctgatttctttctgcgctccacatgcaggcctttgtggttcatctgagtgcggtgggctttctgtgcttgaaggcaccaca

SEQ ID NO: 71839 - DNA, 1118 bp, Homo sapiens
agatggaatgatagttggatctgccttatggggttgatgtgagtattaagtgagattctgcagtgttgctcacagctcctggcacatagtgagttgtcactgtttgctgttacactactatatacagaggggtcctggggatgggacagccaaaattataaaagtgctttggccacacacacacactgcttgagggctcctagctctgatcactgctctagctccagtgcctagaacagtgcctggcacccagtacatgcttaagacatatttgcagaaggaattaatgaatattaagtgtccttcgaaaaggtagactggtttctgggaaaaggtggagggttttagagctgtttggagtgtggcaggtgagcaggtttatggagtgaccaagaggtcaggaaggcaggccccagaaggtttatgggagcgaaactgaggtgctggggttatatgatgttcatgaaagagtcttgggagcatgctcagtttgtagaccagacctgagctgagtgtggggagggatgtcttatgattggaggcagaggccaggctggtggtagagcccatggactgttaaggaaaggggatcaaatcaagtgagcggtatgacttgggatgtaggagtgttgggtagcgatgtcagagctaggtcagggaagtgggtggttttggcctcccttttaaagctggatggagatgtggttggtggtttggatcaggtgaaggatggctgaggtttccgtggttgctggaggaggggagaggtaagggggaaagctgggggctaaccagggagatggaagagtaactgaggttggggaaggaggtagaaaggtggagtactgactggttatggtttgaatgaagggaaaccaggcaagctctggagtgttctcttggagatggcctttggtattcttcagggtcttgaggcttcttcctttacatgatttccttgcagccctggcctgggttctgagggactggcactggggccatttctctctttttggagtgacagcccgccgtggtcaggagcctttatccctctgcaagacatctggacctctgcgttgatatccaacagtgaaaagcctaaactcagcaggaagatg

SEQ ID NO: 71840 - DNA, 2736 bp, Homo sapiens
agtagtagagtccaaaccagaagccctggactcctggttctgtcccagttccatcagcctcacctagtctggaagcatctgtcaaatatttggctgcgagcactgtggggccagtagggagttgagtctatggagaagagttttctgttcccttttcagacagccctctgttgtggtctaatttactttgtagggccaatctaggaggagagggcctttgggctcacatggttttacacgtcattgacacacacacacacccacacacactcctcctgcccacacctgcaacacacacacttgctgctgcacttcccatggctccaaaggcctagttctggtccccaggcgccagctgtcggactccagccccagccttctctgtggggacagacaggaaagtctgctgtcttggtcacagtctttcagggcttctacagagtcatgtgtacagtgcaagcaaaagttagtattgaaacatatttgcattttaccacagtgcagcttaaaatagatgaagttggagagagtcggtgtcagagccagctttagcttggcacctgggcttctgcttcgagctcagaggcccaaactgctggcagtccattctcttaccctctgaacctccactcagattgaaggtggcagttcagggtgccagcctggcattagctttttgggttattgagtccctggttggtggtttgttttggggacatgttgagttggcacctgtaataaggaacataacttaaaatcctctcttggtattccatagttagctggccagggaggagcacggagccgctcgcgtacctggctctgatttgaacaggaagtgcttgcctttccttatcttccttggcttgattagtggctttagtttgacttcctaggatgaacccaagtaatttcggtggcagtggggcactcatgcagtagggagatagcaggagtcattctggccacaagatgacacaaactctgtgggagaaaggagctcagagtggccgtctctagccggcttccctggtggctgggggcaggtgcctcccctcctgcccctcccgcccctccctgcctcacagggctgttgatagtaattgagataataaatatgaaacattcagccttcctaagaagaaagatgctatgtaaatacagttattactgctattacaaggatgattaccatatgcatacacactggggttttctataattaagtgaagtgctggctgtgtaatgtttaactccataccagtggcagcccaatctggcaggggagcacgagtgcctacaggaaggactggatcttgagtctctgagttggcttttccaccttctttgttgctgtccatcctgggctctagagctgcctgccttggttcccacacagctggtgttgttccctgcaccccctcactcccttctcttccctgtcaggacaacactcgcatctcctcagccgggtgcctaggggaactgtgtgcctttttgactgaagaggagcttagtgccgttctacagcagtgcttgctgggtaagtacactggagagttccccttcagggacctgggcctctcagccctagcgaagagtcgacgggcatctccctccctccctcagaggatcttttagcaactggactgtcctttccttgggaatccagcagttaaagcaaaatccaggccaggggtggtggcactcacctgtagtcccagctactcaggaggctgaggtgggaggatcagttgagcccaagagttgaaggttgcagtgagccttgatcacgcccctgcactctagcctgggcgacagagcgaggccctgtctctaaaacaaacaaacaatactgaatttgcagtggtcccgtagccctgagtgtctctgctcaaagaacacagctgtaagcccggagtggttcatgagcaggctttccttactttccttaatgtgccactttggggagcttctgccaagatagcagggaggtccatgtgaatgtggcctggagttttccttgtgctctgggtcagcacactggtctccagcggggtgggcccatgggcctcatgggtgctggggacatgctgtaaaataccggttgatcccagtcgtgtccttccacccagcggacgtgtccggcattgactggatggttcggcacgggcggagcctggcactttccgtggctgtgaatgtggctcctggcagactttgtgccggcagatatagcagtgatgttcaggaaatgatcctgagcagtgccacggcggacagggtaaggcattcgggccatatcccataggcataggccacatcccataggcagcaccttgtggacacagcgcgggtggaccccagactggggcttaagaagcttgggtctaattttacctttgtcagtaacttgctgtgcccttggaccagcacttgatccctttgggccccagtttcatcatctaaacaaggaatttgggttgaagaatctagatgccccttctgggtcaggtcttggatccctgttcctgggaaccagtgactgtactcatctgcctcagccggggcagcctgcctgagagctgtcatggtgtaaggggtgatgtggtggtgatgtagtggagggtcctggagattactaggaactggggttttcctggctctggggaaggggtggggggcctcccgtctagcgctgtctgttctccacagatccccattgcggtgagcggg

SEQ ID NO: 71841 - DNA, 2550 bp, Homo sapiens
aaaatttttagtttaagacaatctcactctgctgcccaggcaggagtacaggggcaccatctcttttggctacagcctctgcttcctgggttcaagcgattcttgtgcctcagcctcctgtgtagctgggattacaggtgtgcaccaccacacccagctaatttttgtatttttagtagagatagggttttgccatgttgaccaggctggtctcgaactcctggcctcaagtcatccgcccaccttggcctcccaaagtgctgggattacaggtgtgagccaccgtgcccggccccttctctccttttttttatttcacagtaaagagttaagttaaaagacaagtcaggcaaagagagttagggtggcctagctgggtcagagtcccctgcctgtgcttcttgtctgcttctgctccttctttgcctttcctgcatctggtacagttgtagcttgccattgcaggtgctgtatttctctgaatccctcgtgcccacggcaaggaaggctttgtgtgacccactggaggaggtcagagaggcggcagccaagactttcgagcagctgcattccaccatcggccaccaggctctggaggacattctcccatttttactaaagcagctggtgagtggatctaccacacacctacctaccagtttggcttttgccgtctttgtagatggaaaatacagggcgattattctgccaaggcagtcgcaatgtgggccctccagagggagtgggtatagcaagatcagacttggctttgtgcttcgccttcggcagtgaggaaatgtgggtgcaacaggagggagggaaacaagtggagaaggaagttggcggtggctggttgagacagcagagatgcagattcctcagggttgtccccaacaccctctgcaggatgacgaggaggtgtcagagtttgccttggatggtctgaagcaagtcatggctattaagagtcgtgtggtgctgccctaccttgtgcccaaggtaaatcccaacatgtggtcaacaccctctggctccagggcattgacatttccagggcctgcagtgaagaccagttctgaacgtagatgttggagggctgggggaggagggtgcagtgcaagcattacatccttcccctgttgtcttccaagatatgctggagtagatgcttggctctgagcagtgggcttgggctctcttgcccacccgtctgttcccagagcctagcgcagcacctggcacagtattcactgagttaatgtttgtcattccaccagctgacaacgccacctgtcaacacccgggtgctggctttcctttcgtcagtggctggtgatgccctcacccgtcatcttggcgtgatcctcccagcggtcatgctggccctgaaggaaaagcttgggaccccagatgagcagctggtaaggggcgagcctgctcctgctttctcatgtcccgtctgcccggaggatccctgctcagcacacatgtcccttgtggtttgcaggagatggccaattgtcaggctgtgatcctctccgtagaggatgacacagggcaccggatcatcatcgagtatctgctggaggccacccgcagccctgaggtgggcatgaggcaagctgctgccatcatcctcaacatctactgttcccgctcaaaggctgactacaccagccacctgcggagcctggtctcgggcctgatccgcctcttcaatgactccagccctgtggttctggaggagagctgggatgccctaaatgccatcactaaggtgaggggactgctgaccccacagccaacttttgcttttagaaaattccagacatttacaggaatagacttataagaatcccccacgtacctgtcactcagcttcggcgtttacccactcgtggcaagtcttgtttatactcccgcccacgctttccccatatattctttggaagcagtcttgagagggctgtacatcctctcgctttttcctggattcctgcagaagctggatgctggcaaccagttggcactcattgaagagctgcacaaggaaatccggctcatagggaacgagagcaaaggcgagcatgtgccaggattctgcctcccgaagaaggtaagccagggcctcgtgcagggggctgtgggcgtgcagtctgttgtgcccttctggcccttacccctgtcccaggtctgcggtaggggctgctggagcagtagccgtggtggttggtgttcagcaccttcgcagacagcatgttttcttccatggcagtcagatggggacagggttcatgctgcctttggtttaagctctgcaggtcaccttggccagagtgagtgggccacagggtaacagcagtgcatgttctctctgtgtgataggcctgttggggcccttgtcgtcttttctctgccaagaccgttccatagccagccctctcaggctgtgatcctgagattcagcccaaatcaatatctcccatggagttgaggggaggacagctgtcaggaccactttgcttgcatgggagacaccagggcccaggg

SEQ ID NO: 71842 - DNA, 1009 bp, Homo sapiens
cgtacctgcccagcgtgacgcctggcctgaaagcatcgcttttggaccctgtgcctgaggtgagtctgaggtaggctgggggatgggccaggcccctcatccagtccccataaatggattcctgagaattccccaaagctgcttttgtgtctgttgggtaaagagaaagaggccctcggtgccccttcctgctcccatgtggctaccttgttttgagcctcatcttctcacaccatctctgctctcggttacctgacaggtgcggaccgtatctgcaaaggcccttggggccatggtgaagggcatgggggagtcgtgctttgaggacttgctgccgtggctgatggagacactgacctatgagcagagctctgtggatcgctcaggcgctgcacagggtaaggccagagcaggtccagtggccagcctgggaatgctctaaggggccctcagatccagtggactcattctgtcctttgttgcagggttggctgaggtcatggccggtttgggggtggagaagttggagaagttgatgccagaaatcgtggctacagccagcaaagtggacattgcaccccatgtccgagatggctacattatgatgtttaactacctgcccatcacctttggagacaagtttactccttatgtggggcccatcatcccctgtatcctcaaagtaggtaccatgaccttggcaagggtagagtccttgaggagggcaggaggcaagtgctcacctggagagctagagatccctgctggctggggttggttggcagagccctcagccttcagtgagccccatgttttttgggctgggggcctgggggtggcagctctggctgacccaccctctgtgtgcccaggctcttgctgatgagaatgagtttgtgcgtgacaccgccctgcgcgcgggccagcgggttatctccatgtacgctgagacagccatcgccctgctgctgccccagctagagcaaggcctctttgatgacctttggag

SEQ ID NO: 71843 - DNA, 1041 bp, Homo sapiens
ctgacaagagccacaaccctaagtcaggatatcctaaagctctaaagctcctctttggctttaaagttttccccccccaggaaagctctttttgaaaataaccttaggcaggagaatctcttgagggcaggaatttagaccagcctgggcaatatagcaagaccctacctctaccaaaaaaaaaaaaaataggccaagtgtggtggtgcatgcctgtagtcccagctactcaggaggctgaagtggaaggatcacttgagccctggagtttggggctgcagcgagctataatcttgccaccacactccaacctgggcagcagcgtgagaccctgtctcaaaaataaataaataaaatgtctggcaccctaataagcaaacagataaaagtagagctgctctagttgggggaggatcaccatctaaggccctcccactcaacctccttctcagtccttcaggcttcaccctgtagtttgaaacaacacaaatctaaatcagtttcctcatttgtggatgaagaaacagttcagagaaattcagtgaattggccttggatctcactgtaaggattaaaccaggtcttacctatcctggtctctttctcccatactgccctgcctctcacctgggatcccactgttcagcaggccacaagagctttttcgacccctctgctagagccagccccctctcccctcctcccagtgactgcttgagcaccgtctgcaggggccagggtagatgtcccttgctcatgtagccagcacaggtgagttgctggcctttgctcagtgattcagtactgggcttgtgtctgctatccacagggtcagtggagcttcttggggcaatggcgtactgtgctcctaagcagctgtcatcctgtctacccaacattgtgcccaagcttacggaggtgctgaccgactcccatgtcaaagtccagaaggctggacagcaggcgctcaggcagatcggctccgttatcaggaacccggagatcctgggtaggcctttcccgtgagggtgcttgccctga

SEQ ID NO: 71844 - DNA, 1064 bp, Homo sapiens
tggcttttttaactgttagtgccaagaagtgaaggtggctcccctgtgctgtcctccctttcgctcagccacattcctttgctggggcttcttgagctgaggcagagggtgctgcctcctcatggggcatctactagttccacagctgtttctgagtgtttccagaggggtgggaggtggcagggaggttgctgtcccttctgttctctgtggctacccccaggggacattctcttcccagccgtcccaccttcttttcccctaggagccctctttgccttcgagatgctctgcaccatgctggggaaactttttgagccgtatgtggttcacgtgctgccccatctgctcctgtgctttggggatggaaaccagtatgtgcgtgaggtaagtccccggactgctcgggagaacagcatggaaactttatgagatgtgttcccagctgtgtctgcaggccttggcacagggtctgacataatagaaccccagtaagcgttggttataggaggaacgctaggactggtgtcaggccttgccccttgcttgggtgaggaggcccctgaatgtgttttctccccccttgaggctgcagatgactgtgccaaggctgtgatgagcaacttgagtgctcacggggtgaagctggtgctcccctccttactggctgccctggaggaggaatcgtggcggaccaaagctggtaagaccactcgctctgcctctcttcccagcttcctgttatgaaaaccagcctcagcaaggatcctgggtagccacagctcttgtcctgtgagctccccagaccagggatagggttaagactctgcctttttaaaaatttgagatggagtcttgctctatcacccaggctggtctttacctttggggctcaaaccattctcacaggagcatgccactacacctggctaatttttgtatttttttttgtaatgatggagtctcgctatgttgcccagactggccttgaattcctgggttcaagtgaccctcctgccttggcctcccaaagcactgggattgcaggtgtgagtcaccacgcc

SEQ ID NO: 71845 - DNA, 1045 bp, Homo sapiens
gagtcccttccttggtcccctgccccactgcccaggcctaggttttccatttagaccagaaatggcaccatatgggccaaagcttttgtcgtcagcagattgtagtgtgcaccctcagaggtatacaacactgtgtatacctgtttgcttctctggtgccctgtgacatccgcaggcagtggctgagatggggcttgggacatctagtggtgggtgctgtgtagaatggtcagaccccccaccaaccatgaaacggctgcagcggagccacagcattgacaggtgggcccttccccaggtccaggagtccgtagccagctgcttgccaccccttgtgccagccatcaaggaggatgctggagggatgatccagaggcttatgcagcagctgctggagtcagacaagtacgcagagcgcaaaggggccgcctatggcctggcgggcctggtgaagggcctgggcatcctctcgctgaagcaacaggagatgatggcggcactgactgatgccatccaagataagaagaacttccgccggcgagagggtgagcatctctgagcttggggctgcccagcatgggaagttggtccccaggttgccagaggaaggaatctgaccgtggcgccccaggtggaggccgttgcttgtgcgtgtactacagagggccccgctgtgtgcgacccagtccagctgcgtccttgctgctttccttggacttgcaaatttttttttcttttctgttttttttttttgagacggagtctcgctctgtcgcccaggctagagtgcagtggcgtgatcttggctcactgcaagctcagcctcctgggttcatgccattctcctgccttagcctcccaagtagctgggaccacaggcgcccgccaccacgcccggctaattttttgtatttttagtagaggcggggtttcaccgtgttagccaggatggtctcgatctcctgacctcgtgatctgtccgcctcagcctcccaaagtgctgggattacaggcatgaaccaccgcgcccggccacaaatttcta

SEQ ID NO: 71846 - DNA, 1050 bp, Homo sapiens
acgggaggcaggcgctagggctgagcaggggccagaaatgctgagtgccaagagtcctggcagagcactttgagccaaaaagaccatgatagtgtgttaaattcttttaagtctgtggcagtcctgccagaaaactggaagagccactggctggcatgtcaggatgcctgtcccagagctagacttggtcttggtcctcagggcagggactgttgtccccagatgcagcctgtagggttgacctgaggctctgaggggtttggctttccaggagaacgtcaactcgctgttgccagtattcgaggagttcctgaagaacgcgcccaatgatgccagctatgatgctgtgcgacagagtgtggtggtcctgatgggctctctggccaagcacctggacaagagtgaccccaaagtgaagcccattgttgccaagctcatcgctgccctctccaccccctcccagcaggtacctgccatctggcctgggacccacatgtcggttagagaattgggacccggctgtggttaggcggtgggatactaggggtggagttggacaatcagggccctgaaagcccagttcttgttaaggattcaccccctctcgcaggggagagcctggtttatagtcaggaacactcctggagagggagtttctttgttactttgttctagtagacctcccagatagtttcatttttttctactcacctggtttatagtgaagaatgcccctggagagggagtttctttgttactttgttctaatagacctcctagatagttccattttttctattcactaacgtgcactgggaatccaaagggaaaaaaaataaaaggtcaggctttctcttatgtcaagcctttttctggccctctacatgtgttggttgtgtgttacaggtgcgttttaatgtagcctctaagctacagtgcaaataaatttctttttctttgttttgaaaaacacgcatgtatgtatatataaatatatatatatttatatatatatattttgtgtgtgtgtgtgtgtgtgtgcgcgtgtgt

SEQ ID NO: 71847 - DNA, 1468 bp, Homo sapiens
agaagtcagaagttcagtggcagtgaggatggtttggtggctcagcccagcccagatctcctgaacagccacatgacagcagtgagcagaggcccttgagacctttagcttcctcttagctctggagaaacaaacaccaggtagggtggctggcagttctggtggccttgcttctgtgggttgtttagtggccttcagcagacttctatcctggcctaacggtgatgttcccacgggtgaggctagaatctgggaactgttctgagtggaaaagtcagctggtgcatatgaaacctgccagaagtgtcacctggctgtctgggcttgttgcgtagaggtggagatgctgcacagatagagctgtactcttggctgaatgactctttggtggcccttgtctcctgtcagcgtactcatttcttaaatgtccaaagggcaactctctgcctacctgccctctgaggctgtcacaaagatcaagtgagaaattaggctggggacattttggcgaagcagaaagatttttttttttttttttgagacggagtcttactctgtcacccaggctggagtgcagtggcgccatcttggctcactgccagctccgcttcccgggttcatgccattctccttcttgagcctcctgagtagctgggactacaggcgcccgtcaccacgcccagctaattttttgtatttttagtagagatggggtttcaccgtgttagccaggatggtctcaatctcctgacctcatgatccgcccgcctcggcctcccaaagtgctgggattacaggcatcagccaccgcgcccagccgcagaaatatttttttaagtcagaaggatgaggcactgggtcccctgttttagcctgggctggattccacatctctgtgtgtcatctcctgctgggtctctcctcttcaacacaggcactttggtgagccacgtgaccctgcgcctgctgaagccagagtgtgtcctggataagtcctggtgccaggaagagctgtcggtggctgtgaagagggcggtgatgctgctgcacacccacaccatcaccagcagggtgggcaagggggagccaggtaagggctgggacgggatcaggggcaccaggcggtgtgagctggtgccaggaatgctgctcaaggcacagcgtcacccagggcctcctgagcctgggggattggaccatatggaggatttctgaattgaaccttcgtagtctgtgaattgcagtgagcccagttgagggtttactttttgtcactggtgtccccatctctgttttaactctcacatcctggaactgggcagtgtttggcagtagaagcagaattggttttagaactggactaccagctgctgtctctgtcctcgtgccatgtgcttccaggtgtcagaacgggcctctggtccatccgttccctactttccctgaggatagaaataggcagcagtgg

SEQ ID NO: 71848 - DNA, 1461 bp, Homo sapiens
gtgcacgtgtctcctctgctaagtggtgttgctggattccatgtctgtccctccacttccttgaagactgggacccatctagactcctgatagcaggcacagcgcctggtacagtgggacttctggggaatcatgacttgattgctgaattcagctttgggcagagcaggttctgacaggagcagagcacacaggactctttccttctcagcgtttgctcttctctctgtctttacaaggcaggattcttcttgtctttctcatctcagtccacatgtgtgcttctcagagaggtggccagcttgtccaccctatccaaagtagaccccacccttcctcccttttactaaacatcatatttgtttctttactaacatttatcataacccaaaagcatcttgtttatgtgcttgttgacttgtttattatctatcttcgcctgctagattgtgagctccgtgagggcagggactttatcttgttcctacgatattcctgccatctggaacagtgcctggcacaatccaggtgctcactaaatgtttgctgaatgagtgagtgagttctgtggcttgttgtctcaggccactatagcaggccttttctaagcttcagcttatcctgtgggagagcttatgtaggaaggggttggagaggaggaggctaaagttttgattctgaatccatttggctgtcagaatacccttttgagtacattgaggaacctttatttctctaacataaaaagccctcttagcctttgtcagtagagaatccagtaaaacaactacttctctattgctgtctccattctatagaaaccaggtggctgtggactttgtgggaggttgggggtgcacatggtgggttcaggggcccaactcacacttagagctggtatggtgctgtttgtgtggaagcaagctcaccttcctctgttggggagggaggtctgttccctggagatgggattggttggtttgcccatcctctttaggagataaagaagaagaaaggcatcaaagaggaggtgcagctgaccagcaagcagaaggagatgctgcaggcccagctagacagggaggcgcaggtccggaggcggctgcaggaggtgagtggccacctccgccacatgctcaagccggaagagtgctgggcagcttggtcctgctgcttgctgtcacaagcagggccctgctgacctgccttctggacaactctgcttgcagctggatggggagctggaggcggcgcttggactgctggacatcatcctggccaagaacccgtccggcctgacccagtacatccctgttttggtcgactcttttctgcccttgctgaagtctcccctggctgctcccaggatcaagaaccccttcttgtccttggctgcctgtgtcatgccctctaggctcaaggctttgggttagtccttgtttgctggctgcagggatggcc

SEQ ID NO: 71849 - DNA, 1057 bp, Homo sapiens
ccttttttccagggtttttggggtttttgttttgttttgttttgttttgctcactgcaacctctacttcccaagcttgagcgatccttccacctcagcctcccaagttgctgggactataggtgcacaccacctgcagtggccgctaattttttgatttttgattttttgtagagatggggtctcgccatgtcgcccaggctgatctcgaacttctaggctgaagtgatcctcctacctcggcttcccaaagtgttgggattacaggcacgagccaccgtgccctccccctttatccttgattaattgaataacactttatgtttttaaagcactttgtactttttaaagcattttctacccattttttccttttgattttttttttaacaatgcgtttcaaaggcaaatagggcttgttattcttgtgtcatatgaattgaccagggttctaggagttcaaatgacttgcacagggtctcccccgacggagggagaccctcaaagacctggctgttatttctgtgctctttgtgccgtgttccactgcttccctccctcccaaagcctgttgaggaatgtgggccagtgacagacttgccaccacaggctgggtctcctggaccagttcctggtgccttctttacccctgcaggctttttagatgcaaagccacaggtgcttccttcttccaggcacatctcacagcctgtgggtcccattgcaggaagctgggcatccatttctactccagcaaggaccccagggaagaactgagtgaggggccgctgtgtccgtagcatatttggttcctgtgttccaagcctgcacagggctcttagcagtattatctcatgtgtctccacacaggtgctgcccttagaggctttggtgactgatgctggagaggtgactgaggcaggcaaggcctacgtgcctccacgggtcctgcaggaggctctgtgtgtcatctccggtgtgccagggctcaagggtgatgtcaccgacactgaacaactggcccaggaaatgctgatcatctcccaccacccatcctt

SEQ ID NO: 71850 - DNA, 1549 bp, Homo sapiens
attctcctgcgttcaagcaattctcctgcctcagcctcccgagtagcttggttacaggcatgcgccaccacacccagctaattttgtatttttagtagagatgaggtttctccatgttggtcagactggtcttgaactcccgacctcaggtgatctgcctgcctcggcctcccaaagtgctgggattacaggtgtgagccactaggcctggcagcctctgagatttttttagtcaaggacctattatgtatgtcaatctgggttggacggtgtgagctccatgcagttcgaatccccatatcaagatgcacttctgtattcacagtgctcagcatagagcctgccatgcagtggtcagtaagtatttgtggaattaatgaaggacaggtcaaggcagataagaagtaaatgaaacaggacccttaattctttacctgcatggcacttaaacctcactgaaattgtatgttcatttgtgtatttatttgtttaatatctcttttttcctctgaattctaaggtacatgaaagcagggaccggctgggcgcagtggctcacgcctgtaatcccagcactttgggaggccgaggcgggcggatcatgaggtcaggagatcgagaccatcctggctaacatggtgaaaccccgtctctactaaaaatacaaaaaattaggtgggcatggtggtggacacctgtagtcctagctactcgggaggctgaggcaggagaatggtgtgaacccgtgaggcggagcttgcagtgagctgagatcgcaccactgcactccagcctgggcgacagagcgagactctgtctcaaaaaaaaaaaaaaaaaaaattagctgggcatggtggcacgcacctgtagtcccagctacttgggaggctgaggcgggagaatcacttgaacccgggaggtggaggttgcagtgagccgagattgtgccactgcactccagcctggcgacagagcgagactccgtcttaaaaaaaaaaagcagggaccatgtctgtcttcctccccttgtgccttcattgtctgattcataataggtgatcaccaaatatttattaaacgaacactagtgggaacagtgtcgttaaaggacagaactaaatgtgtggggtggagggaagaggagctggctggagttgagtgggagaggctgagtggagatgaagccaggatttggagggtctgatggaggtctttacaggctatgagagccatgggaccctcagtctcatgtcccaccttgacctgagtcttccctggtcctggcaggtggaagtgcagtgcctgctcttgctggaggtgctgggtggctcccacaagcacgccgtggatggtgctgtgaagaaactcacgaagctgtggaaagaggtgacaggactgcaggggctggtgggcattgcttcttccatgccactcccccactgccatcttaaacacctgcctggcactttcctcttcagaaccccgggctggtggaacagtacttgtcagccattctcagcctagagcccaaccagaactatgctggcat

SEQ ID NO: 71851 - DNA, 1037 bp, Homo sapiens
caagtgatttttattgaccgctgtctgtgtaatctctggtttcagatcttccagagggagcagtgaaggggctctgcaaattgttctgcttgactctgcatcgatataggtgagtcccagccaaaggccccatatgtggagcactttgtacagagaggggatttagagtagtggttagagcccagattagagccagactgcctggtgccaaatctgggctatgtcacatcctagccattagatcctgggcaagttacttaacctctctgtgcctcagtttccttgtctgcagaatggggatggtgccattctctatctcatgggtggttgttagtaagcgtgaggtgcctggaacagttgcctgctgtgccatagtggtcaatgtgtttatgctgccatttagtcatgtgtgttaaatcgtctggcctactttgagacccttataactgctccataaatgtaggtgctgcccttacacactcaatggcttatttgcccttatgagatacttttagaactctaggaggaggtgagtttatctagttatttcctaatcccttctctgttatccactggaatatggtgtgatcagtttctcctgagaaagaccagtgtatggcctgagcagccttgcccctgcctctgcctgaggtctgcatgttcaccctttcctttgcctctccccctagagatgcagcctcccgcagggccttgcaggcagccatccagcagttggctgaggcccagccagaagccactgctaagaaccttctacactctctgcagtcttctggtataggctccaaagcaggtgttcccaggtaagaggtaaaagttgtggccccctgagaattggtacagtcctgctcaggagaagctgatgcagttgactgtgcaccagagggaggagccaggatagcaagcttagtggagaaaaccactttcccgaggagcagggttgggaaacagtggaagcaaggccattttgaggggaaccagttgcccaccaggcccctaatggtggaagccatctgttt

SEQ ID NO: 71852 - DNA, 1035 bp, Homo sapiens
ctggccctgcgggctggaagtgggtcaggggctgcaaggcgggcccatagcgttacaccgcgggctcaccacgttacaagcgctagtctcccacgaggcgcccggggctgaagagcgggccctggggaggaggccttgtggctcgggcgcgggccaactttaagcccgtgatccggctgcccgggctgcagcggccgccgtcctgcccgggggcaccaagcccggggccctgcccccgctggctcccggcctcgccctgccgcgtgggccacgctgtgacccggaagcgttccggaagcggttccggagtcagccccggcaggatggcggcggacacgcaggtgaggcgggcggctgcggggccaacgcggccagggactgggtgcggacggtggccgtcgggcggggcccctctcgctcctcggcttaggggcgttggaggtggtggctgtggaggtcgtagtctcggggccgtctcaggctggactctcagggctgcgggcttggcccggcccgggcggcgcaggcagaccgcgggctcgaggagtccggggctcccgcctcgacttcagcagctggagctcggcggggcctttgcccgaccccagagttgcagaagttcactttaccgagcctctacttcttttctccaaagccctccggctgtgagccccgggccaacgccaagtcttccttaaactttgtattcagcaaatattctttgagcacctactatgagcagggactttgagtgtagtctttggattcatacagatctgggcttgagttcctgctcgtcgatttctgtgacatgccaaacaagtgacttaaccccgccaagtctgccttttcatctataaaatgaagttaaaacaatacttatcttaaaaggttgttgtgaaggttcagtgagataaaatacggcttgatatatgttggttgttatcagatccagggttagtgaaaagaactgtcctgtccaggaagagtgttacctatgggtaccttgtagttcaggaaggacctgggaaaacc

SEQ ID NO: 71853 - DNA, 3124 bp, Homo sapiens
tacattttcccacacttagaaggttttcagacacaaaacccaaaggaattgtgtaacaatccggataaacacgcctagattgtttttacaaataataatgttgctatatttgcttaacgtggtgcttttaatgctgtgaatctagccctcctcttgaccaacttacttggaacattccttttttatcctgttaaccattttagtgaatcagaagcatgcctggtaattgggaaaaattaaaaactaagtaaaaaaagaaaaaactccttgattgaatgtagaaacctaattttcagcgttcatacccagctagccaatcatccagtttggcagtgttacaacgtagctcccaatctccctctgacttcaaaagcttagaagaaagggagtgggatggaaacaaattgtggggttcagtttcttctggcattttttccctctctcttcctgttaaacttggctcctctggcttgttttttgtagcaactattggatgattatccgaaatgtttcattgtgggagcagacaatgtgggctccaagcagatgcagcagatccgcatgtcccttcgcgggaaggctgtggtgctgatgggcaagaacaccatgatgcgcaaggccatccgagggcacctggaaaacaacccagctctggagaagtcagttcccctggcagttttgtcctttctccccagtgcccgtctccctcttcctggagaatggtgctgaaaggtgattgtctcccataaacttctctttgcagactgctgcctcatatccgggggaatgtgggctttgtgttcaccaaggaggacctcactgagatcagggacatgttgctggccaataaggtaaggggacaattgggttggctaaagagactttgttgttgctccttaaagcaaaatggaccattctcaggttgtgtgagtggagaggcttttctcactgtttgttgtctttgtcaggtgccagctgctgcccgtgctggtgccattgccccatgtgaagtcactgtgccagcccagaacactggtctcgggcccgagaagacctcctttttccaggctttaggtatcaccactaaaatctccaggggcaccattgaaatcctggtgagtggacctggtttgcctgtgctaaccaggcaaatggggagctgcttttagtggccatggatctgctggttgtccaacaggtgtttactgccccactattatctggttcagagtgatgtgcagctgatcaagactggagacaaagtgggagccagcgaagccacgctgctgaacatgctcaacatctcccccttctcctttgggctggtcatccagcaggtgttcgacaatggcagcatctacaaccctgaagtgcttgatatcacagaggaaactctgcattctcgcttcctggaggtatatgctgtcagccttgccccctcttacactgatggttgagagcatgacaaggttcagactgagtccctgtaaccaaggactgtgttttcatctgtctacctacctcatctgtaaaatgtcagtaacaacataagattgttgaaggattttttttttttttttttggagacagagtcttgctgtgtcgcccaggctggagtgcagtggcacaatctcccggctcactgcaagctccgcctccgggttcacaccattctcctgcctcagcctcctgagtagctgggactacaggcacccgccactacgcccggctaatttttttgtatttttaggtttcaccgcgttagccaggatggtgtcgatctcctgacctcgtgatccgcccaactcggcctcccaaagtgctgggattacaggcatgagccaccacgcctggccaaaggatttaatgaattaatggatgtacagtgctggggctgttattctagggcctgcattgagactcacattttgccatcaaaagccttttaagaggtggaggttgcggtgagctgacatggtgccactgcactccggcctgagtgacagagtgagactctgtctcacaaaaaaaataatgccctttaaataatgaataatagtgatagaaaatgtcatttcttggacaaatgaaaaattgaaattaatgtatataattagatattattagctactcttaggtagcttcatttgttgaaagtttgacaagtgaatgaagttcacatctggaaatcgttgaacatttttcgttcatggaactcaatggctacgttagtcgtttatgcttttcactgttgtggtaggggctttggaagtaaatgccatcaacaatggatacagaagacctggatttggaataagggcaaaatttatttgatggggctgaattgctctgccaggagcatttggtatgagatgaaatggcctctcttgagactgagctgccaacctggcaattattgtctgctaagggttctctttattcacccttacttggacttcctttcctgtagggaatctcacgtaaaatgaaatcttccctcccccagggtgtccgcaatgttgccagtgtctgtctgcagattggctacccaactgttgcatcagtaccccattctatcatcaacgggtacaaacgagtcctggccttgtctgtggagacggattacaccttcccacttgctgaaaaggtaaaaggatcccaccaggaccacagtgggcctgactgtgacaaattagcagggtgatgtggccttctaccttactgcttttatagttgtattttatatagcagataattttgtgaggggatatttgagaggttgggaggcagggaaggcgtttctcacttgagaaatgacaagagacccaaagagggggttaatgggcaagagctgggccttaggaaccctgcctcactaggccatacccaagctgtcctgcttgggctgcttctgacaggaaaggcttcacacggactttgatattgttggtccttaaactctaccaaggcaggagggtggtgggtaatagaggagtgtggatgaccattttgaccacttcccccctcctttcaggtcaaggccttcttggctgatccatctgcctttgtggctgctgcccctgtggctgctgccaccacagctgctcctgctgctgctgcagcc

SEQ ID NO: 71854 - DNA, 1084 bp, Homo sapiens
aaaaaaaaaaaagagaaaccattctgtttctaagcatgtgcaattatgtctcagctccacgtcataccttttagtttgctgagctcgccaggtggcacagggaaccgggactccgaattcgcagctccagctccagctccagcccagcaggtggcagcagctcagagcaagctcctccaacgcgaggcagcgccttccttcgcgaccctacttaaaggcggctttccgttggctggagtggcagcgatattatccaatggttgcctgtattcgttcagctttgtctgacgggcgatggcgcagccaatagacaggagcgctatccgcggtttctgattggctactttgttcgcattataaaaggcacgcgcgggcgcgaggcccttctctcgccaggcgtcctcgtggaaggttcgtgtgctagttagatgggcgccaggggtcgccggcgggaagcatggaggggtctttgggggcctttgggaacatggagtcctattctgttccgcctggggcctcggtggcggcttgcacgccccgagatgacggccgctgccctaggcagggccggcgggcgattgcgcgtgtcctgctcctcttaggcccgggaccgcgggatgggtgtcggcgtgaccaggcctgagctccctgtctctcctcagtgacatcgtctttaaaccctgcgtggcaatccctgacgcaccgccgtgatgcccagggaagacagggcgacctggaagtccaactacttccttaagatcatcgtaagtgcagggtgggtcgcctctgctcttcatgttgccccagcgcaaatagggacagtcagctgctatgtgctgagggtctactcacaccggctactgaattaggccatttttgggaaaatactgtttagttaacaatttcctgagataggtcccttctgttgcagataaacgggctcaggcaagttaagtgggtcctaagatgacagcattcgtatccaggtctgtctggcttctaaaagagcgcgctttatacttttttttttttaaacggagtctcgctctgttgtccaggctggagtgcagtggcttgatcttgg

SEQ ID NO: 71855 - DNA, 1127 bp, Homo sapiens
tctctgtaaacttccaagctggcttttcccatttcaattcctgtgatttatgccaataaagtttgcccatgattttcacctgtgctagtgctatttcttggtggtctgaacctcatggtcccagcagagaccaaacccaccccagatgcagctggatcaccagatggagggtaaattgtggatgtttcctttcttgaggtcaaaatccctggggctggggtccgtggtccttgcctgtggtcacaggtcctccccgtgggctttgctcctgcctgggcagttggtgaggacaggctggggagcagcgggatggggccctgtggggcagggcctgcccagggtgtgatcacctgggtttaccaagggcatcctcactcacgggcttgtgggtggctttccactcatttagaagtagggaaagaggctctaggacaagaacctacatgtacaaggcaatctgagtgagggcagagccatgatgcggacccagggcttgcctctgcctgtgttcctgcacagaaccagacgcggccgtgcctgagcccacacaacgtgggttagccccttccctgccgaaggcagttacttacagttgaggatgggtctctactgcctcctcgtcgtcatgtccggatttgcgtgcttcctctttgctccggtcagatccagagctccagtcctaggccctagagcagggatgtccaattttttttttttttttgagatagagtctcactctgcccaggctggagtacagtggcatgatctcggttcactgcaacctccacctcccaggttcaagggatcctcctgcctcagcctcctgagtagctaggattacaggcagctgccaccacacccggctaatttttgtatttttagtagagccagggtttcaccatgttggccaggctggtctcaaactcctgatctcaagtgatctgccttggctcccaaagtgctggaattacaggcgtaagccaccactcctggcttttttttttttttttgagatggagtctcactctgtcatccaagccagagtgtagtggcacgatctcggttcactgcagcctctacctcctgggttcaagcaattatcatgcctcagcctcccaagtagctgg

SEQ ID NO: 71856 - DNA, 1030 bp, Homo sapiens
gggcaatatagtgagacccccatctctacaaaaaaaatttatttaataaaataaaaatgaaaaatgagcgtttaggacaacacggcacatgggaaacgcctagcaagtaggagtcactccgagcgtgccgactatgcccacctcggccccatcacacagggtgcagctctagcccgaggggcagctccctgagcccctctctccgcctggcaggaatgcttcacgccattcgtgaacggcagcttcttcgagcacgacgggcagccctactgtgaggtgcactaccacgagcggcgcggctcgctgtgttctggctgccagaagcccatcaccggccgctgcatcaccgccatggccaagaagttccaccccgagcacttcgtctgtgccttctgcctcaagcagctcaacaagggcaccttcaaggagcagaacgacaagccttactgtcagaactgcttcctcaagctcttctgctaggtgccctgcccctgtctctgccccccttccccagccagcatccccaactgcgactgtgacctagagacttcacccgggggtgaaggggtaaacccgactgaaactggaacccttgtcctccgctggtgcgggatggacagagggccgtgaggggtccccctgcttgtcttcacccctgccagagcctctgggccccctcctccctcctgtagctctccctaggctgcccactctccatcctccccaggggtagaggctgggggctccaccccagcccatgtacgtccccacgaactggcctggccagcaccccacactggagccatctcttcctcatatttcagcagtgcagccggggggcagggaagggcaggcagggtctgttggggtctctttttatccttattcctcccccgacctaattgtctttgttctgtgattattgggggacacccggctccctccagacaatgccagcataaatccatccatccaaaggcagagaaccaaaggggccatggaaggttctctgtgctcctcctacccttcc

SEQ ID NO: 71857 - DNA, 1047 bp, Homo sapiens
aggctggtctcaaactcctgacctcaggtgatccacccgcctcagcctcccaaagttttgggattacagacgtgaaccactgcacctggccataactgccagcattaatatagtgttactcactctgtggcagccactgttctaaatacctcccttacgttcccttatcatttcctcacaacagccctctgaagtaggtattctagctgacgacactgaagcacagagaggtgagcaacttgcccgaggttagttgctgattagtggtggagctgggattggattcagtgactgtcgcatacagccctttgctgacattgtagactctgttctgattcctgctcgccaatgagggtgatgccacgcggtgccactggggaggagggaagagaggggacagtctggtgtgtgtgtgtgtgtgtgtgtgtgtgtgtgtgtgtgtgtgtgtgtgtgaaagtcatctgtggattgtatatggtgtgcttgggggtgcagtaattgaggaaacatagtcaaccaggtgtctgctgagggcagtgggggctgttgaacactgacccctatccagggttatcagggactgaaaatgaccccaggagaagtgtggtgtgagctggcgtgcttccctctggggaaggtctaggggctgtggacagaggagggagcatttcctgctctgtggccatcctccagccccctcttctaccgtgagcaaaggctggggtccctcatgttccccagaccagcagtctggcagccctctgtcctcctgctcttcacctctcttgggttatttgcttatatcttccactggcttcctttggaagagttttttctcaattattgagctttctcaactggagagtcaaagtctccagtttccaactaggattgtggatttgtcactttttcttttcaattttgtccatttttgctttatctactttagagctctgttgttgagtgggtgtacatttaggatgattatgtcttcatgatgaattgactcatcattatgaaatgtccctctttacctctggtaatatt

SEQ ID NO: 71858 - DNA, 1052 bp, Homo sapiens
accggagcctggggtgggaggaatggggtgtgcaggaggggagaggaatttgcctttgcactggggccccgtcagctgtctggatggcggctcagcacactgccatcagctgttttccttagggtggctcagctgttttccttagggtggacacaaagcccagacctcttgtttttatttttctcctgagcgtgctctcagccgtgtgcctcctggtccctaacacaggggagagtttatggtgtgtccggtagcaaggccagagggtgcatcacctcctctgtgactttgttttttggtctaataaaaaatggggaactcttctccttcccatagttgccaatgacagactcaccatgtgctgcttaataagttacaaatttatagctctctgagcagaaaaatatcaacacagcgtgttctgcccttccctgtgtgttctctccactttgttctttggggtggctgcttggtggcttttcttattactgtttagatgctggtttggcccagagttcgctctgttcaagttctggccggagtttcctggacagagttcccacaacactgagatgcactctgactgtgttttctaacccgattgcttgctcttcctctgttcatgttctcagtgtacttggtgggggctttgaccacaactgtggtctaatcatgatcatgtgcgcttcatgggagacaggcactgtactcagcactttacgagctgtatcacaacctttcagaaagggaggtgttttcgctccactttatacatgtggaaacctgagctcagggaagtttagtggtagtgctgggatttgaacccaggctcatccaattccagatccggttatcttaatcatcataaggtggtaggtgctggtgactaaccagggggatgagccttggggcctgctgagtaattgatagttacctttaacaatctctgccctaggggcccatcccaggaaatggcaaagggtgtgtccagtgcaagactgggtagctttgccttcccatcctctagcagggggaacagccagctgttggca

SEQ ID NO: 71859 - DNA, 1548 bp, Homo sapiens
cccatcactcattttctctcactgacctccccgctctgtggaccagcccctcaattcacagaccagtccgtctaccatggtatctaagtctagaacggtaatttgggagtcctgattctctccccacccctagattctggtgaaatgccaggggaatgaggtggaaggtgggccccaaggtatgaccatccctgaacgtgtcctggctagcagagtcccctccaccctctctgcgtcaggccctgctggaagccacgcaggtgaaagaggacaggatgcccagaacagagttttactgttttcctgttattggagccccaaggctactcttttcagtccagtcttgatctggtgttaggggaaagaaagtatctcctggaagccgactctaaacccaagggggttggtgccagggttctaggaatgccttgggtggcgtgaacgcaggagtgggaggattcgctgtctctccctccccttcacgcctgtagctggagggccctgagcttgggaggtgaggaggggggcaacgtttcttctctgcaggagccttgtctttcctctctggactgtgggtggcttgtgtgaccactgatgcttcctctgtcccaggctctgaggagtagattcagcagacaggactgatggacctctaccaagcagcgccgggcactaagttaagactggctatttgtaggtgctggacttgactgcttccctccagcttccttttgggatcagggtgcccctgagatcctggagctggggttggtgtagggtcctgcctgttttgcagagtgagatggctgccaagcgtggttctgcctttgggtcaggcttggcacccatttttccagtgtgctcaaggttggcatggcttccaggcaggtatttttttttttcacataaaaatagctcagctggaaggaggctgggggatgttctttgaaccaggatctaagagtctgagtgctttcccagtgggaactgggagcaaagttacagtttctaaagtgctggtgcagttctgttgcttctcggcagtccccgtgctgtttcaaggactgagaaagtctttgtagagctcgccatcgaaatctggaattcctgtcttctgacagtcttccatttagggccaggaaactgagttctgaaaggaaagagagtactgtatacgggagaggggattgtagggatttaaattgctgtttgtggagtacttccctctacctcgatttgtgatatcctcacaacaacccttttatcagattccaccttaaagccaatgctgtcatgaccacctgcctttttacagattgagaaagccgagacgaagagaggctgattctcttgcccaaggctgcacagccatgaaatgacaaaaccataactggaagcccaattcctagctcccagatctgtggctcttgtataccgagaagactttttttcctggggaggaggcaagggcacttgaaggaggggttgccactgggtgatggcgatcacctgtaacttctactgctttctaccatagactcccagttg

SEQ ID NO: 71860 - DNA, 1024 bp, Homo sapiens
tggacgggtgtggtggctagtgcctataatctcagcacttagggaagccaggcgggaggatcacttgagttcaggaaaacagcccatctctacaaaacattaaaaaattatccagttgtagaggtgccaacctgtagtcctaggtactggggatgttgaggaaggaagattgcttgagcccaggagttggaggctgcagtgagccatgatcacaccattacactccagcctgggtgacagagcaagtccttgttccaaaaaagaaagagaggagcgcagcactgccgcctggcccctccagcttcccggaccacggccaacctcgagcgcaccttcatcaccatcaggccggacagcatgcagtgcggcctggtgggcaagatcatcaagcgcttcgagcagaaggggttccgcctcgtggccatgaagttcctcccggcctctgaagaacacctgaagcagcactacattgacctgaaggaccgcccattcttccctgggctggtgaagtacatgaactcagggccggtcgtggccatggtctgggaggggctgaacgtcgtgaagacaggccgagtgatgcttggggagaccaatccagcagattctaagccaggcaccattcgtggggacttttgcattcaggttggcaggaacatcattcatggcagtgattcagtaaaaagtgctgaaaaagaaatcagcctacggtttaagcctgaagaactggttgactacaagtcttgtgctcatgactgggtctatgaataagaggtggacacagcagcagtctccttcagcacggtgtggtgtgtccctggacacagctcttcattctactgacttagaggcaacaggattgatcattcttttatagagcatatttgccaataaagcttttggaagctggaaaaaaaaaagagagaaagagagaaggggagggaggggaggaagggagggagggaggaaggaaggaaggaaggaaggaaggaaggaaggaaggaaggaaggaaggaaggaaggg

SEQ ID NO: 71861 - DNA, 1050 bp, Homo sapiens
agaccagcctggacaacatgatgaaacaccctctctaataaaaatacaaaaattagctgggcatggtggcgagcacctgtagtcccagctactcaggagtctgaggcaggagtatcacttgaactcaggaggcagaagttgcagtgagctgagatcacgccactgcactccagcctaggcgacaaaagggaaactccgtcttaaaaacaaaacaaaacaaaaaaacacaggatgcccagataaatatgactttcagataagcaatggataattttttggggggtatatgtcccaaatattgcattcattgtttatctgaaagtcaaatttaactgggcatcctgatgtacttgtattcacttaatctgtcagccctaaatgtgcatcagtggaatggctgccagcttattccagttaattcttcttgccccagattgtacaaaacagggtccaccttggctcagtcctctcctttcatccctctccaggcaaaaacaaagagtgtgaggccttcatttgcaactgcgaccgcaacgctgccatctgcttttcaaaagctccatataacaaggcacacaagaacctggacaccaagaagtattgtcagagttgaatatcacctctcaaaagcatcacctctatctgcctcatctcacactgtactctccaataaagcaccttgttgaaagacctcatgtttggatattgttttattctctgtctataaactaggtctctgcctactcttttatttttatgtatttattttttctaggtggagtcttgctctgtggcccaggctggagtgcagtgatgccaccttgcctcactgcaacctccgcctcccgggctcaagcaatcctcccgcctcatcctcccgagtagctgggaccataggcatgcaccaccatgcctggctaatttttgtattttttgtagagacagagtttcgccatgttgccctggctggtctcaaactcctcagcttaagtgatctgcctggctcggcctcgcaaagtgttgggattacatgcatgagccgccgcgcct

SEQ ID NO: 71862 - DNA, 1055 bp, Homo sapiens
cttttttaaactatttctaggtttgtgaatgtgaagccccaggccgcagggggcaaggggccaggtgccccccaccagctgagaacaaagtgtctatctgggtgtgggcccctggccgcctccctccagccctggagaggagggcagggctgcggggaggccaggccgagcccctggaaccatcccgtcctgtatcatatgtaaatactgtgaggtgatgtgcccacccctctctaagacccctcgggggtgaggggctcccccctcccctgtttctgtcccctcagacaccgttactgtaagcttgcaggcctcagctgtggccacggcaggcccgctctctcaggccctcagggtcaaggccttggttggacctgcccactccaaaaacccagtgtgggggcaaagggcgtgggaagagcagggcttgcccagcgacactgctggacaggaattaactctccaaaggtctcccctgctccctacctaggttggggcttcatggtttctgctcagtctgtcccccttccccctcgacccccgcaatgagtgggcaccaggggacgctctggcgagggcagaccccaggggaaagcaaagggcgtctcagggaacccccacattctctcactgaagtttcccaccaggatgaccccacagccagagtcccttggcagcccctcaccccagaccccccttctaaggaaaaagagaggttcagagcgttggaccttcatgaacagtggcctggctggcgtggcagggccaaggcccacccactgccatcccccttctgtgtgtccctctcccccagttatgaggcccagggcctgagctctcttccccagcattgcccccacccggaaaccccacctttggagagttaattgtctgtgtgaggtgcttaacctatcagccctgagaacacaaagcaataatctttgttactgagatgcgcggctgttcgtgttttgggttttttttttttttaatgtttcctaataaaagagaagctgcattttattggtttttatttttaattttctacacgtttg

SEQ ID NO: 71863 - DNA, 1044 bp, Homo sapiens
gctcgcacctgcggctcaaacttttgtgaggctgctcccggagcggcgggaacccggccggagccgtcccccttccagcccagctcggccctcggcttcccggggccccggtgggcgccaggaggctcagcgggaacggggcgagggcggtggggggcggcggcagtggagaacgcgcgggcagcttggcgcgggggcggccgggccgctccggggtcaccgggggcaaaggacgggggggggggaagggcgcggggcccgggctggtccgaaggcgggtgtgtggttacagaagggctgcgcgaatacttcggccagttcggggaggtgaaggagtgtctggtgatgcgggaccccctgaccaagagatccaggtgagcccctcaccccctcctcctgctcccggctcgcccccctccacccgccactcactgccttgtaaccatctgcctctccctcactacggcgcgcaggggtttcggcttcgtcactttcatggaccaggcgggggtggataaagtgctggcgcaatcgcggcacgagctcgactccaaaacagtgagtggccctcggggcttcgggggtcctttgggagagggaggctgccggaggagagggtcaggactctccccaggggacagctggacggggtccatgaggaaggagggagtttttctgagtaagagggctgccatgctctgaaactttgtcactagagttgggggggagagggaggagaaaaatccctggcctgccatgagatgctacatcccccctcccctagtcctggtgaggggagaggcagccgccaccctctccctagaagtactaatcatgatgcctcagagcagagcttggggtggggctaggtccctcccccagcccaaattgggtgagtcagggtagcactgacccacccggtggcttctgtgaactctaactagtatttggctctgcgacaccccctcttcatccagaccaatggcaaagcatcccttgaagccccctccctctctccttccctcctcccccgacttttggtca

SEQ ID NO: 71864 - DNA, 1224 bp, Homo sapiens
gggtgggctgcagtttcccagcccagatattgtttgaagtctgggatggtgccagaaatctgcatttaattaagcatctccctcccctaatactgccaccattttgatataggtgatttgaggattacactttcataaacacagcactggatatactagttactagggagaggatgatgagtaactaacttgagcttgcattttctgccatccatatttgtttctggaattaaaactgtcctgtagccaggataactttaagggctcccctggtagttataagagctccttaaataatgggaaggttgaactacaccagtagataaaggactaatttccattttgtttttatatatgatctgtcaccccgttataagcagttcatgacggtgttctttctaaattattttctggaattatctaactgacatcttcactccacagccgtttccctggggagatggtaaccatactctattccataaccctcatgtgaatccacttccaactggctacgaagatgaataaagagaatctggaccactacccgggcaccagggaccacagcactggtttggaccgttactctgcacatggaccagaaaaagtatatgggaccttaagctcaccttctttacttgtatcaaatgatgactggtatactggtctcccatccctttgcttgtggcaggagatggcttaaataaataacttaaatttagattggtcatgagctgagagttactttctttggttgtgttttttcgcagaaattagcatttgagcttcaagtcagtgtccaagttgaaaagaaattggcattagttatttctgtttccacagtgaaggtctaggctgctgtttagtgttacaggtccaattcagcccattgaataagtgtttataacagcccctcttggtttattgtgcctgatgtggataaagggaccaagtggagtggtgctaattaagcatcaagattagtccttggtcaggtgcggtggctcatgcctgtaatcccagcactttgggaggctgaggctggcagatcacctgaggtcaggagttggagatcagccgggccaacatgatgaaatcctgtctctactaaaaatacaaaaattagttgggtgtggtggcgcactcctatagctgggtgtagaggcttgaacccgggaggtggaggttgcagtgagccaagatcgtgccactgcactccagcct

SEQ ID NO: 71865 - DNA, 1025 bp, Homo sapiens
cgcgcctgtggtcctgtacttgggaggctgagatgggaggctctcttgagtctgggaggtggacattacaatgagctgagatcatgccactgcactctaacctgggtgatagagtgagactccatctcaaaaacaaataaaataaaaattcaaggcaggaataaaacagtaactacataatgagctcacattttaataaaagagatataacaaatgaacaaaagtccattaaaatgttagggaaaaaacccaataggatgagttactaactagaaggggagaagggatttggagtggttaggagagccctttctgagaagataagctgagacctgtgccaagagggaggcagccatgcaaatactgagaggaaggaaaaaaacgaagggccagtgcagagatctagagaggaaaagaacttgtcttgctggagaagcagtcaaggtagccaaggagagtactgagaagagtacgttggagtgagtaggtagggactctatggagtagggccttaaaggcgatgattaggccaggcgcggtggctcacacctgtaatcccagcactttgggaggccgaggcgggtggatcacggtcaggagttcaagaccaacctggccaagatggtgaaaccacgtctctactaaaaatacaaaaaaaataagccgggcctggtggcagtcgcctgtaatcccagctactcgggaggctgaggcagagaattgcttgaacacgggaggcggaggttgcagtgagccgagatcgagccactgcactccagcctaggcaacacagcgagactccgtctcaaaaaaaaaaaaacaaaacaaacaaacaaaaaaaaaaacaaaggcagtgattagcagttcgggttttgtttccacttacactagcgagagcatcagtaatgaacaaggggaagagtgaagccactgactcgcgaggtgactgtgggcaagttcctgaatcttgctaacactctttaaccccctggaaaactgttcgctaatcgtcacattaaacggct

SEQ ID NO: 71866 - DNA, 1099 bp, Homo sapiens
aagtttcatttatccttggtatctgagttttatcctggactcatctcaatttaataatcattttgggggcggagagggctcctttgtcccaggcccagggctaattttaggataagttctcttttcagaaagagaaacactaggtatgactagtatccctttggcatataatcactttgtgggatggcagatagttctaggttaggagttcccaagctctagtctactttcaacactcttcagaccttagtaggaagttagccctcttctgggaagaaagtgggagcccaggaacaaattcaggtatgttcggtaaagatagggctgctcaaatcaatgcaaatggcaactaaaaatgacagccaaggttgtcacatagtgatcaagatgctccgtctaccagttacgtagatagaaaagttcactttcatgcagttggtatggtcctttggggggagttaaaggcagataaataatgtcttccatactgaacaggcctgttaagtgaattccttggaagctgacttttgcttttctttcacctcagttagcatcaggaactcactgccttgttggggccagatctttcccaattctgtcttcagaagaatctgttattaagaaatgcttgagcatccattttttcaggggactgaaaaaagcaggaacattagtattcacagtaaaaaaatactgtcattatgcttccacatgttcacagagtaccccctttccagaatgagctactcagctgtgtgggaatggctcttgttcatccagctttggcaaagagatattacctgtttgaaaataacaaaagagaatttttgtttgtttgtttgtttttgttttgagacagagtctcgctgttgcccaggctggagtgcagtggcgcaatctcagctcactgcaggctccgccccctggggttcacgccattctcctgcctcggcctccagagtagctgggactacaggcgcccgccacctctcccggctaattttttgtatttttaatagagacggggtttcaccgtgttagccaggatggtctcgatctcctgacctcgtgatccgccctcctcggcctcccaaagtgc

SEQ ID NO: 71867 - DNA, 1313 bp, Homo sapiens
cctcataatgttatgaaggtttaatgagatagcctcatgccaggcacagagtacacagtaagtgctcaatacttaactattattgttagatgttggtttgcttattcttctggctctgatttttttcccctttactctttttgtttttgtttgcatttcagggtgaaacttcctacatccgagtttatcctgagagaagcaccagctatggctactcacggtctcggtctgggtcaaggggccgtgactctccataccaaagcaggggttccccacactacttctctcctttcaggccctactgagacaggtgatgggaattttttctttattttttaggttaactgagctgctttgtgctcagaatctacattccagattgaggatttagtgtcttaggaaatttttttaattttttttttttaaagaagaaaaaaaactacataatttctaccagggccatattagcagtgaaacattttaaactgcagaaattgtggttttggttcagaaacaagttgtatatttttcacccctgattatgggaaaaaaatcagttctgtctttgtgggttgctctactatggagatcaacagttactgtgactgagtcggcccattctgtttagaaatatattttaaatgtttagtaattgacatgtgtggttgtccttgattaagttcacagatttcaccaaataggcacactaatttaaaaaatcactgagttgtagtcataacttgtacccagttaggagcaggggtagataactttatttatatggggatagacagttgctctgatgttggtttgagaacgtaaactccaagagcgggttctgggttctcttttaattcaaggccaagcttgtaaattaggctgccttaaagaaaaaagcattgcagataaaggaagggaatgggaaaaataaacacacggtggcttttgcctgtgatcctagccctttgggaggccaaggcatgccagaggatcccttgaggccaggagttcacgaccagataggcaacatagcaaaacccccacctctacttaaaaaaaaattaactggacgtggtgatgcacatatgtagtcccagttacttaggaggctgaggtgggaggatcacttgagcccaggagttggaggctgcagtgatctgtcaccactgcactccagcctgggtgacagagggagacccctgtctcagaaaactaaaaaaatgagcagcagcataaatattattgggaaattcttagccaaaaccaactttggcagtttggttagaggaaaaactctctgattctatcacttt

SEQ ID NO: 71868 - DNA, 1824 bp, Homo sapiens
acatggtagaaaggcattcaaggagccagatttgaacaacttacccagccttggatcctgaagaagatcagattttgtggtggttttagaattaaatattttttaaaaccccgtaacttaagagtcttagagattttattggaaagtatagactatttctgtctagtgtttataagtgatgaaatgctaaactgggaggtttatctatcttcaaaatattaacacactggaaagacctggggccttctgcatattgcatgggagttttagggccctggtggaatgaaataaatcgaggagcctggcacctttttaagatgtgaatgtcacacaatcacagcatactcccatgtgcttaagagtgatactctcagtatctgcctatcttgtgtccctttgtaattttttaaccccagaactctattccctccttcaggatgtcatacattatctttttttctctccatgctgctctgaaatcctgcttagaaaactattaggaaatggctgcagtcctgagctgtgagcggtaaacacagcctttgagagcaggagcacatttccctttcatgacatcaggtagggttgtatgactcccgactagttttagcatctgagtcttaccttcccccccactgtattgaagaatgttggtgatcttttaagaggtactctgtatagtttgtcattcatacctacaagaaaacaaactttagattttttgttgttgtgttgttaccttcagctactctttggttatttcatgtctggtttcaaaattcccatgtcctgtgaaaccctgtcaagcaataaataattggtactgttaaatttcataatggaaaaaattggaactcaaagtattaggagtttggcattgattttaaaggacaaagaaagaggctatgaattctcaaagatactaaacctgtaatgggatggacttcttgctctgttgaaaaggcctggtctctggaagatgaacttaaaaccagcttctcaaggtggttcatttaccacacatacttcagtgctcttttctgatttcatgtcccttatcaaggtttatgatttggggaccctcaggatttaagtgatcatggagaaaggaccataggtattgctggctcttaacagggcagttaacatagctgaaggatgtgggctttcttatgttctccatgcctaggacttcctccgtcaggcagctggcaggacctgaaggatcacatgcgagaagctggggatgtctgttatgctgatgtgcagaaggatggagtggggatggtcgagtatctcagaaaagaagacatggaatatgccctgcgtaaactggatgacaccaaattccgctctcatgaggtgggtccttgccttctgttgaggagcttgtactcaaatcactccacttgaacctgacctagcagaggtagcaagaggccatgccatttggtaacctcacagtaccataagagatctatcttaggtggacaaagccatggaatttgctatgcctaagtccttcagggtcatagctgaaagaagtatgcattcatggtacgtttgttttttaatatgctttattctgcatattagtatcacattacacagtttggtcatggtatttgtaacctggagagaatactagtgcagtcggtcttcataccaccccattcacaaccagcttaaatggcagtatccctctgtgaactcaactacccctcctgtgggtccaggctgagctctacaggtcagcctcttcatctcagcccttctaggtcctgctgtcagggctgagctgtcacttcacttttttcccagagt

SEQ ID NO: 71869 - DNA, 1053 bp, Homo sapiens
tttggagggcccaagcccgcctgcaccggcctcggggggtccaaatgagccttgtccgcctcctgcctggggcagcaccgtagggggaagcggccgcggggcagcgcgggggtcgccgttcgcccttcccgctcgcctctcccccggcccgtgctcgccgtggctggagagcaagctgcagggtcgcggatgccgctggaggtcgtggagggatctctggtggaatagctcgccgttcgcgcgccccgccccgcaggccagggcccgggctttgtaaagggatcacggattcgggaaaacttctaaaacagccggagtggggctctgatttcacttccctcctttgatgagggaggcttggcgagatgctaaaggttccagggatttggaaactctagattcctaaccccgctctaaggagtgcttgtgattttgcaaacagcgtcggccctcaggccggaaaaagcccaggaactttcaaaactgtggttggtggtggttagcagctgcggcgctgacctggtcactccactccggccaaataagagcccgcaccctgttttcctagcatcatttgctcccggggaacgcggaatgttcgtagggtgtccgacctacctggggtggacgtattgatagggcaaggggagcatctgaggaagggcaggcaggaagcaccgcgaggcgttgatggctgaagagtcgactctgacagctcatccctagtatctcctcatttgcctcaaaaccggaactgggcatttttacccctaagccggagaaggctatgcctcgcttatttagtaaccgtgccattgtggtttttcaacagttgctatgggtcaagtgccatggtgtgtatttagctttttttctttccttcttatttttttagattgataaattaggggtttcaccatgttgctcaggctggtctggaactcctgagctcaggtgattctcccgtctcagcggatcaaattgttaggattacaggcgtgagcaacccgcccagcctgtatttagtatttttaacaatttatgaggtgtagg

SEQ ID NO: 71870 - DNA, 1052 bp, Homo sapiens
ttagccaggtgtagtgttgcgtgcctgtaggctacttaggaggctgaggcaggagaatcgcttgaacccaggaagcaaagcggaggttgcagtgatccgagattgcgctattgcactccagcctgggtgtcacagtgagactccgtctcaaaaaaaaaaaaaaaagtccatgcataacttcttgaaacaatcacttatcagtggacacttaagttgcttccagtttttcagtattgtaacagtgctttgttctgatgaatatctttcaaagataaaaataatctttttaattctactttcagaagtaataggtactcattgtataaaagtgaaacactgtagaaatttagaatctgaaaaagaaagttcctttgtaagatctgtaatcttacaactcaaagataatgttaaaatttgattttttcccggcatataacaggcttttttcctttttaccaaaatgggatgattctgagttccctgtcacgatatataaatctactttattcctttcataaacttccatgcatttccaccacctgtccccacccacccacccacatctgtatacacacattctgcctcccttgccgttaccctgtatgaactgttcatgctcctatctaaggccatctccctggcactgggtccatctcctctcattcctgtgattgtctcttctccctctcctgcatcatcagtttcccctgtctactggattattcccaccagcgtgcaaacatgctgtcatattcttttaaaaatgcttcccttgcctacacattctcctgtagctaccatcccatctcggctttcctccaagagttgtctgtactccctgtccccgattcctcacctcccattctctctttaatccactgcacccacacagctcaaatgtggtggtcaccggtgaccaccatgctgctaaacacagtggccaattctcagtgcccttcatggccatacatgtcacagttgctctcttcctctgggtcctcccttggcttccaggaccacacactctcttagctgtcctcccatctcactgg

SEQ ID NO: 71871 - DNA, 1069 bp, Homo sapiens
gtgagcggtgcattgtggtctgcaacaaaatgcaggagaaagatcctgagggaaccatggagtcaatggaccaatggaagaatgccgtgggctgcgtcaagccaatagggtcgcgcggcgaggggcggggccggcgggagcagggcggggcctgagcactaggcggcggcggctggcgtggggctgcttagatgcgccacggtttcggtagcgacggtatctctagccgggcctgagctgtgctagcacctcccccaggagaccgttgcagtcggccagcccccttctccacggtgagaaactcggggggccagggggtgtcctcgctgccttatttcgccccactccggacttagccctccgcgtagcccgcgcttcctgagaagtggggtggggggcgtcgtcccgtggtggcgccggccggggtgggggcagttagtgcctggggggcgcggcccaactcaaccccttaccccaggccttgcccactaggtaaccatgtgcgaccgaaaggccgtgatcaaaaatgcggacatgtcggaagagatgcaacaggactcggtggagtgcgctactcaggcgctggagaaatacaacatagagaaggacattgcggctcatatcaagaaggtgaggatgggcgcgggggccgatacgcagccgggagcagggggttccttccccccgatcctgctttcctaagggcgcctgacaggtcccgggaatactgctggcggcttggggcgtagaagcttccagaaaggacgcagatgcattttgcgctcctgtggagaagaccagacccccggcgtccgaagtttttttttttttttttttaattacccagctccgcggggggaaagcgccacctagcaacggtatctaagatcagggagcagcggttcccccttctgtgtggttcctgcgccgaggatccatctgggtgttccggaggggggagctgcgtgggtgtttccagccgggccgggaggagatcttgccagccttccagtggggagttgagggaaggtggtgggtggtggcggggctgggggctggggtaggggct

SEQ ID NO: 71872 - DNA, 1263 bp, Homo sapiens
gtctttagggctgacctttcgtcctttgacctcctcagcctccattcccatcttcgctcagactgcaagtatgtttgtattaatgtactatgtaggcggcttggagctggggaacattctttcattctaagaatttgcagatgctgacgttcctcctttctgcccctacaggctctggcttatccaagaggcaaacactgacctctggtaattaaaatcctagttcttttcttttgtcttttccaggaatttgacaagaagtacaatcccacctggcattgcatcgtggggaggaacttcggtagttatgtgacacatgaaaccaaacacttcatctacttctacctgggccaagtggccattcttctgttcaaatctggttaaaagcatggactgtgccacacacccagtgatccatccaaaaacaaggactgcagcctaaattccaaataccagagactgaaattttcagccttgctaagggaacatctcgatgtttgaacctttgttgtgttttgtacagggcattctctgtactagtttgtcgtggttataaaacaattagcagaatagcctacatttgtatttattttctattccatacttctgcccacgttgttttctctcaaaatccattcctttaaaaaataaatctgatgcagatgtgtatgtgtgtgaattacaatttgttcaaataacagcgttgaagacggtcacttgatcagatgcccaggttggtggggatgagtccatccttacagaagttaagtttctgtggggtatttcagtactctttagtcacattctctcacccatcctgcaactgttgtgcatgttgagaaatgcagtgcatgataaagaaacatttaaattaaatctttagtcctaatctgaaaaaaatcaatgtttaaggatatttgttaagacattgctatagaatgttctgggcctttggcctcaggttgtggtgatggatgtgtatgtagtagtacttgaagctttctatggctataaaatggaaataagctcaaaacaaagttgggataatgaaatggattccaggacccttgtctagccccctcccctgcctagaaagaaggtggccttaggggaaagtaaatgtttctgagcagcagttttcatgctcttctaataatgtaaattcctgcaaagactttatcagcctgctgtgctgtgctttgctgtggtcaggaacaagtgtgaattgataccttttcctgaaaagacccaattaaagctggg

SEQ ID NO: 71873 - DNA, 1002 bp, Homo sapiens
ttgagaccagcctgggcaagatgacgagacctcgtctctacagaagaaatttttaaaaactagctgggcagggtggtgtgtgcctatagtcccaactactggggatactaaggcaggaggatcctttgagtccaggagtttgaggatgcagtgagctgtgtgccactgtactccagcctgggtgagaaagcaagacctccccatgtctaaaaaaaataataatgattgattaaaaatataaaaggaaaaatatgtatatataaggaatatggtgaagctgggattagaatccaggcagcctaaccacccaggacttgggctctccagctcaatgctctacatgaaatgaattcactgggggcaggaaaaacagctacccacactgagacccggaactcactttctctttcaggacttgcatgggtattaggagatgctgaagaactgccctttgatgatgacaagtttgatatttacaccattgcctttgggatccggaatgtcacacacattgatcaggtatgaatggctgcatcctcagcttgtatgactctcaggaaattacctctgttgtagagctacagtgagtgaggaaagaaggagagttttgttttttgagatggggtcttggtatgttgcccaggctagtctcaaactcctgggctcaagcagtccttccacatctgcctcccaagtagctgggattacaggaaccttacaggaacccaccaccacacccagggagagagagagagagagagatagatagattttttttttaatcttaaaaaagataatgtttaagggcttggcgcttgagtggaatgcctgtttgaagtttagggtcctccatcctttaagttgacaaattttctagtcacaaaattgaaaaagactgaaaccacagagctgatctccatagaagtctgtcttacttggattggtattcacatctttgggatttgtcttgctctggccttttgtgtatttcctcatacttgt

SEQ ID NO: 71874 - DNA, 1023 bp, Homo sapiens
ataacaggcgcctgccaccacacctggctaatttttgtatttttaaaaatgtagagacggggtttcaccatgttggccaggctggtctcagactcctgacctcaggtgatcccccagtctcagcctcccaaagtgctgagattgcaggcatgagcccagcccaatttctttaattaaaaaaaaaagttagtgttgaaatgagtagaaacttccacgttcacacactcagctatgattgtgcctctgcactccagctagggtgatggagtgagtccctgtctctaacaaaaagaagaaaggacttggctttcagccacactgcatccagttagctaacacaggtactcctgtgcctctgttacccctttgggttttaggaaatgctgtttcttccttttttatttttgttttagtctgcatctttcctcatgttggcttcccacaggtgacattgcattccggttccttaattatgttcagtcccagcatcagagaaaacagaagaggcagttaagggcccaacaaaatttatcctgggaagaaattgccaaagagtaccagaatgaagaagattccttgggcgggtctcgtgtcgtggtgtgtgacatcaacaaggagatgctaaaggttggaaagcagaaagccttggctcaaggatacagagctggtgagtcctgcagaaggcagacacaggggaagtatttgtatctttatagaataaggtggaatatgtaaaatattgaaatgctttatcttttggctttcagaaacttatagatgggcaggttgaagatgatttgcatggctgaatctagtttgtgtgctgttatatgcattatgtatgcatagcagcccattgagtgagcttacccagccctatgtgactgggatcactagatcccaagtaagtcaagaatcttacccaagtcacacaacttctcagtggcagatcccaaattggagttgaatcttcagatctcagctctgagaccctgagacagaagttttgctgtcatttcccag

SEQ ID NO: 71875 - DNA, 1544 bp, Homo sapiens
caaaaactacatttcccagaatacctcaccccctctccactatatatacagtccatccgggttctttgagatgctgtttggcgactcgtcgccattcccggagcaggtcggcctcggcccaggggcgagtatccgttgctgtgtcggagacactagtccccgacaccgagacagccagccctctcccctgcctcgcggcgggagagcgtgtccggccggccggccggcggggctcgcgcaacctccctcgcctccccttcccccgcagcctccgccccgccaggcccggcccggactcccgagccccggcctcctcgtcctcggtcgccgctgccgccgggcttaacagccccgtccgccgcttctcttcctagtttgagaagccaaggaaggaaacagggaaaaatgtcgccatgaaggccgagaaccgctgccgccgccgacccccgccggccctgaacgccatgagcctgggtccccgccgcgcccgctccgctccgactgccgtcgccgccgaggcccccgttgatgccgctgagctcccccaacgccgccgccaccgcctccgacatggacaagaacagcggctccaacagctcctccgcctcttcgggcagcagcaaagggcaacagccgccccgctccgcctcggcggggccagccggcgagtctaaacccaagagcggtaaggacgggcctgcggcagtgggcgggggcgactgcccctgctgctggggagagtcgttgctctcatcggctgggttactcggggacaggctccactttcttttatagctcctacctgcccttttccatggctctcatttgcagttacattaatgagcgctgtgctgcgtggtttacgtggatcatttacattaatactcaaaactgctcgattaagcaggtgctgttcttatcgccattttgcatatgatgagaaagggtaaggtcacccagctagtatttggctcacagcaggccttaagacttggtttgtgtgactcatcagtccacgctcctaaaaccactaagttgttctaccctttaatgttgaattaacattggatagtgttcaagtttagatgggtgggtgagggcccaaggacctttcaaactcagatctcttatttaataacctggtcccagatccattcctctgtcgaagaggaagtcatccttcagtggctattcattgtggggttaagagcgcagactatgaattcagtctttttgggtcccagtttgccagaccttgagtgagtgccccgagtttacttacttgtaaaggtaggtggaggtaatataattaaataaacttaaaaaactaattaaaaacaaaacaaatgaactaaggtcttaggatatctggcgtctattttgcgccaaatacacataatgtctattgttgtgtgttggactataggattgtcctttaacagggaaggttttatttctgtaatcaagtctgtcaatattatgaccatgttgataatagctacctttaattgagggcttaccatgtgccaagtactaggtgaagt

SEQ ID NO: 71876 - DNA, 1053 bp, Homo sapiens
tttgtactaatctctgctctcttttgtatttcagtcacattagcagtaataggaaggtgttttcagcgacagtggggatgttgtggcagagagggaaatatttgaagtccctaaatgtggaggtccagtttaaaacttgtcaagattaaaaaaactgtttagagtgagaccgggcgcggtggctcatgcctgtaatccgaacactttgggaggctgaggtgggaggatagcttgagcccaggagtttcacaccagcttgggcaagatagtaagaccctcgtctccataagaaaaaaaaaaaattagccgagtgtggtggcacacacctgtaaccctacctacttggaagggtaaggtgggaggatcgcttaagctcaaggaagttgaggctgcggtgagctatatcacgatactgcataccatccagcctgggtaacagagacccccatctctaaacagtaaaaagaaaactaaggctgacttaaaacaaacaaaaaaaacagaaaattgtaaggtctgctaactcgctcagagttcacctgctggatatggcaaacttgtttacctggtgtgagaccattggagtatgggttctcgggccgtgtcaggaaatggcatgtatgcagactgattttgcagttctgcacatgcgtagctttgccatagatccctcaaaagatagaaggtaaccagtccttttggtcagtgttggaactggtttagagtggtctgttcaaagcaattgataagtaagtttatttttgtactctattcccagatgtatgttaaggatttggttctccaactgtgaattctcaactaatttttctggggctcctctttaagccactaacatacattcattagtcagttgcaataaatgccttaagtttatttcttagcagtaggtgaaagcttgtgacaacttaaaataaaacaaacaaacaggtatttaaggaattttactgctatgtccttcactttgaatatgttggttagtggaattaactctgattacccaacaagatgatacagaattctatagtagtttga

SEQ ID NO: 71877 - DNA, 1009 bp, Homo sapiens
cctgcagcttctgcctctcaggttcaagtgattctcctgccttagcctcctaagtagctgggactacaggcgcgtgtcaccatgcccggctaattttttttgtatttttagtagaacggggtttcaccgtgttagccaggatggtcttgatctcctgacctcgtgattcacctgcctcggcctcccaaagtgctgggattacaggtgtgagccaccatgcctggcctaatttttctatttttagtagagatggggtttcaccctgttggccaggctggtctctaactcctgacctcaagtgatccacccaccttggcctccccaagtgctgggattacaagtgtgagccactgtgcctggccgagaacagtcttttcaactgccttgaagactagccattttctggggttctaaggggtgagagaggaaatctggcttactgctgtttgatggagtcacggtctaggttaattttagttcaagggatgcctttggggaatttggctggacttgaagcagaagaaaacagttcatggatttagacttctgcctgctgagtctttgggttctttccagagctggagctcagaactgaggctgaggtcctagtgcagtgcctcatgaaccagggctgctaatggcctgcatttgatttctaagtgaatagatgacaatttctgctgagggtttattggtagatcctgacagtctagctttttcctgtctttcctatttctagctgccaatttgtggtgtctgaagaccaagactacacagctcattttgctgatcctgatacattagttaactgggactttgtggaacaagtggtgagtagctcagccaagcccataagctatgaatgggagcactaaataaaggcactgtggtgacgcagcagctgttggctgtgtgcactgcttgatacccttttctgcctggcctttctatagatgtttcccagaggtcagttcctggttcttcctggagtccattttgtgactaattg

SEQ ID NO: 71878 - DNA, 1097 bp, Homo sapiens
ccttgatgctttgcttaaagagctatcatacaaagccaggcgcggtggctcacgccggtaattccaggactttgggaggccgaggcgggcggatcacaaggtcaggagatcaagaccatcctggctaacacagtgaaaccccgtctctactaaaaaattagctgagcgtggtggcaggcgcctgtagtcccagctactccagaggctgaggcaggagaatggcgtgaaccaaggagatggaccgtctcaaaaaaaaaaaaaaaagaaaaaaatgatcatacatgtacctacgttgtaaacaattttagaaagatatgttgagtataaggatgtacggggatagagatgagagagatgcggatgagagagtagagaggcctaaaactttgacagtccctaatcagttcttcaagcagtgaaccttctggtggcattttgtttcagcgcatttgtagccatgaagtgccatcttgcccaatatgcctctatccacctactgcagccaagataacccgttgtggacacatcttctgctgggcatgcatcctgcactatctttcactgagtgagaagacgtggagtaaatgtcccatctgttacagttctgtgcataagaaggatctcaagaggtgagattgagacatttactcagttagatcccaatctcttcactccttgccctgctacatatgagtgtccatgtttcagtgttgttgccacagagtcacatcagtatgttgttggtgataccattacgatgcagctgatgaagagggagaaaggggtgttggtggctttgcccaaatccaaatggatgaatgtagaccatcccattcatctaggaggtgagttctttaaattttggggacaaataatcctgggtacattctttaaggtgattgaatatatctaagcatcagaaagtgaagcctttgggcagggcacatctggcatgttcatattagtcataggattccagtaggttagggtggggtttgtagagagtagattaattattggtttcaagtttgtttaatctatacatcctaatttttcattttacaaggttttattacatagtgtctttcactgtgccc

SEQ ID NO: 71879 - DNA, 1026 bp, Homo sapiens
tttttgtatctttagtagagacggggtttcaccatgttggtcaggctggtctcgaactcttgatctcaagtgatccacccgccttgacctcccaaagtgctgggattacaggtgtgagccatggtgcctggctggtttgagcttttctgatattacatacaatgctgtaacaataaacgcgtgactaaagttttgactacatctctgggtttcttagatttcttatatcaagagcagagctacagaccttattttaagaccattgttaaattattttctaggaaatcatgctaaattaccccattttcaccccagagaaaaggctgtatttgaaaattcctatttagctacaccatcgtgagctttgaatgttgcatttctttgatcttgctggcattcttatagatgaacagcacagccagtactccaagttgctgctggcctctaaggagcaggtgctgcaccgggtagttctggaggagaaagtagcactagagcagcagctggcagaggagaagcacactcccgagtcctgctttattgaggcagctatccaggagctcaaggtgagaggatgcattggagatgctaaaccttttcactttctcggcgttctgtggtgaaaaccagaaatgctaaaccttttcactctgtcgggggtgagatgatggacgctggggattaagttagttccattccacatttaagacaataagcagagaatggctaaaaaagccaatttgttttgggctttgtttgatgacagtagagaaggtttaacctagggcttttaaagctctttctagagctgaaaggagcaagtcaaaatgattttataactaattgtgacagtggagttttttagattagctatgttcttaaagcaagttagagttctttgttttctgggaaaatacttaagattctattctagaggtgttttgaaagacattgtggagaaagtattatggcctgcccagtatgccttaggagtacctgaaacggcaagaattacacaagaacaga

SEQ ID NO: 71880 - DNA, 1249 bp, Homo sapiens
gagatggggtttctccatgttggtcagggtggtcttgaacttccaacctcaggtgatccgcccacctcagtctcccaaagtgctgggattacaggcatgagccaccacacctggccgtatgtgtctttacagtagaatgatttatattcctttggctatatacccagtaatgggattgctgggtgaaattttatttctgtctttaggtctttgaggaatcaccacactgtcttccacaatgattgaactaatttacactccccagtgtcagattctaagcagattccaatccttagtgggtattgcatgctttttgcttcctgtttccctcaaagttgagatatttaagcacctaattccttcccattgggtctcattgccttttaacttttggtcctgttgagaggccattctaagcccttgcccttcaagctaagtgtgtgtctggaaacttaaccttctctggtgttctctctggccacgttagactcgggaagaggctctgtcgggattggccggaagcagaagggaggtcactggtgttgtggctgctctggaacaactggtgctgatggctcccttggcgaaggagtctgtttttcaacccaggaaggttagtgtgttcctgttactaagtggctgccgttcctcaaatgctgtcattgagctggtaggcattactgtgagatctaaaccttctcaagagaagaggggacaatgagtattttctgtatgcttgttattagttctttccccaggggtgttaaatcagtgaacacgacagctaagataaacatctagggagcttggctcttaggtctgcatttgccacattgctttcggaaagcaggagatatcctttctgttgacttagagtttgctgcaacagggtgtgctggagtatctgtctgccttcgatgaagaaaccacggaagtttgttctctggacactccttctagacctcttgctctccctctggtagaagaggaggaagcagtgtctgaaccagagcctgaggggttgccagaggcctgtgatgacttggagttagcagatgacaatcttaaagaggggaccatttgcactgagtccagccagcaggaacccatcaccaagtcaggcttcacacgcctcagcagctctccttgttactacttttaccaaggtgagggtgccggaagagagggctgggttgccgcagaggtgtttcagaggtgacccggtgctctaagcagaggagcgccacta

SEQ ID NO: 71881 - DNA, 1096 bp, Homo sapiens
gggagatcaagtctgcagtgagctggcctgggcggcagagcaagaccatgtctcagaaaaaaaaaattgggcttcattttctactatttcaggccaagtgtctttcaatagggagatctgctttatcttccttcccagttatttattctgtcagtggttcccaggtttttttctgttctgtttttctgccaacaaataactttatcttctctgttcgtccccctcagctgtggggccttgaaaaaatcagaaacagctgatgggctttagattatttgttgctggactcagttcactcctttgcagtacaaaccaaaaataactggatttggttgcttattccaccttgctgtaggttgacagtttctctttggcttttcaaaatgaggataattgagcactactgtttccagccccagtgctggctgtgttatgtatatattgttggatatcggggttaggaccccctgctttcagagttaggcttgcttttgttgagtattggtcctttttccaatgtaggatgttcgacagcgtcacagatatctctctcacttgccactcacctgtgagttcagcatctgtgaactggctttgcaacctcctgtggtctctaaggaaaccctagagatgttctcaggtgagaatgcccctgctctgcttctctttatagtagggttcagggattcttgtggctagacacccagtgggggaggaaacttatggaactgtatcatgagtcttagtacctcctaaacacttcatctgttcatctagtccagctgggcctactgttgtgggtttagctgctaatactgggaggaggtaatgaccatgttgtcctgggtctacctctttacaacctgaccaatctgcagatgacattgagaagaggaaacgtcagcgccaaaagaaggctcgggaggaacgccgccgagagcgcaggattgagatagaggagaacaagaaacagggcaagtgtaagttcaggaactttcatctttgactagcactgctgtacgtcgttgtatagaactctgtgtctgggacctgggagccagaccttagccacttgttttcttcaacttttaaatgt

SEQ ID NO: 71882 - DNA, 1050 bp, Homo sapiens
ttgagggtctcagtaagaatctcttgtgccttctgtgcagtgttctttacccatttcctaaggaacaaacagcttatggtttactaccttgtgggtttcattgccatttccattagccaggatatagaggacatgactagaacagtgtgttaaggagagaagtacctggaaaatcttttcaaaggtgatagttggttctgtgcctctccagttagtcaaggtaggtctgaaaaagaagttggaccagctacttaaattctctcccccacttctttcccactttggcagatgctgagggttggaaaagcaaaagcagatgtgtggcccaaaactgctccaaagaaaggtgaggatggtccactggtgaagggggagtttggcttctttccataaaaggctgtttctagaaaaagagttgtttctatagttttaacactggtattttttagatgagaacagcttagttcctcctgcccctgtggacagcgacggggagagtgataattcagaccgtgttcctgtgcccagttttcaaaattccttcagccaagctattgaagcagccttcatgaaactggacacaccagctacttcagatcccctctctggtaagggcagaggctggagtgcccagggttgtcaaacatactacacatgtactgccattcccgcctggattcagtggcagacatcactaattaggctctttcccttctgaacccttcagcacactctagtgtcatttaaataatactccatttggtatgtcagataggacctatttgccaccccagagaaattgatgacgcctgaaagtgaaattctgaggaactcttccaagatacagtggggtgtacaacctgtatcctttagaatcttgagttggtacagggtggctaattagatggagaagtcagtctcgaagcctgttgcactctgttcatgactagacaagaatcacatatgtatggcgtgctatgtgcctagcactgtgctaattctcccaacaaccacgttaaatgggtgtacctcacgttacagatggggaaa

SEQ ID NO: 71883 - DNA, 1050 bp, Homo sapiens
gagaatatactcgcatacataactgtggtgcaaggttcccagggccccaagggtagcggctacatcctacacactattgtaaacttcagtgtgcaacagaaccatccattacagctgcaaggcgctccatcccggggttcagccctcaaactagtcagtgaccctccgcaggacgcatgcgcgcttacaaacgcagttgggcggggcttgagagagctgacagacttcggcctctcaactttctagctccgccctaatatcctgtctccttctctgaatggctgaaaggctgcggaagcaagcttcccattggcagcggacagaattcacatccggtttgcacgccggaccggagagcgcggaggcagccatggtgcggttcaagcacaggtaagcattcccttccagaccctcccagtgccttgctgggtcctcgcggccccgctagtgtccaccttcctctcgcctgccgcaggtacctgctctgcgaactggtgtctgacgacccccgctgccgcctaagcctcgatgaccgagttctgagcagcctcgtacgggacacgatcgccagggtgcacggaactttcggcgcagccgcctgctccatcggcttcgcgggtgcaagggcgctgggggaagaggggaacccgggaggatggcgggatgtggagggggcaggcgccggaggaagaaagaaggggcacgagtggccaagcccgtgcaccgttttttgtaaggtatctctttaagcgcctgggaccccaagcgagagtccgaaattagcagagcgctaaaaggaggggcccgaaggcagtggggctttgagctagaagcctctttttacctgcttgacaggtaatttctgtaattggttgtgattgaatttgatagggtagagaattaaatgagggaagctgtgtatacttcctagtaagagctattatatgaccgattacattaacatcatatggaaaaaaattgtcaaaagtactccgggaaagcccttaaatagttggtaaagtacagaacacatgattgtcaatatatgta

SEQ ID NO: 71884 - DNA, 1601 bp, Homo sapiens
cccgccagtcctggaagagagcgacctctacgaccgtcctggagatttgcgggggtcaaggaggggcgctccgagcaggtggcgccaaacccactcctctggcctctggccagtaccgccagggagggactcaggagagcaagcggtttggagtctgggggtcaagagaggggacctcagagaacacagaattacttgagggcgagggacactggccactgcctatcatgtccctgaaggcctgagaaaagttaggagatccaaaaatatgaggaaagagaagaggtgtctgggtaggcatggaggggcatgcagagctgtggctcaaactggaactttggggtggtttaaggaggctgtcactctagggatgccattggaagggtgagaaaggccacaaagaggtcatcagtggttccctcaggcctttccctcaagagtcccaggcacctgggagcctgccctttaaaagcagctccgtagtcacaatataggtctacagtttgaggctgtgctgctggggaaacaggctcagtagaaggaaacctctgaactcctgagcaaaaaagccagggtttcccctagttcggagtctgtaatcaagtcaaactcattggcacagctttgagacagttctgtggcagcctccgagaggtgtcatgcagaggtctgattagagcgtttgcgtggtttgtagggaaacagggggggctgtgcctttctgtgctgagatctagcataaagaagctgtttcaagctcctggcttgccacgccggatcagaattccaaggaggccctgtgtgttttgcttcagatctgcacatttcttttcaaaatactactcggcagtggctgatgctggtggaggtctgacatgaaggcagccgcacatggatttgggttgcgtggtgctgctgtggtggggccatagggcagtggtgtgtggctttgttcctgcagggagccctcgttagccgagttagctggaaacagttctctggagtagagatgtggatgcagagccgtgagagttagtgaggcgatgtgtcaggggagttcactgcagtgctttgtgttaatgaggaggtgtaggctgccagggcacgagtggtctttggattggggctgggttgcagcaggaatgctgggttgttgaatgggtgataccaattcattcatttatcaattatttcttgagcatttattaaggaaaccttcaggggtttccttagttcctgtggtttgtttgttcagacatttgctagacaccaggaagacaacagtgaaccagatagccagggccctggctgtacctagcagtttggaagggtaggtcattggcctagaatcatacactttctggttactcagtttgcagctgatctgactcagctcctgaaaaaaaaaaaaaaaaagagtcctttctttcctgtcttgcagaatttgcctacatgagccctttctgagctccgagcattgtagcgacgtgcttttgtttctccttctaatttctcagtcattaagtgaattctccggcccaatgttctgaaatgtcaccagggtcacctgagtcaggaggagctggaagttcccatcaaat

SEQ ID NO: 71885 - DNA, 1033 bp, Homo sapiens
gtaggtctcaaaccggacatctgaggcgtgagatgaattcatatcaaagccgaccctggagggacgaggaagagccagtcatctaaaaagctccagctgtgggacctcgaagagcgcttcgtaaagggcttcttctctgcccggcaccccaaggaagctggggagaggtctttgctgtggatgaggcagggggcgaggaggaggaggttcagagaccttttgctcatgccctctctgcctgcgctgcctccgtcatgctcccctcggggccatctcctggtttccttcgggtcagagaaattgcacacagagcagaaggatctgatctgactgttggctcatctgcactgccggcccccgagcctcgtcccatttcagtgacaaggcaagtgtgaaaaatggagcatgatggaggcgtcaccagacctcccaggctctcgactggagccgcagctctcaatgcagctggaattgccaggggcagtgagtgcttgtccagctcactgctctttggaaggggcattcatctccctgagcgcttgtgtgtgcatgcatgtgtgtgtgtgtttgtgcgcgcgtgtgtgtgtgcatgcacgtttgtgtgtgtgtgtgtgcgcgcgcgcacacacacaaggctgggagctgtgcggcaggcaccctggcttcgggaacccaaactagccagcttccctttctgggcctgctggcctaattcccagccgcagctgccattctgggcccccctccctgaggccatctccctgcagatttggcagcggggaaaggaggggccgagagaaggggagagaaccagagacaggactgagcgctaatctgatgtagatgatccggcagccttctccagcttggttcccctctgccatcagctctccaggtgactttccctgtgccctgcactctccccttctgctttcatctccttaagaaagtgcccagaaagttaaacccacacacaaacacacacacaatccacccaaaaaaaaaaaaaatcggagagcaggagcaggcagac

SEQ ID NO: 71886 - DNA, 3427 bp, Homo sapiens
gtccctcagtcccccaggagcctccttcatggacccggggatcccaagaggggctgcctcaacttaggatgggcaactgtgtcaagtatccactgagaaatctctcaaggaaggtatgtttttggagtttccaagatctggggctggggattgggggtatctcaccatctgtctcagaggttgggcacagaaagggtggctggagcttgctatccttcccaggggttctgtccagggctgcctccctgcttctaccccaaacaccctcctattgccgttttctgtgtcccaggctttgggcatggcggtcggggtgaaactgtgtttgggaatttgcacaaggcttaggaaagaaactgtgtagctttggggtttctaggatgtaaaatgaaaagggtggatccttaagatgtcagtgaacttgactggcacctcagtcattcaagggactggccaagtcccttaaaaccggcagaatctgaagacccttcccagcagcaagggcagggactcgttcatatcctttgagggtctgtgagcctctctgatggcctctaagccttcagaattgtggattttgaagtagatcccattgctactgaaaggaaccaaacaacaataattcttccccaataattcttgagttaagtcagagtatctcaaataggacccgagtggttttagggcccaggagtttttccattaagaagtaggctgcccgggtgatgtgttgagcaggggttgcatgtaagtcactttctgtggtggctttatcgccatacacttggatttgtttttgtttttgcaaaaattccttttagaaagaacatgatcatctctaaagcatctttcatgcaaggctgggtttgcacctatagggttttgggttaggtgggctctgcgtatttttctagccctctgttgccaggccatagaagagactcaggtattatttaaaggaagagggaatgatggcgttgttttcctccaattcttccattttccagacaaggaacttgattgacattcagagggaggggttaagtgacttacctatggcctcgggtgagctattggcgtctgtatccccaaccccatcctatcttggtcagtttaccagcctctcaatttaggacactttgggcttttctgcctgtcgtcttcctcatttggctaagctgctcacatcaaattccttctaatctttgctgttccttagatccttccaagggcttgttgtttcttccatgcacgcctcccccataatctggtatcttcttaggggagtcttctgcatcggaagtgccctccgcgctgtcccagagaagcagaaagtgatctgaattagcccttgtaataggttccatccagagcttgaggaagtgaacttaagaacaaggattatccttctgtcccacccatcttcccttacacaacagcatgcttaagagtcagattacacaggcctcctctttctggccatgtgaccttagacagattacttaacctctctgttcctcgattcccttgtccatccatcaattgggcatactaatatccacctcttaaggtgattctgggaatgaaataaagtgctgtgcacagtgcctggcctatagtagtcaataaatgttagtattcttgtcatcataaccataattgttccactctgggttttagagaagcgggatggaggagaaacaggaaataggagagattttcagtccacagagtaaaagataaaaaaacttactgcagtcaatttcgtgtttctatcatagtattaataattgcttttttttttttctaaatatctgcaacatacctaatgtctgttatctcattttctcttttccgctacatagttcttttggctgttttatagagaaagaagctggactcagagatagagccttcctaaggttacacagtcgataggaagcagagctgggatttaaaccctggtctgtgtaaaatcagagctggcattttatttttattttttcctctacgagaggctgcctctctctttcccctgctgtcagaaatgttattcatagatttctggatctgaccttagaagtcgtctagtccaaattcccgctcagcgcatcagtcccctccccgctcaccaggcactccctcattcggcttctccttgaagacattcattcggcaagagggagctttgatgtgcatactcttggccagcttgtattattagaaagctgttaggtcatgaggcacacttgcccctcctgttgccatgccacacttaggagacgttgccttggtgccaggagaaattgtcggtccatgggttgctgcccacttggcttcctgagcggtatctggggaactggaaatggtgagaggcagcctgcaccaggctcagagctgggcaggaccaggctgtcaggtgccatcattggccagaaaagaattgcagcctctggggcaacttggtgttaggcagtattatgatcaagagatgcagtggaaattccccagctaccactctccattcttcatgggagcaaattcctctccatccttctcatttctttcctgattggcagatgctcccccacttcctctgcagccagaagtaaatgccttctggcacccagcatctcttaaattacatcactgccaccaccatcatcatcgccatcattgccatcactatggcaactctatttattcacctcctcttgccatgccctagccaccatgcagagcactttatgtgtataactcattacttgtcgcaggaatcctgtgactagtcatgagcatctcccacagtatggagaaggaagctggagcacagagaggtgaaatgacctgcccaaggtcacacagcaagcaagtggcagagccagaatttgtccctaagactgtttgagcccaaagccagcaggctaaactgccttttaaagttttgttttgttttgttttgttttttgtttttttgtggttttgagatggagtctcgctctgttacccaagctggagtgcagtggcgcatctcggctcactgaagcctctgcctcctgggttcagtgattttcctgcctcagcttcccaagtagctgggattatgggtgcccgccaccacacgcggctaatttttgtatttttagtacagacggggtttcgccatgttggcaggctggtcttgaactcccaacttcaggtcatccacccgcctcggcctcccaaagtgctgggatgacaggcatgagccaccacgcccggcccgcctcttggagttctgtgccacctgctacctccctgccttcctgggttatgctatctctgagccaagtgcagaagattcagccagaaacaaaaatgctgactctctgcagacatctcctgagactggttcctggggttcggccagtcactgttatctcaggca

SEQ ID NO: 71887 - DNA, 4968 bp, Homo sapiens
gaagccccccgctgcccctgtctcttcatgcacttgggtgtgtgattctgtgcatatgtatgtgccagtgcgtgcgtgcgtgtgtgtgtgtgtgtgtgtgcgcatgtgccacacagagggcatcacattcagctctccccggaaccaccatttccgtcaaggattggagactctgtctgttggaccaatttgatgcctgtgcacgctcagggctctctgaaccccgctccttgactctcagggtcccctcttgcggaaagcccctcccgggaccaggagccaggctgggcagggaggtgacaccctgcctctcttttgcatttgcttggtgctggctgaagatgtgccaggaggaacagaccagctacatggtggtgcagacgagcgaggaggggctggcggctgacgccgagctcccgggaccgctcctgatgctggcccagaactgcgcagtcatgcacaacctgctgggccctgcctgcattttcctgcgcaagggcttcgctgagaacaggcagcctgtacgtaagttggcccagtggagcccgctgaacttggcttcacagggcgtgaggaggtgctgggatgaagaaggggtctatacagagctcacacccccaacttatgaatctgatccccaaagttttccactcatggctacaaagtgctggtgagtccatatccacgagcaaaataatgatgatgataataataataataatatcagatacattgttttgagcacttactaggtgagcactgtgcctagtgtgttggcggattgcctcatttaagcctcagagcagctctaagaggtaggtgcttttatcatccccattttacagatgagaaaactgacttgggctgggcgcagcggctcacgcctgtaatcccagcactttgggaggccgaggtaggtggatcacttgaggtcaggagtttgagaccaccctggccaacatggtgaaaccccatctctactaaaatacaaaaattagctaggcatggtggcgggtgcctgtaatcccagctactcaagaggctgaggcaggagaatcgcttgaacccaggaggcagaggttgcagtgagccaaggtcgcgccatggcactccagcctgggtgacagagtaagactccaactcaaaaaagaaagaaagaaagaaaactggagtgcagaggtcacatgctcgaggtaacagcttgttggtggtagaggtaggattcacacttggatagcctgactcaagagcctcttgtgctcctaatgacaactctgtatacgtggcactgtccggtagaactttctacagtgatggaaatattctaaattccgtgctgtccgatacagtagccactagccacatgtggctattgaccacttgaaatgtggctagtgcaactaaggaactgaattatggattttatgttattcttactcaaatttacatagccacatgtggctagcggctagtgaattggccagctttctacaagtagctaaatagttcaaagagaggagaggactaatgaggatgttatagaggtaaacatttgtaggttgcatttattgaatgccacatgctaaacactttaatatcttgtctcactgaatgcacactaaggccctgtgaggtgggtactggtattaacccattttacagatgaggagactgtggctcaaacagcagagtgacctgcctgaggaagtagatctgagcttcatactcaggtctgtctgcctctagagtccaagtgcgtctccccagccacatgtactggggagaaaggcgtgttcctgcaccccattccacctgaccctgagttgctgcacgtgatcttcctggcacattagtgggcatccctggctctactccagggcagagaacacacatagctactgctgtgcatggggtgtgtgatccaaggaccagccatcagtgctcagcagaccagctctggtggcgggcacactccgtgaaggggcacctggctttgctgcccccggggctttgggtgtacaggaggaacggaaggggctgccatggggtcagcaatgcctgttcctcccgagtcctgcagaactgggccttggagaagtgggaggctgcttaaggcctgatgcgtgggaaaggatttattgggtctcagtagctggtcctagggcgtgtgctctgcatgtatgtgtacacacgtgtgcttactcactcgctttcacagactgctggtatgacccattgcacaaaacatcctttttggtcacccaaaaacatctacgaacatatgggtttgtgttggaatggctgtgacctacccttaagccaggcaccatcaccagctttttttttttttttttttttttgagacagagtctcactctcttgtccaggtggaagtgcagtggtgcaatcttggatcactgcaatctctgcctcccaggctcaagtgattctcctgcctcagcctcccgagtagctgggactacaggcgtgaaccaccatgcttggctaactaaaacaaggttttttggtagagacgaggtctcactatatcgcccaggctggtctcgaactcctggcttcaagtgatcccctcgccttggcctcgtaaagtgctaggattacaggcgtggaccaccgtgcctggcccatagcgagctttttaggtgaacgtccatgcagtcatctcagagacacgcctccctatgggtgactcctacccccagcctggcggagctgggagcttgcagcctgctccctccaagctcacacacactctcaacgctgtcctgccacacagagctacctctgagctcttggtcctatgcacctggttgtcccatgagatgtgactcagcagcccttccctttctagatgatctgcagattttctggtgttgtcgtcttttgtcctggggccagtttggagtggctgtctctactcatcctggccccgttggctggaacggcctgcatgcacagtggaggtgccacacgctcactgtggcatgcctgcgtgtctgtgttcgtgggaggtatggccatacctgtgtgagcctcttcaggacgggcacacctgcctggtgtcctccctgcccaaaggcaaagagctgcaacatgcgggaggctggacgctgaaggccacttttggagtctactaaccaggtccagctgggcacctgtatccatttcatgccagtctatctccctcctgggcaggcccagggcaactggcagctcaccaacctgagcttcctccaggcctgctccttggagatgtctctgccatctgttctgacgcctagattcagggttgccttgattgcccaggagacctgggcactgcttgaggctggagacatgtgctttttggaccctggctccagccagaagcactggtggcccccggggtcctatgtggtgtcctgtgatcccatgacaggggaacgtacagggatgggggtcaaattggagaaggtggggcagtgcccgcgaagcagtcacagccccattctgttgccacgtctcctcctgactcctccctgtcctcctaccctcgcttcaggatggccctgccttccctcccctcctgcgcctcttctgttgtcttgcagcctctgtcgccctgctcttcctgtttcattgggtggtgctctcttttccctgttgtgacctccctggactctgttttatttgcaggtttttgccaccaggcaagctctgttctctgactcattctttttttgttttttttttttgagacagggtctcactctgttgtccagggtgacagagtgcaatggcaccatcatagctcactacagcctcaaactcctgctgacccattcttgtatctggaacaaggggctggaggcacagaggttctgtgcccaggctggtggggctggtggcttcttgggcatctcctgttaggggcccaggagcttctatgtctaagggagatgtggggctttcttctcccctcaaggacctgatccaggcacacctgtgctgcatcctcgtcacctcctacccagtgcctgctgccacgtggatggcccccaggttaggtattttgtgacttccaggtcccttgtcgcggctaataggacatgttcttttgtttcaggatagatcactgcgaccagaggaaattgaaggtaaaacttggccccttgggggaaaggactgcctagccctctaggaaggtgtgggaagggaggttgatgggaagagaggcccctggaaatggggcctggtgcaacgcggggtatcttctgtgaaaccagctgctgaaggtgtgcacaggaggcaagagaaatgccccagcatcctgggaagctcctgggcctctctttccatgccggtgggcctttgggctgcctttgcccacagaggctctgcgggtcctacccctgaccacatccacctttgctcacttccccagagctccgagaggccttcagagaattcgacaaggacaaggatggctacatcaactgccgggatctgggcaactgcatgcgcaccatgggctacatgcccaccgagatggagctcatcgaactgtcccagcagatcaacatgaaccgtgagtccctctaccaggcatctgcgtcccttcggtcctcacccttgccgtcctctgcagtcagacaggactggcttcaaattctgcatccacctcttaccagctctgtgatctggggccaaccacttaccctctctgagcctcagtttcctcacctgtaaaatgagggccgaattggaggagtggagcccagaaagtagattagggaatatctgtaaaacagcccaataactggctcacaggaagaactgaacagagggctcttgttattattaagtttgtctctatctgatgagcaggtcaaggaggggttgtccattctgtcagttgtctagttggagacagggaatgggtatgtcggggatgacctagccctttcc

SEQ ID NO: 71888 - DNA, 1816 bp, Homo sapiens
ctcctgacctcaagtgatccacccgcctcggcctcccaaagtgctgggattacaggcgtgagccactgtgcctggccaccaggagggcttttatcctgttctttttttttttttttttgagacaaagtctcgctcttgtactccaggctggagtgcaatggcacgatctcagctcactgcaacctctgcctcctggattcaagcgattctcctgcctcagcctcccgaatagctgggattacaggcgcctaccaccacgtccagctagtttttgtattttcagtagagatggggtttcactatgttggccaggctggtctggaactcctgaactcaggtgatccacccgccttggcctcccaaagtgctgggattataggtgtgagccactgcatctggcctatcctgttttttacttgggctaagttctgttagcccaagggacattcttcatgactcgacagtgggactccttcttctagcacccttccctggttcctcaaactgaacttcctcttttctgggttttcacagcacgtcaggctcacctgttcttcacactgtcccctaactgctggttagagttgtcttcccagttgactctgaactttgaaagaagaaccctattttcttaatcactgcatttcttgcataacacagctagtgctcagtgaaaggttatttatttatttatttatttatttattttaagacagggtcttgctctgtcgcccaggctggagtgcagtggcgtaatctcggctcactgcaacctccgcctcccgggttcaagtgattcttgtggctcagcctcccgagtagctgggactataggggtgcaccaccatgcctggctaattttttgtatttttagtagagacagggtttcaccatgttggccaggctggtctcgaactcctggcctcaagtgatccacccgccttagcctcccaaagtgctgggattacagtcgtgagccaccgcgcccagcctcaaagactttctttttaaagaatcaatagtaatcataatagttataatttactgtacacttatgtgcagtcattgtactaagtagctttacacatattcttacatttaattctcagaatgactctatggattgcattattataacctcatgttacagatgaggaaactgaggctcagagaagtaatataactagctcaagattgcctgcctactaagaggcagagctggggcacagccccaggcctgaaatcacagcagaatgcagtcttgtgcatgacgccatgtgaggcactacgggatacagggaaagggtaaaatgttgactctgcacaccaggaacttgcattctgagcagaaagacaagataagcatgtgccagagaccgtgagtgtccagaacacaaaggctgggaggttttctctcaggagcagttggccttcaaggccagggagcgtggatagttggagagaaggctttgttatcaccagatctggaaatctcaggtctccctgtatccaggtagcgcccaccacagatgacagccttgctcttgaaagcctggcatcccccattcatcctacgaggatgcattgtacatctgctgtgtgctaagatctggtctctgcctcgaagagctcaaaaccagcaagaaaaccagagaaaacaatagcataatccatgtgtgctgggggaagcacagggggctgctatagagggggcgcctgtgccaagttgcagggagggattagggaagacttcctggaggaggttataaataattagagccccccaaaatgggaagagccaccaggtgagagggaa

SEQ ID NO: 71889 - DNA, 1068 bp, Homo sapiens
ttagcagcggtaacagcagccaaagccagactttatagcaggaggtcattactatctctatcctggacccttcctctttcttcacgagtgtgggcagggaggaaagagcccttgaggaaactagacagtttgtggactttgcctcttgagatagcggtggtgagggtgctgagcggatggtttctttcacttagcagataccaggccttacattggttacatcgtcctattcagtctgttgtgcagagaataaagccgagtaagaccacacaggtttagttcccagatactgcccttattcagaaattctggttttaatttgctgatgcaggtggtgtgtgtgtgtgtgtgtgtgtgtgtgtgtttctttggcttggtcagcagtcagccaagatctgtgtccttgggttattggctcatggttgcagttccttggaaggagtttattgtagcaggtaaaattacatgagacctaccaaagcttgtgtgtactggagtcctatttcggacactggcccttggggcattgtataaatgaaggttccctgctaaggttcccctctccattctaccaatctgggtaagaattggagcagtattaaggcatggatggggagtgggaggtggcgcttgtcagctgcagtttggaccagcttgttgcaacattgcgcttaccaggttcctgagaaaggcattttgctggctttaggtcgggctgagatgcgcataagcttgcactctcaggaggcagctctctactaaggagtcagtcctaccaagggaagtccagctgttcacactgcctttcttctgggcctgtttggataagggtgtgccaggtatttgaagacccttgcctcgtgcagctatttacactgattgcagtaggaactgtatgccttatttcttttcccgcctgcctgtgatattgtttccagcatgctgagaaaagttgattttatgttgaatgaattcaggtatttgttaccaagttagtccagataagggtttggccttcttttgaacttgctgtttctgtgtagtttctttgtagttcaacattcttgt

SEQ ID NO: 71890 - DNA, 1033 bp, Homo sapiens
ggtttttatttatttattgaaaatttttaattttttttttattgtagacacaggggtctcactatgttgcccaggctggtcttgaacttctgtcctcaagtgatcttcccaccttggcctcccaaactgctgggattacaggcatgaaccatcacgcctgaccatgttccagatttgtaacttggtcattttgagttcctcttcactctgactaggaaaagacctggttatttgacctgagggcacagaattttgcttgagtttagggaaggctatttcctcttcagagaaagatacctgctaaagtcgcaggtcctcgagaaacttgctttacgtctctgagccttgttttccttttcaaaaaatctctcatgctttagaaatttctgataagactgtaaactctcctgtccagagtagcttgaagtgtctctgtcactttttttttccttgatgaccttttacatggaattaaaaatagggcagaacatagctccagaggggaaaaaagttggttggggaccagagcctatcaggttgctaatgctgtaaccttaaggaataccctttcctgggctgccttcctttcacctggggaaggatttggctttggggaggtaagagcttgaaacatgggatgagagaggagtcactgctacctctgatttgctcaaagccatggcagttgtttagaattctctacctctactgtcacctaacaggcaggcttcatctgcaggccttccaaatagtggaagttcacaggtagaaaatttaggtccctgaatccgtgggttcgctgtctcagcccattcagaacaattctttaggtactggcctcactggagaaagaagtgatccagaagaacagtctagtgaccaggagatctgagggtagggtgggagtgacgctagagcaccaaggggggctttacagctgtgttctcatggaggacaggcttctgctcattctggctttcccactcttgtggttcccagttgcagttttccagttagttttattacttccttt

SEQ ID NO: 71891 - DNA, 1288 bp, Homo sapiens
aggtgcagtggtgactttttttttctgctgttggtttatctgagtgaatgttcaagtaagtaggtgaggtggagttttgtgagtctgtgggaaggaaggaaattagcatcacacctttcttttatgagcctgtttttgtttacagctttggaactttttgaatgaaaattataaaaaaaacacacaacaactaaagctggaattttattcgtaaggacaatgaagaatgactttccaaagcagatatcctgtttgttttagactctgggcttttctgaatgagagaaaacattctttgaacttcatcttgtatggagttcctggccatcccccttgttttaggaggtttctctgaagccctccctcttggggaaccaggcagctgcaacacagcactttcttctggtaatgagttagacttgttctccgtacagtcagggggaaaaagtcattttaatgtgcttttagaaagttccgctctgaggtttacaggggctgttggcctgattagtgtttagtttctttcattttactcttccatagtaatggctgtatgattcctgcctttgttggagctctgtttggagccaggtgcagagtgggtggccccttttatggagagggttattagcattgccctggaaatgcctctggctgttctggggtctttgcttttcttttgtgtcttgcctctgatgtgctttctctttgtcttttgtcctcagcctcagactatggcatgaaactgccaatcctgcgttccaaccctgaggaccagatcctgtatcaaactgagcggtacaatgaggagacctttggctacgaagtgcccatcaaagaggagggggactacgtgctggtcttgaaatttgcagaggtctactttgcacagtcccagcaaaaggtgaggcctagtcaggctgctgcttgaccagtaggacattgctgctcttggacaatccacgattatggggctagagagtgtgagagtctctccagaaaggcagaacagatgagctctagagaagcatgttccatagtgcacaaggctgcacttgccttgggggtgagtgacagaaagcaatgccagaatccttgttttgccaactaactgatcctgttaaggccctcctggctacttccctccatggtttgccgcaccttcttgtttttagccttatttttcctctgtcccttcctgtgaatttccttcttcctatgctaagctttttgtttgtattctttgttccttaaagccaatataagaactcctgggcagtgaaggaac

SEQ ID NO: 71892 - DNA, 7521 bp, Homo sapiens
ttgaacttcaagcccaaacacgtgcatgatgtccaactgcttgaaaggatgtaaagctgatggttttgacattgttttcttttcttatcctggaaggtatttgatgtacgattgaatggccacgtcgtggtgaaggacttggatatctttgatcgtgttgggcatagcacagctcacgatgaaattatacctatgagcatcagaaaggggaagctgagtgtccagggggaggtgtccaccttcacagggaaactctacattgagtttgtcaaggtaattcccctattctgcccattgctgaagagagtgggtacaggggaagttgtttgctgctgtgtggggttgaccactgtttcccttttcctaggggtactatgacaatcccaaggtctgtgcactctacatcatggctgggacagtggatggtaggttgtgttctgacctgcttttttgacttgagtggagggatatggttgaggaagcccttgggaggtaattgagctgatgactattttggaaacacttaaagctaaattgtaggggattcagaatcagttggataaggatgaagcataacatggtactagccacaagctttggagtcaggtctatgtatatcttgttgctgccatttaatcagatgtttgtcttggatggatgcttttaatttccctataaattgggattaataatggtacctattggtgtaccctgacctttgtagtcatttgggatcacctaaaacttgtccttattctgtttgtttgacatctctttcctaggggaaaaaaaggtaaaaggaggagtcctgtaggcttttggtatgctctgaaagattccagcattgctggactgcactgggacaaaacttcacttatttatgtctccttatccttgggatcaagtcttagagtatatttctttctcagggtttagattctcctggctgccagcatctcaggctgatttttgcagagaaagctgcgtctttgtgacatttctcccccattccacctctgtacctttccccaactcaatcttgaatgcactgaggatttcatcctgttgtcttgatgtcccccaaatgctgatattatgacatctaggaggatgaatgtcttaccaccaaacagacctgtgttcaagtccctgaggaggaggcaggacagagggatagtgtgtgctgggaacccagaactctctgggtcaacgtttcttcagttgttgtgtgaatcaaaagggaatgtgggcttgtgggaggaggagggatttgaaaaggctaaagtttaggcattggatcattgtccctgtccagtctggttatcttggggctctgtaaaagtagaacaggaaggtaagatagtgaacctccctatgagcacggctttttctactttctagttaaatctaaagcttttgcagcactctgctgttctgtagaccagaggctatttctgctacttctggtcttttctctggacccgggttcaatcacagcaatctctttattgtggcttatttgctgcttttaagggtctctcttacttaaatgctgtgggtcttaacagtgttttcttccttgtgttagatgtaccaaagcttcagcctcatccgggattggagaagaaagaagaggaagaagaagaagaagaatatgatgaagggtctaatctcaaaaaacagaccaataagaaccgggtgcagtcaggcccccgcacacccaacccctatgcctcggacaacagcagcctcatgtttcccatcctggtggccttcggagtcttcattccaaccctcttctgcctctgccggttgtgagaacaaatgactatcctgaacagggtggaggggtgtgggaaagaaaccagccatattggttttggtttctgtatttttcacaatgattaatgaacaaaaacaaagagaaaaaaacacacatcaattaaaggagacaaaaagaggcagagcgagtagagagcagccctcattcaccacctggtcccagacgtgcttcagtcctcgtcctctctttgtggctggctcccagccttctctttcctcttgaggatacttagggtaaactggatccttcctgctcaaggatcctcatttgtatacctagtggaaaggactctgaactcagaggagtcactgttcctttttttaggttagaaattaacagcagggaaatgccatcttattacctgagacgaccagcactgggagttaggtacggtctgaagttatgtctagataagacttcagacgtcctgggattgaaagaatgtgtgtgaaggggtagaatttgtgcggtaaagacttaaaaaaaaaagtagggagattaaaaaaaaagaaagaaaatgcttccttatctggaagcctttctggattaatccagtgatggtcccacctttagtgtttgagctttgtcattgcttgtctccctggcatgtgccagttatagactgtccagcatccaagacgtttcggttatgtcgggtcctcagatcgcctctgacttgttaccacaacaaatcattttgatttcagtgcctgttggggacttgatttcttctcagttttgtttgtttgtttgtttccttaatctggctcatttgaaatttcttctccctctcaaccatcccactaagttatagccaagaagggaaggagacacggggatttggggttctctgcttgaatgtcttctcctttaccacctcaccttgttggtacctccctccctggatctctgagccagcagccaggaggacctgacccagcagttctttactggcccctttgtagggccttgctgccagggggcagggatgctttccagcctgcagcaacagaacacttgaccttaaaagtctcttctggtctttggattagaaaaggcttatgttagcatagcttaagagcaacctcagagatttgagccctactaagtgactgaccactgtttagagtgtctggtatctgatgttcatttattcccatgttcttgtgtgtcacagttcagccagttttggtttatgcctagagctacttcaaggaactagactaattagctatataggcccagcgatgcttcttattgatcttaatagtatgcccctccttcccctgtcctttcatttctctatccaagtagcagtcaggttcttggtgtgatgggactgaaagaattccagtcagccagagccttggcagctctgaagctaaccttagcatctaagtgtcgatcttgaattccctgaaaaaatttctataggaaatgaagcttccctggtcccctcctttctggccattgtcatccatttcccagttagggcaacaatgaaggaggacccagccaagctagaaggaattttgtggatgggagacagcaggattagcttcagcttgggctggagcagtcaatataggatctcaggccaggcccgcttttctagaatgtgtttaattttgagtttgctttattagatatgttttttaagagctctgtatatttgaactgctccttatgtgacaaaataggtagctcttgggctcatgtcctgggttttggctctttaatgattactccaggccagcatttagtcgtttgagaattgtagcctgttgttttcgctgtgacttgggtctcagtgctagggtattgagtcaggcagctggagggttgtggcccgaggctgcagtcagaggtatacttcccatagtgcttcacacagctcccctgcttctaaaggataaggtactgtagccttggtcctggggaccacctgcctggggcagtggacatcctaactaaacaggcttctggcagtagctttggttcctatcccatcgaaattccccaaagccctgggccactgccattgggttagtcaagatgaaggaggaggactggctgcctccattttgccttgtttgttagtttgcctgggtctgtctgaggaaggagggggtcccgccttccacctcaacacatcccttcagtgactcagagtctcagaaggaaaccctgactcctggggccatttcctaatggtactgtaagccaagcagctttgcttctgcctctgtttccaagcccacccttttcccctgagctcagggttagggatgggcgctttcctctctggttgtgaacgaaaggaaggaacatctttctatggctaacaaaaactaaaggggaagtgaggaaacaggaagaagtatggtgggggctggggtagactcccctggagccaagcctatccagctaacaagagctccctggggctggtcacagctggctcatgatgctgaacttgaaagtttttttgtttttgtttttgttttgtggctcctccaagatataggtacatgaagtttaggttaaaggggtgggattctttatttttatttttgtattgtatgtgtcaagaattactctgttgttcaccttttgctttttgcactgtttgttctcttatctgtattttgagcttagtgctaggactgagaggctgcaccatagggaatgtatgggagatggtgaggggtgccagtgaggggtgcgtggaggagaggcctgggctcctctactggatctacactctgtcccaggtttttagatcccactgagcccagctgactgaaaacaaggacagtcagggtgaaacttcttttgccagaagtgtggcctgagttgaatttctgggaggatgacgcagatgtctgctgcagagctgggctgagagttctgcagtctagctctgacttaggtcaggggcctgttggtctctcattggacgtttttgggtctcactcatgcttactgaaacattgtgccaagaaactctgtgggatttgtgtcccttaaaccagactcacttttctgaaaaatctccattgttgaggagaggctgctcaatcgacaccccgagttctcatgactgggaagatagttttcttcaggtgtcaatggcgttagactcccaggaagactagccctgcccacagggccacctgttggtttgagagcgtgttcgtgttctcttgccctccctgcctaagagctactgggatcacgttagcgggcatttaggctttgatgagagggcacagtttgagttaggtttacctccccctttctgtgcctgggaactgtttggtccagctttagaactgtggttttgacttccttatctcttgggagaagcttctgttttaaggaatttctcttccttcttctcctgcctctagcctctcctggaaaggcctggatatggtttctaaaatctcagctgagaacttcagaaaacagcagcagtattttccttttcctagtgctaaaatccctttccctagaaattggctcaccttgggaaacccagggaaagaatcagcaggttctctgccctccctaggggttggggaaggacccaccccggtcagcacagtgccttttcctctcctgctctgagccagggtggggcattccctctagattcaggtttgggcaggggtcctatagtccctgccatggggctgcttccctgtcccttccctcccctttgctggcctactctggcataattcaagtgtcttcttgccttggggatccttagtggcatcaaatggcaacatggaatattgtcctccatgcccctccagaaggacctaggagagtaggtgagctttccaaagtgagagacgaatctttctttctttttttttttaaagggcaggatgggtatgctttgggctttctccttctgtggccccggaggaaggagagactgaggcaaggcaaagtgatagtacacggaagcagaaccggaaacacccaggaactgttcagaaatctcagaagaaatctgcttctcttcgatggaaagatataattaacgatcaaagagctctaagaaaattgcaaagaagccttaatgttcaagctttagaaagatcagagcaatttttctctttcagtccaaactaagactctctgtatttaaatctctctggggcaagagggctagatttcctcattttgttatgagactagattggtaccagtagatcagctgcctagcgagggcaggtttcttctttgcatctgtgtggcttgcttccagtctggcctgtcctttccagctgccttttgtctagcctgctatggggggccagattatcttgataagagcaggtgatttggggactagctgggttggcaggaaaagagcaggatggatctcttgggacaggttcccccaggagtataaacacaaggagccaggattgtgctggcagccaaggaaacagtagtgcctgtttgagttggcagagagggccttggcacctcttgcatccaggcagtcttgtgagatgggggcacatagcactggggaaagcagaactccattctcacctctattttgagcttcagtgctttatttcagtatgaggaaaaacaacaacaaactgaagtgcgctttccgtcctttcaaaggacaactgtcgggaagggagagccgagttgcgaggtaggaggggagcactggcagggagagacattcttgactcctctcttccctggtgtgttgtgatccagggaatgaaaagaaatttgaccctggattggttctctccttggacttaaggaatcttaccttttccttccacaaagttctcccaggcaaggaccagctgcccattctgagcccagggcagcctcttcaaccattattggtctaacctggcttgtcaggaaaccaagcccacccttccacattgggcctggctgctctattctgtaccaagtactggagaaaaagcatcaagttcttagcccttgtagcttctaccctagtttcccatcctctctctgtggaggccaaaccaactctttgccagcagccacaacatgcattgacagcggcacagtgagatataactgatgggctttgaacctggttggccggggaagctgtaggggtggatagagctggctttccttctgggctgtctccatctgaccctaccccttccatgtcccaccccactcccaccaaaaagtacaaaatcaggatgtttttcactgtccattgctttgtgttttaataaacaatttgcagtgacactctgtgttgggactgagttcgaacttgatctcaaagcgctgaagtgatggggtgggaaaaaggagacccaggggttcacttggctccaaagagttctcctgtgacgaggctgggaactgttgtccatttagctgtgtgtcttttgcttttcttctctctgggatgtttgcttaggggaatcattctgtaaaacccttcctggtcatttcaactagcagcgcatttaaggacaaaaaatttgttttcactttcactggaacaactaggcacagactgtcccactcttaaggcacactgggcctattgctgcctctcctcaccattcccttagcctctgtgatagcccacggacaagctaagctaacctaagccataggagatttttctc

SEQ ID NO: 71893 - DNA, 1002 bp, Homo sapiens
gatgttccttcctttcgttcacaaccagagaggaaagcgcccatccctaaccctgagctcaggggaaaagggtgggcttggaaacagaggcagaagcaaagctgcttggcttacagtaccattaggaaatggccccaggagtcagggtttccttctgagactctgagtcactgaagggatgtgttgaggtggaaggcgggaccccctccttcctcagacagacccaggcaaactaacaaacaaggcaaaatggaggcagccagtcctcctccttcatcttgactaacccaatggcagtggcccagggctttggggaatttcgatgggataggaaccaaagctactgccagaagcctgtttagttaggatgtccactgccccaggcaggtggtccccaggaccaaggctacagtaccttatcctttagaagcaggggagctgtgtgaagcactatgggaagtatacctctgactgcagcctcgggccacaaccctccagctgcctgactcaataccctagcactgagacccaagtcacagcgaaaacaacaggctacaattctcaaacgactaaatgctggcctggagtaatcattaaagagccaaaacccaggacatgagcccaagagctacctattttgtcacataaggagcagttcaaatatacagagctcttaaaaaacatatctaataaagcaaactcaaaattaaacacattctagaaaagcgggcctggcctgagatcctatattgactgctccagcccaagctgaagctaatcctgctgtctcccatccacaaaattccttctagcttggctgggtcctccttcattgttgccctaactgggaaatggatgacaatggccagaaaggaggggaccagggaagcttcatttcctatagaaattttttcagggaattcaagatcgacacttagatgctaaggttagcttcagagctgccaaggctctggctgactggaattctttcagtcccatcac

SEQ ID NO: 71894 - DNA, 1332 bp, Homo sapiens
atcccaaggctgtaggtcaatgtcttctatttaaataacaaaattatttttagtggtttatctttgcagcctgtcagaaatttttatattcattgaaataactttctgataagtgtcaacttttgtagcctcattcttttaggttggtgctagcgcttcaacttggttaactgcagacctagtctgaatagaatagaccatgtcagaggcccagttcccagcttgtgtttcaggtttcacccttaggatatggcataagctctcaaactattaaaaaaggctaatagcttagtgttgaagaacaggccttgagtcagatggacctggattcaaatccctgttccctcctcttactgtttgagggactttggacatgttacctgacttctctgaacttgagcttcctgatctgtaaaatagagacagtaacacctcgaagggttgttgtaaggagtctggactatggcaagtgtcctgctatatagcaagtgcgcagtaaacactggccattcttcttgttggtgtggttactgggattggttgccattgtgctgttgggactggtgatagaactcttggattgagaatgtcgagatggtgcactgaagattctgtgtgctctttcagaccaggaggaggatgaggaggagggaggtggagacgtggacatcagcgcaggacgttttgtccgctatcagttcacaccggcatttctccgcctccggacagtcggggctacgtgagtaccattactacctgaggggagaacattctgtttgttcacagagaagagtgttttcggttgggttttgggttggctttagaggagggaggaggcaaagtcgggcttacagagatttattttccagggtggagttcacagtgggagacaaacctgtttcaaacttccggatgatcgaacggcactatttccgggaacacttgctgaaaaactttgactttgattttggcttctgcatccccagcagtaggaacacttgtgaacatatctatgagtttccccagctttcggaggatgtcagtatgtatcccctgacccttacagcactctagattctgagggctacaaggaacaaaccttgaaacccatctggtccagcgccctggcattgtctcgtggcagtgctgacatgatgcgtatctagtcatttgacctcaggcttctcatttcctattgctcctggctcctgttctaaactctgactcggcccgtatgggagcaatgaagggtttgtttgtttttgtttttgtttttttcccctgagacagagtcttgctctgtctgttgcccaggctggagtgcagcagcgc

SEQ ID NO: 71895 - DNA, 1048 bp, Homo sapiens
tctttctttcgcactccgaggagcggaatactattcgcctccacttgttatagaaacggaggctcactgacgtttaaaacccttgcctaaggtcacagagctgaggtcttattactgttggtattatactgaggactgaaggatgtagtgtatggaaatgtctagtgagtgtactaagcattcagttagtatggggttttcagtggccgccatggacattttgggctgacagttctttgttgtgggggctgtcctctgccttgttggatgttcagcagggatcccggacccctatccactgggtaccaatagtattcccctgctctagttgtgacaactagaactggctccagacattgccagatgtcccttggagggcaaaatcctccctggtgagttagtgggtcactaggattcttggagacctcctgcctcctccttccactcacttctgcccttgccggcagctctctgtcctagggcctggcggcagttacacaccatctaccagtctgtggaactgcccgagacacaccagatgttgctccagacatgccgggactttgccgagaaggagttgtttcccattgcagcccaggtggataaggaacatctcttcccagcggctcaggtgagagtgcaacctcagcagcccacgatagtggtctgccctctgctactggatgaatggtggcagtgacagtcagcggcactcggactctggtagaggaaccccaaagcagggcctggaacccagaaaatgctctggaagtttcccttgtccagcctgtggccagtagccaggacttaacttctgggacaacagtaatatgtggtggatggtcagttgcttactgtgccagccactgtgctcattctaaatagtgcctttagggtgtttggcatgcactaggcactgttcttgagatgggttatctcatctgttcctcacaacggtcctgtgaggtgaaggtactattcttatttatttttttgagacggagtttcactcttgtggctcaggctggagtgcaatggtgcgacctcg

SEQ ID NO: 71896 - DNA, 1049 bp, Homo sapiens
agtctcaccctgtcgcccagacttgagtgcagtggcgcaatctctgctcactgcaacctccgccttccaggttcaagcgattcttctgcctcagcctcccaaatagctgggattacaggcgcctgccaccatgcccagctaatttttgtgtttttagtagagacggggtttcaccatgttggccaggctggtctcgagctcccaaccttgtgatccacctgcctcggcctcccaaagtgctgggattacaggcatgaaggataacgttatttctacccatcactggcacttgcccttaatccgagtcattttggagcccccctctctgtctctgggcctgcttaattagctatatgcatcctcgagggctgagaaggaaggaagggagagtccgcaagtggatttttagtcttcacccaatgcagaggcagttttgagttctgtggacagcagaagcttcagttctttgatgtatctatgactgggccagagctgcagatgaccaggtctggggacagacagagtcttcccatcagtcttccagaacagggaggagatggctgggagctctgtttggtaccaacaaccaaagtgaagattatgtgacaaaggctacaaaggagtcatttattaaaaacaaaaccccagaaacccctcagcaggaattgatgacaacaacagaggaatccaacaccctgactgcttcagactctgttgacaacaggatgggtgccccctgtgagctcgatccacagtgacttcaagccacagtgacacagcacactaattcattacacaggtcaagacagaggcagccactggggcggggacccttggggagaggctggaactcagggcccttctccagcctttgttgtcaggcatcctcatgccaaccgcaggcttctctttgcctctgaacaatgggcaccttcttaccaggcaggggctgcttaggtaaaggtcagcagacctaacactagttactcccagaaatctgggcttgcagcagagaccacagcacagggccaggctctcaggacacagca

SEQ ID NO: 71897 - DNA, 2282 bp, Homo sapiens
gctcacgcctgtaacccccgcaccttgggaggctgaggcaggcgggttaagagttcaggaccagcctggccaatatggtgaaaccctgtctctactaaaaacacaaaaatgaactgggcatggtggtgagtgcctgtaatcccagctactcaggaagctgaggcaagagaatcgcttgaacccaggagtcggaggttgcagtgagctgagatctcgccactgcactcactccagcctaggtgacagagtgagaacccatctcaaaaaaaaaaaatatcagaaaggggccaagcgcagcagctcatgcctgtaatcctagcactttggaaggtcgaggcaggagaattgcccgagcccaggagtttgagaccagcctggccaatatataggaagacttcatacctggaaaaaaaattttttttttttaaagaatcagacagctgtgtgtgcctcatgtttaaatctgtaacttagaaagtcccttgtttcccagggcgacctccggcggatgtggtctgagcctttccactccaagtccagcagctcccgattcctggaagtatgatggatcacgtggaaagtgaccagatggccgtcatagtccttttctctcaactcatggtttgtttcctcttagagctggcctggtactcagaaatgtacctgtgtttaaggaactgccgtgtgactggatttggcatttaaagggagctcgtttgcaggagagaggtgctggagccctgtttggttccttctcttcctgcggatgtagaggtggggccccttccaagagggacaggcctctccccagcgcgccttcctcccacgtttttatggatctgcaccagactgttaccttctgggggagatggagatttgactgtttaaaaactgaaaacagcgaggagtctttctagaacttttgaacactaaaaggatgaaaaaaattagcaaaccgaagtttcttcaatgacccctcgagaactttgggaccagtttcctataggggactcagtttcagagaactgagacagaagctcttctgtcgttatattcttctttcctttttttggatttattaaatattttctgtggtgtgaagtgacttattaaatccacagacattgagtgacttcttacaacatccacataagaatttgttgtaatgagttcatgtccacccagatgttgtgttggcagtgaacaagggcacggtttttatacatacgtacatatatatatataaacacacacatagatatatatgaataaacaaaaatgaaatcctgctaagatcacgctgtgtagctgacaggggcttgctgtcgttttgagcatgtcgagcagtttactgtggcttccttgtatatggataagctgctgtccttccccttcacaactgaccccgcagttacaaactagtatagcatttgtgctgattgatgatagactcatggacttcaggagcccttacttggttttgatcagtgtagcaaattagggatgaagagttcaaaccttttggccctttctttcttttctaggcttctccctcgcagggtgttccgtagtttcttctcgagccaatgcatgtattatagcagcaggtgtctttgtgctttctcatcatagtaacgtactacttgtaaatacatttttctattttctatttttttgtatttttttttttgacattttgtttcattggtgtgctgtatattttccatgccctcactcctttaagaaaaaaaaaaaggaaaaaagcaacacaatcctgtccttgctgttgtgattatagtcttggtttacctgtggtgacaaccgggtgttggggacacatgtcaaatgcccctctgagatgggccctaaattccagtaactggggaaagaaccagctgctgtgtcctgagagcctggccctgtgctgtggtctctgctgcaagcccagatttctgggagtaactagtgttaggtctgctgacctttacctaagcagcccctgcctggtaagaaggtgcccattgttcagaggcaaagagaagcctgcggttggcatgaggatgcctgacaacaaaggctggagaagggccctgagttccagcctctccccaagggtccccgccccagtggctgcctctgtcttgacctgtgtaatgaattagtgtgctgtgtcactgtggcttgaagtcactgtggatcgagctcacagggggcacccatcctgttgtcaacagagtctgaagcagtcagggtgttggattcctctgttgttgtcatcaatt

SEQ ID NO: 71898 - DNA, 1052 bp, Homo sapiens
cagcgagactccatctccaaaaagaaaaacaaaattctaggaagatattgaacagtggtaatctctgaaaagtgggaatgtaatttttttattttgctttactgtattctctagttttctataacgcagttaatgaattgctgggatgatgcctccagtgaatgaaagggggtgctatctagggtgtgagttcactttaaagcagggagcaaggacaacacatccacaacattggagggaaggcaggaaaagagagcttggaggtcttggactggtttcctgggtctccaacagccgagcactatgtctaggaggaggaaagcaatcaccccaaattccacaagtccaaacaggctgaagaagcgggtgttttgcaccagttgcatgtaagtttctgaagctggagcttagggctgcctgatttttgagggaattgcaaactctgtgaagggccatagcttgtggaaagaggatgagcctggagtccacactgactgctgtctgctgtaccctgtctcctccccagcactggccatgggcctctgtgtcgccatgatcgcctttgtccgcctgccgagcctcaaggtctcctgcctgcttctctcagggcttctcatctatgatgtcttttgggtaagcgtttatgtccttggagctcctccccttctttgtgttgaagtgaagcattcatgcctgaaaactattaactagaagtatccaaagtcgggcttgcccagctgctgatcactctctctccagtccttaactgtatcatgggtgtgcagtccgatccttttgtttgctgaaaagtcgtacagtaggtagtgtgtgtgtgtgactcctaggatagaagaggtaacaggctgacaagattcgctgcagtgggggccaccccgtcagggagtaatctctgggtgtggagagtgcagaaattggcaagtacacaggaagagcaaagattttctcaaatcatacagtcaacgaaagcattgcagtcacagcattctgagactctgctcttaagagcaaggagggctgatgctgaaagcagg

SEQ ID NO: 71899 - DNA, 1927 bp, Homo sapiens
atggatagctaatcaaagtgattggactgtcagctctttgatgtgttttcaagctaagtattgatggaaatgtaaaaaaaaatcggcaaaatgctacaagacttgttaggaggtcatcccctggcctgctgtttatcttttaggaaacttacctatgctttcccctacttcaaatcaggtacttttttttaataatgaagagattttttgtgcagtattaaaggaagacatttttcttctctagtcaattaaccgtatccacttgtctagtgtttggcggaatgaagtttctataagtcatgccatttttcttataattgttttaaaaaattataccttttctttctctagttcttgcaacgatagcttttgcttttcttctcctcccgatgtgccagtatttaacaagaccctgctcacctcagaacaagtaaggacttgggactttcctcttaaattataaacttgtatatatttttctgtcatatttgatagcattattaggattctcaatttctgttattggctggagcacagaaatgccaaaagaccaggaagtgacacatttgatctttaaagccagaagctagtacttccttttgtaccttctcatgtcagaggaaatacaaacaaaacttaggaagtctgagtcattgtaatgtgcttcctacttagatcattgaaagatgagcagttttcttttgaaacggtgctttcattcctttactgtgagttgatgaaatatgagaatagtggttgaactcaaacgttcttctttgcctttggtcttcggtggcctagatatgctacctacttgcgtttaatcctagtgttcacaccttaactctgaaagtcattgctgcacggaaacaaaattctgtgctaatggagatgctgaacgcacttaggaaaccagtcattggtggcagctgatgctcgcaggaattagtgataaccaaaagatttacaatcttctaaatagagtgataccatctttggtaaatgagttgaattgttggcatttcttcattttgttttcctcataagaatagaatttcctccatacttattagcttttccagaggttaatattatcacttcaaacttctaaatgcccatgttgataattggtcccaaaaagacattatcagttggtgcagaagtatattcctgtgagctttccataggtttctccaaaaaaggattgggtattttggatttccagctatcttggtattatctgctattctaatccagccatcacgaaataccaaaggagaatttggttactgaataaagtgtgcccactgtccaataagtgttgtgtgttttccaggatttcctttggttgctgtggacgtttcactgctgctgagttgctgtcattctctctgtctgtcatgctcgtcctcatctgggttctcactggccattggcttctcatggatggtgagtgactaatttgtgacaaattgtaattttactttatagagttttatagatactttaggatattcacagagctgtacaaccatcactacaataaacttttagagcattttcacacccacccccgccaaaacaaatgagcggtcattccccttacccacctccccagccccaggtatccactagtctctactttctgtttctatggatttctccattctggacattttccataaatggaatcatacattatgtggccttttgtgtctgacttgtttcacttagcatgttttcaaggttcatctgtgttgtaacctgtatcagcacttcctttttatggctgaatactgttccattgtatggatacactaattttatttattcgtttaccggttgtttccactttttaggctattatgaatgatgcttctttgaatattaatgtacaagtttttgtgcagactatgcttttttatat

SEQ ID NO: 71900 - DNA, 1031 bp, Homo sapiens
cctagaacagttccagatatagaagacactcaaattttttttgttgttgaatcacagctgacagggtatagggaaatgagtgctctcatacactgctgagagagtgaactgatgcagcctttttgcgaacagttgtgtggtatgtaaaagtctcaaaatgtgcttgccctttgacatttctccttctaggcttttatcataaggaagtaattaaggatatgatatgctcagagataggagtggaagattcagctgcattgggatgctttcatctgcagtcaggaaaactcttgaactgacacattggaaggactgaagattgttttttaaaatgttacaagagctatttttcagagttgttcaaaagagaccttctttcctaattccttggcatttaaaaatattgtcatatgacttttctgaccttcttttgtaagcaaaactacaacttaactacaaaatttttttccacaggtcccttaatatggactttgaaaatcaagataaggagaaagacagtaatagttcttctgggtctttcaatggcaacagcaccaataatagtaagatattttatgtcaattaacttctgtacatatagttttcttaatttggctgtttctatacctccagttaataatttactgggttcaaggatttatgattggtataaaaaaacattgaattatacttaaaatgagtgaattttacggtatgtaattgtacctcaataacgttaataaaaatgtttgatgcttatagaaagatttgaatttgaagtgacttgatttgataatattaatacatttatattgagatctgccatgtactcaacattctgttagatcttttgaaagatgcaaaagtacaagagaaatttttgccaagatgttctttaaaaagtgccaagatatccaggcgcagtgtctcccacctgtaattccagcactttgggaggccaaggtaggcagatcacttgaggttgggagttcaagatcagcttgaccaacatggagaaaccctatctacta

SEQ ID NO: 71901 - DNA, 1035 bp, Homo sapiens
ataatatgctataatttagatggattttttttctgtgatggtaaatggttgtctgtgatgaaaaagccatagctcaagtccttctgttgatcatttaaacattgatttctttttcttgttttgttttttgtttttttgttttgagactgagtttcattcttttgcccagggtggagtgaagtggtgtgatctcagttcactgcaacctccacctcccgggttcaagcagttttcttacctcagccccctgagtagctgggattacaggtgtgcgccaccaggcccagctagcttttgtatttttagtagagacggggtttcaccatgttgtccaggctggtctcgaacttctaacctcaggtgatccaccagcctcagcctcctgaagtgctaggattacaagcatgaaccaccgcacctgacctaaacattgatttcagtacctagacttgcaaatagccaggatacaatttggatggaatgtatatttataacgttatattaacatcatattatgttactgtatagcaataacaagattgtgaaggcaggtcaagatggaagagaatgaagagtagtcttctgtgaagatgcagcgaactgttctaggtccaacctagcaatctgatgtctatgcacttaataaattaccaaataagctaagttaaaggcctataattgaaaatagtcctggatagctttggaggcagagtcttttgcaaaggctttatttaaacagcttaagtttgctgtcagctgtgcagtgtgagtaactttaccggaccccagtcatagtggcatgggatctgctaagcccaggccctttaagcttgttgtataaagctggaagatatgaatcttcccagcttgagctaataggtaaggccctactaactcactgtgccccatttctgttttgtgcagcggtgacccatggtctgcttctaacaaccaaacaaggcttgattttagctaagcttgtttgaggcagtgagaagttcaaagtcttctaattacacagagaactagaagaat

SEQ ID NO: 71902 - DNA, 1973 bp, Homo sapiens
ggttttttttggtgtttttttttttgagacggagtctcactctgttgcccaggctggagtgcagtagcatgatgtcagctcactgcaagctccacctcctgggtccacgccattcttctgtctcggcctcctgaatagctgggactacaggcgcccgccaccacgcctggctaattttttgtatttttagtagagatggggtttcaccgtgttagccaggatggtctctatctcctgaccttgtgatccaccggccttggcctgccaaagtgctgggattacaggcgtgagccactgcgcccagccaaaagtgttaatcactgagatgtctactgagaactccagattcataaccactctcagaagcattaatcaaaccagaggaacttagaaccttatcagtgtaatcttgatattttgcatctctaccctgtggacaagtattttatttttttccctttgagtatataatgcattaatatttcaaaggactttgcaattaaacacagaagaagccatctttagactcaaccctaatactactttcagtagtgcagactaccttccatttggcatatgtttgtatactgtatacattttcatagttgaaatcatttatattctgattctttgcaccagacaaatactttctacaaattatcttcatatcattttagtaatttgacatttcgttgtgttactcatcttattccactcttgttggacaagtggactgttacagtgatgatagctttatggagtatttgcttttattgaattatatcaccaagataaatatccagaagtggaaatacttcgacagagagtatgaaatggctcttactacatattactgtattgtttttctgaagggctatatcattttaggattgagcaagttttaaaccaaattttatgtaataagtgtatcatagaattatatagatggaaaggatttctctggtgaacctccctgtttacaaatgaggaaactggccaggcatggtccctctcacctgtaatcccagcactttgggaggctgaagcaggcagatgccctgagcccaggagttcaagaccaggctggacaacatggtgaaaccccatctaccaaatatgcaaaaattagctgggcatggcggcgctacctgggaggctgggaggaatgtttgagcccaggaggcggaggttgcagtgagcagtgatcataccattgcactccagcctgggtatcagagtgagaccctggttcaagaaaacaaaaaacaaaaaaaaaaaaaaaagaaaagaaactaagaaactgaagcccaaaatgaaaatgttgatgtaacttgacaaagattatgcaaccacttggtaacaaagtctggattgaaacagttttcaggacctccagctcagaaccttttatcttttataatttaataaggcatttctgcaaaaagtaaatcatgatgcctttaattatacatttaaattgaactcactgaataagttggtgttttttcctcttctgttttatggaagagatttatgtaattttgtctttaaatgtttgataggattcaccagtgaagccacctacagttgggcttctctttgtgggaagatatttttggtttttgtttttttcctgctgagtttaccacctttcccttgttctttttctttctctttttttctttttttttttttgagtcggagtttcgctcttgttgcccaggctggagtgcagtggcgcaatctctgctcaccacaacctccgcctcccaggctcaagcgattctcctgcctcagcctcccgagtagttgggattacaggcatatgccaccatgcccggctgatttttgtatttttagtagagatggtgtttctgcatgttggtcaggctggtctcgaactcctgacctcgtgatctgcccgcctcggcctcccaaagtgctgggattacaggcatgagccaccgagccca

SEQ ID NO: 71903 - DNA, 1504 bp, Homo sapiens
gctgaatggaaattaaacaacaacaacaacaaaaagcctgctaagatttgttttaggaaaatccctgacaaataagaatgggcaatgtggagggtgaactcatggagacagcctttaaaacaatatttccaatagccgagccatagaagggagctaacaaattggcagtgggattaggagaaatagggtagttcgggatgtggaagtaagagaaagaaagggctgtcaagaatgcagcagatttttagctttggcagctgaggggatggtgacaccattccttgagaggatcagctaagatggagagagtatttgtggtggacttgttgactttgaagaacctcctgtaggccatctagatggagaaaatcaataggcagttagaaaaatggaaacggggaattcaggagatgcaggctttacctcatcaccgagcaaaaccagtaaaatactattagagattgaaatgtaactggataaaagtctgattattgagacttttgccattggcacagatctggtagatattttgatactttttaaattgggggtggatgttgtaaacatatacagagatgggatttttacattgatgtcattttacatgccgtaaatatttactaataatagctgtaaacctaccaatttattcttcatgttaaactagcaaatctcattttaattgtgttattttgttaatgctaatttataccttttttccttcttaaagataaaaacaaagctcagtggggtttatagaactccattagactgtaagctccattaggactcactgcatgtgatttaaatttttttcctcttatttctctagggcctattccctggtggattccagtcaagtgtctacatttctgatttccattcttcttatagtctatggtagtttcaggtaagatattctcaaatggggttgatacaagttggaggtggaagaaggaagcattgctctgaaagtgctggtaccaaaacttactctgtgaagaaaaacaggacttcggcaggatttgactcagaatagagagttctgctatttgttctttaattggctgctgttaaacacttcttcattgtgcttatgagtttagcatgttaatgcttacatgtaaaaactaattgcttaaaatgctggttctgaaattaatcacctaatgcactctttattaagaaggttaaggagagagtctttgacaatgattctagagtctcaaagggaacaaagagtttaaatggaaggacaatttgaaatatgaaaaaaaaactactaaatatccatgtaataaaatgacaaagagaacatttcattttttttttctaaccaaaaatgaaagtgtagtcacaaaactttagtaggcttacgaagaccagggaaaccaaagtaaaactgtacccaggatgctaataaagttcttaatctttggccgggcacagtgccatatgcctataatcccagcactttgggaggctgagacaggaggattgcttg

SEQ ID NO: 71904 - DNA, 1071 bp, Homo sapiens
agttttatgagcacatatcctgagagggtatttagatatccagtagcatttttcttatgaaatagtaatttcaaccagcatgttaacatagatttttgcaagtttttaaggagatttattttgtacaagttctaaagcagtcttggatcatgatacaaagataccttcaaaagctgtattataattttttttttctgtaaataagtcccttggccaaataaaaatgcaaaactgctttatccagcttgtacctattggctttgtccgaggaaaccagttgcctaatttctttcccttgccttatgtttgctgcagccagcccagggctgtttccggctgcagtgttgaacacaggaaccacagtgtgttgctggttgtgtgcgcaagtcacaatcaaaagcgcatgctttggaaactatgatgtgaggacctgtcttagaggataattcataggaaaaagttgaagcatattgccatcgaagcctttaatgtggggtcttctttctgtttcaatccctctccccgcccccggcaataaatcctttcttatctatcctaggcaataagatgtatttgaaaacaaaattactccagatcatctttactgccttgaagactaatacctttctttcatatgaatttgctcagtcagcagattttgtatctctgatggaagtaatcattttttcattgtattagtcttggtaaaatataaaatattaacatatagtatatttcatatatgtctttccatgaaatattttgtgataatgcagggataatattttgatatttttgtggaggtgggatctccatatgtttttcaggttggtcttgaactactaggctcaagcaatcctcctgcctcagcctcccagagtgttgggattacaggcgtgagccactgcgcccagccttaagtaactattttatttactacttgtaccttgcacgtaaatggttaaatttaatgtattaaatttttatttcataacatacctattctgttattaagcttgcaatacatatttggttttttcctttaaaatatggggaaatgtggaaaacaat

SEQ ID NO: 71905 - DNA, 1308 bp, Homo sapiens
ttattcagatacccctggttacttgcactcgtatatgcacgtatgcacacacacatgtgcatgttaaggcgtgtacagttttaccacctgcctgtgtttctgtatgcaccaccacagtcaggatagtgaatggaactaacactgaaagtatcccttgggttgcccttttgtaagcatatcccacaccttcccggtgctaaccctccattctcactccggtccctaactcctggcagccactaatctgtttgccattttaaagttttgtccttccagaaatgctatatttgctcatgattcttcagatctgcatttgggcaggggctcagttgggatggttttgtctttgtcccgtgtggtgtctgccggactctaccagcactgaaggatcaggatggtctcattcacatgcatagagccttggtactggctttttgttgaggtgtctaagtgctcctccccacaacctttctcatgtagttgtcttctgctaggcttctttctctgtgtggcctctttccaacaggagagcctggacttccttgcatgccagcttcaggtgccaagaaagcaaaagtggagcctgctagatctcttttcaatctaggcctaaaactggcacagcctgctttctgtagccgtcttttggttggagaaagttgcaaggatagcccagattcaaggggaggggaaatagactccccttcttggtgggaagagtagcagatatatgcagagatgagaggcattcttggtggccagctttacagacaatgtggtgcacactccaaagttacagaaatgatggcacatgggtctgcttggatttgttgtaaatgctaccttacttcaattttgaaatgtgaactcatttgaatttcataaaaagtacaaaggagaatgtgatatggttacatagttttctgttgctaatgcccatttcagatagaacagttctgttgcaagggaagttgccagaatttaagttaccaaccaaatctaaggattctcaaggggcctgtggtatttgcagaacaagtggttgcttgaagtggctgttaagatgttaggaatggttcacctctctctcattttcccaggctagctgtttcttgtgatcctaaaatagcaggggcttgtatatgtagtgccagaattctgtaataccgacttggagagaccacacagatttctgtctttacattaagctttttacatgaaggcataaggatattgtttttcaagatactatcaacatagaagagatcttttaagagggagaagagtttttcaatcaaggaaatgaaa

SEQ ID NO: 71906 - DNA, 2244 bp, Homo sapiens
ttttaaggcatttttgtccttactattttcttacacattaggtataatgagctatggtaaaagagcagtaatttaaagcatctgtgagaaatctaacctttccttttgtaaccttttggatttaattgtgatttttgagaaatggaacaatcagtagtagttatgaaaattgtcaatttggcttatgttaaatatatagattaatttataagtccatcgaaaatatgcagatgactaaaataatacagcaattctaaaataatacttgttagatagactagcactttctggggtgtggcgggggcaagtaagttaaagtaaatccttgccattctgttaatgataccactattctcagtcattagattggacaagaaatagcagttttggtattccacccttcttgggctccctgccatgttcaagcactttaacttgaggtcttaattctgtgattgtgagaataactctagacccatggtgtccctgtagtcctcagtgcgatcttatggctgtggtttggcctttcttctgactccttgagatatatcctgatcctgtacattagaaagtggctgttggagaacaacactgcaaatacaactttgcttatagttgtatttagttgcttatagagcaaccttgagattctgtcagggcagtgctagtgaatttcctctccctttaatagattcggctgctgagttcatcagaagctggtaagtagtgcaggtcagaatctgctcttacttgtgcacatgcaccaccaccaccttatctcacaccagtgtgatgaacaagactagattttgttttaagttttacataatgccttacttccctttttctgtcaccagacattcagccacttataaaaatcactctctccccaaacttgtgattatctcctttctctcggtagttaaaatgagcacggttcagattcaatgtggcattttgaaagccaggggacacacccagggtgattatggtactcaggtacaggagaacagaaagacagttctctgctatggaatattaattataaatattagctccctttttactagattcaaaggcagttcagtggttactttaaaccaaggccaggtgtggtggctcacacctgtaatcctagcactttcggaagccaaggtgggagggtcacttgagctcaggagtttcaaaccgtcctgggcaagagagtgagacctgcctctacttaaaaaaataaaaaataaggccagacttggtgactcacgcctgtaatcccagcacctcgggaggccaaggcaggcagattgctttgagctcaggagttctagaccagcctgggcaacatgttgaaaccttgtctctacaaaggatacaaaaattagccaggtgtggtggcacacacctgtggtcccagctacttgggaggctgaggctggagaattgcttgaacccaggaggcagaggttgcagtaagccaagatcacaccactgcactccagcctgggtgacagagtgagaccctgtcttaaaaaataaataaataaataaataaaaataaactgaattcatgtttccaccttccccaaagagacgctaaattcttctttttccctctctaattagtgttgaaattgatgttacatctccctttcttctggtttattttgtttgaatttattttttctcttttccttacgtttggttttatgcataatgaagtttgaggctattggtgcaggtattcagtaacataaaacttcatttatctgggtttataagtcagaatcctatttcacttctccctgagcctgaggggaaatcttagaaaagtctattgagatttagttataataaacatactacttaattactgcacaagcttaaccacagagtttgctgtcacaatataaacacccagatgagggcctgaaagaaacctccacactcccacccacatgaactctgttgggtgttttcttcctgccctctatctggcaaacaaaaatatggaatctgttccaagaatttctgtgaaaccagtttagaactttataaatggctcaactaaatgctcaaaacatgactacttctattccattttgccagctttccacaagccatttttttttattttaaaaaagtgatttttcttgagagctttgttattcttaaaaaattttatctaatttgttgcaagtttttaaaactccaattttgagacttctctttccactcttaaatagcata

SEQ ID NO: 71907 - DNA, 1282 bp, Homo sapiens
ttagtagagacggggtttcaccgtgttagccaggatggtctcgatctcctgaccttgtgatgcacccgccttggtctcccaaagtgctgggattacaggcgtgagccaccgcgcctggcctctaattttgggttgtatcgtattttaatagcctttgtgttttttattgttggaatataaaatctaccctctacaatctgactttcaaaacaatctggtcttataaccctgcttccctatatttcctttaaatattacgtgttacttcagccacactgggttacttctgtttcctcttttatgtacggtgactcttctgcctcgtttgcccttcttccaagtctctaaacatgttgactcctacccatttttcaaggtctgactgcaatgttttccccttgctgtggagccttctttctgattggcgcaggagaaatgttcttctgatgtctacagctctttatctgttcctgtcatgtgggcagcactcaggattttctgaccttgtattgaatgtatttaatatgaccatcttcccgttttgacaatgcactttgtaagggtaggttcaaagccattaatttcatggtgcaaggacctacagatagtaggtgctcagattttctttgtaaaagaatgaatattttaggggtgaaatttgttagatgctggattttagaatagaatgtctccctaaaaatatggtgacaaggcacatggaagagaggagagaacatcttactgctctttgaaggaagtacagaaataaaatggttactgttaagttggttcaagtgttatgtccaaatttgcctaactttctaatatcctgacaacacctagagaaagaaagggactcagctaagggagacatttacaaagggccacaagccctttagagcgctcttcttcattcagcttagtcttcttgaacatgaccactgactcacttataaaagtataagtaaaatacaagtttatttatactttatatttcccaaacagccatttattaaatatgtggcatatattacttgtttcctaaagtggagacactcagctgcttttttttttttttttttttagaatttgcaaaacagtcttagggaaaaaaatttcagtaacatgctcatgtgaaaatattttgcaggaaacatctcgagatatgagtataagctgtatgtaaactagcttttgaacaatgtaatatttctctctcactactatttcaggaattcatagtctttgtattacgcttttgtttaaaaagctaaaaaaattt

SEQ ID NO: 71908 - DNA, 1607 bp, Homo sapiens
tgtgtgactgctgtcatggcagttcgccataagtataatttgatttttaaaattctataatctatttttgatgtttctagagtttaatggttccttcttaggaattaaaatactgattgtatgtgatgtatgtataaattaagaagtgtttgcaactttcactttcttttttttttttgaaacggagtctcaccctgtcacccagtctagagtgtagtggtgcgatctcagctcactgctacctccacctcccaggttcaagcaattctcttgcctcagcctcccaagtatctgggattacaggtgcacaccaccatgcccggctaatttgttttctgtatctttagtagagacaggatttcaccatgttggtcaggctggtctcaaactcctgaccttgtgatccacctgcctcagcctcctaaaatgttgggattacaggcatgaggcaccatgcctggccaactttcactttctatcatgtattttcttatccttacttaaagagttagaggcagaatacttgtcttctggaattttaacgtctgaggtgctcagaggggctctaaatgatcaaattcagttttacagggaaaaatctagttagtcccaatgatcctctcaatgaattgttacccctcagattttattaataagtcaaactagggccacagcttgaaatgaaacagctccacctcattgttgtggaacgactaggttgagctcctaagaaaaagtttttgtaggtatctttaaggtattagactaaggagtatgccttagcctaatagagaccttatggaaaatcccatttcttggtttgtagggtattccctaacctggtaggaaaacttagttatctctcttttggagttccagcatggatagtgaagaaccaccaaaggatttttttttttaagtgctctgaagtggagatgtatcctagttgtttctacatattttgaattgtatcgaatataagtgattattcaaaaagtattcagttgtgttatgccactcattaaattttcatttgaaatcttgagatatgagcacctcattctgttacggtttcttcgaatcaggaaatctttagcgtgagggtggttttcatctctagttgactgtgacctagccatgtcttagtcctagtgttgtatttggtacaatagttatgcctgttgtactccacagggtcgttgtgaggatttagtgagataatgcacataaaaatgcttcatgcattgcaaagtgctccgtgaaagcacgctgtttgttctgtacattatttgttagagccagataggttccagatagagttcctcactatagaaatgacttctcttgtttcacaatttagccagcgcttaaactttgagatgtcctttatattgaggatgccacataatgctatataaaaagaaataatagtctccaaattgtcactgatttctaagtttcatagtccatggctacattccacaagaagaaagatgatgaataaagctatgtttcttttttttttttttgagatggagtttcgctcttgtcacccaggctggagtacagtggcgcgatcttggctcactgcaacctctacctcctgg

SEQ ID NO: 71909 - DNA, 1016 bp, Homo sapiens
ccaaagtgctgggattacaggcgtgagccaccacacccggcaattgatctctcttttttttttttttttccttgagacagggtctcactttatcatgcaggctggagtgcagtggcaagatcacagcagtgcctccagggcttaagcgatcctcccacctcagcctcctgagtagctggaactacaggtgtgccccaccacgcccggctgattattgcattttttgtattgtgtttcgccatgttgccggtgctggtcttgaactcagcccaagtgatctgcctgctttggcctcccgaagtgctgggattataggcgtgagcaacagtgcctggtcctgctgtttttttttttaaacagatttgcactttgtttgtatgtgacctttggaaaaaccaaactgtggagactgttgtgccactaaagatttgtctgaggatggactcggtgaagaatataaaggcatatgcagatgggctcccttaggattttcgtataataagatgtaaattattggcaatgagttgatcattactggagctgggtgatgagtacatggaggtttattattctgttgacttttacatgtttaaatttttcagaataaaaagttttttcaacaaggccctttatatgtaagttcacgtgtgcttgctctcttcctagcaaattctatcaaaatcctgtactcaagggttcaactcaaattctgcttagctgtgaagcattttctgaccaccccatatgaaaatgatcttttttttttttttttttttttgagacagggtcttgctctgtcgcccaagagtgcaatggcatgatctccgctcacagcaacctccgcctcctgggttcaagcgattcttgtgcctcagcctcccgagtagctgggattacaggcgtgtaccaccatgcccggctaatttttttgtatttttagtagagatgggatttcaccatgttagccaggatggtcttgatctcctgacctcaggtgatcctcccgcctcagcctc

SEQ ID NO: 71910 - DNA, 1045 bp, Homo sapiens
tgagtcttcacataagagaaagggagttggggattgaagatgataattcttaagagaacttcattgatgtatgtgcaatctcaagaagaaggtaactgagagacaaagtaaccctaaaggaagaattaaaatcttggtgaacacgtgctctaaaaagaggtttaagctaatttcatagttttgcgtgacagctgcctttcagtagcaggtcgtagggaacacaagattacaatttcagcttccttctggacagagtaagaaatgaaggtaaaggtgtttctgtcatgccttgtggttactcatcttgagcttctcatactctggccctaatggctgtggccctgagagtcctaatggctgctttgctgtttttactgtgctgtacagaggccctggatggttgaaagaatagaaaactcagtggtcaagaaatggggaaaatgaaaatgttttactaggtaggttggacacacacgacctctctctgacattagttggctctattaaggagggattactttgtgaagtttgacaatttacaaatttattctactaaaatacttccttcaatgtcagctctgtttgctttacaggcaaagaaactccttgaaatcggggagcttagcccctcaacctttggcaggttttgagatgaagaaaatttttacattatctggagagagggtggcatataaggggagactggggaaagtgggcagtttcctttttttttttttttttttttaggacggagtctcgctctgtcacccaggctgcagtgcagtggcgccatctcggctcactgcagcctccgcttcccgggtgcaagcaattcttatgcctcagcctcccgagtagctgggactacagccacatgccaccatgcccggcttttttttgtatttttagtagagatggggtttcaccatgttggccaggctggtctcaaactcctgacccagtgatctgcccacctcggcttcccaaagtgctgggattgcaggcatgaaccaccgtgcccggccacagcttcctatttaatagt

SEQ ID NO: 71911 - DNA, 1153 bp, Homo sapiens
cggatgtcatctggctatgggcggagcaggtgatggagaaggggagcatgaccccgggggtgggaatcccacggatgggaagttgaatccgacaggcaccccggaactgactcgtgggggtgtttcctgggcaggaggactcgaaggggtggagagaggcaggccagggcaaaggtgggccgctgggctgagaggaagctctagtgagaacaggtgatagaggcagaacttctaagttgggagagtggagcggccgccgcttggctctgggacagggagcgcagggagagttggtgaggtgggcagaggcccgggagtgaggggaggaaaactgcgggggtagagtccacgaaccttggaggggagtcactggtgaagaggttggaagaggagcctgaagaacctgtttccttttccttctggaaaaggaattcgttggtgacagtggggcatgggcagagtctttgtaagggttggtactattattttcagaggaatggcgcccagggccaagtgtggaggtggaggacctgcaagttaagttcatttctgtggggcttttaaagttagtaagtagctcgttaagggccgagaagcgagaagctactgtgtagtttatggggtgacaacctacatatccggagaagggagtgccagggtttgggggaaggaacatgaggggtctccctttagcatgtagaggtgggatatttgcaggacgggttgaaggaatgatggcagtatccatgaagagtggaaatcgggtagtgagaaggaagtcatagctggagagtgaggaagcaagaaatggcatgatcgtaggagtgggggacctgattgcaatttagagaaatggtttgaagatggtttactcttgaagcaaatgtggtttgggacagaactgtagacattcccttcttagaaaagagcataatagaatgggacgagcatgccgtgtggagttggaagacctatttcggaggtccggtttgccaccaacttgctttgttgatacgacatggtagtgagttcttcggtcctttttccttacctataaaatagagggaattaccttttccacagcctgtaaggattaagtgagtacatttagaaagcacttggcaaactgtgaagtgccacagatcttactaca

SEQ ID NO: 71912 - DNA, 1006 bp, Homo sapiens
tttattacctattctgcgccaggcactctgtgggacgggagtagacttggtcctgaacatccaaagatgaatgaaatgggtccctgctttctttttctttttttagatagagttttgctcttattgcccaggctggagttcagtggtgcgacctcagctcactgtgacctcctcctcccaggttcaagcaattctcctgcctcagcctccggaatagctgggatcacaggtgcccaccaccatgcctggctaattttttgtagttttagtagagacgggggtttcaccatgttggccaggctggtctcgaactcctgacctcaggtgatccacccacctcagcctcccaaagtgctgggattacaggcgtgagccaccatacccggcctgggtccctgctttctcagagcccatggttaagtgggaaagtgggagaaaagctcattatgatccagcgagtcatgtattagaatgggacaacagcagccacaacaacaacaataatggccactatttatcatgcatttttggggtgcctggtccagtgcagagtattacacaaagcatttcagggtgctgagctgactgtcgactggggagtaacctgttcttcctcaggaaggcagaggtatcaggaagcctcacattgcaaatatgacctttagaatatgacctttagactaggtcttaaagtgggagttgaattttgacccatggagacgcagggaagggtgtttcaggcagaaggaacagcatcagtaaaggctcagaggcaaggtctacggtcaggaaatcctccactgcaaactcaggaagctctgggagccctattactcagggaatggtgggttttcttctccaggcctcataccccaccaaatcccaagggcactgtcaccttccaacctccatctatgtgtgacattttttgacatttcttttattaattatccaggttaatttttttttattatttttttatttttttgagacagagtctcactct

SEQ ID NO: 71913 - DNA, 1014 bp, Homo sapiens
gatggaatagagtatggagtggatggagtagagttgaatgtagtagatggagtggagtggatggagccaggtatggagtggatggagtggagttgaatgtagtggatgggatgaagttggatggaatggatggagtggaatgaatggagtggagttgaatgtagtagatgggatgaagttggatggaatggatggaggggagtggatggagtagagttgaatgtagtagatggagtacagtggatggagtggagttgaatgtactggatgggatgaagttggagggaatggatggagtggagtggatggagtggagttgaatgtagtagatgggatgaagttggatgcaatggatggagtggagtggatggagtagagttgaatgtagtagatgggatgaagttggatggaatggatggagtggagtggatggatggggtagagttgaaggtagtagatggagtagagtggatggagtggagttgaatgtagtggatgggatgaagttggacggagtggagtggatggagtggagttgagtggagtgaatggagtagagtggatggagtggagtcgaaggtagtggatggagtggatggaatggggttaattgtggtggatggagtgaatagagtggaaaggagtagagtgaatggaatgagatagagtggaatggatgaatgaacagagtgaagtagagtgataaggagtggcatgaatggaatggaaccaaactgaagtgcaaagaggtttaggtgactgctgtcactgggacagtcctccccaaccctcccaccttcccacgtgtcccttgtccccacataccacttaccgtggaccttactgggggagagggcaggtggaggcaggccaggggagctgtgagcgggcagcgcaggtcccgggcctggccctggggggggcccgctgtacgtgtccatggccagcttgtgccggaaggcttcttctttgcgccggttggcaaaccagttgtagacacgcacctccgtgacg

SEQ ID NO: 71914 - DNA, 1817 bp, Homo sapiens
tccgcctcccaggttcaagcgattctgcctcagcctcccaagtagctgggactacaggcacgtgcctccacgcctggctaatttttgtacttttagtagagacggggtttcaccgtgttggccaggctggtcttgaactcctgacctcaagtgatctgcccacctcggccttccaaagtgctgggattacaggcatgagccaccacgcctggccccagattacctttctaaaatctgaatagattttagaaattcatatggccctaagagtttcagagaaacacaggcatgcacacaaatgcatgcacaaccgatacacacccagacacgcactagggatctgctcacacaagcagtcgtgcacacacacagatacgtgcattcacatgggaacacactggcctgcagacaccctcaatcacggaaacacacttgtcccagagacacatgcagactgcaatgcctgccaggcacccctttcccctgcatccattgacagccaacctctatcatcatctcctgctgtgtggggcacagggcgctcaccgtgggggctctgcagctgagccatggtggccatgaaggggctctgggtcacatggctctgcacaggtggcatgagcggctgctggtaggaggggtgcagcggctgggagaactggacgggctgcagggtggtcaggctgctgcccatgctgttgatgaccggcacactctgtgcctgcgtggaggccaggcctggagtggaaggggagggaatcagctgggccccccagttatatcccacccctgcccaagacctcccaagggcaccacctctccttcccagagcccgtggtttggaggagggggcagggtggtcaggaaacagccctccactgggacctgccactaatttaagtggctctggcaagtcattccccctctctgagcctttagctctttgtctaggctagtgggagaggcaggcggtgacttgttcaaaagttgtcaaactgcggttccctggagccctggggttccacagcagtgcaaaggccatggggtcagttctctgctcccctctcctagcagctccttatctatcttatgtactgggcttctgcataattgtacctgcaaataagggctttctgggcttaatttttcttcataaaacaaaaacttagaaaacatcagtcccccttaccctgctgtaatttgcccatagacccttcaccttctgaggtaccacagaattgatgtattatgcttagtgcctgcctccctgcttgagttgctgagattttggtctgtttggttcacccaggtatcactgatgtagcacagtgactggtccagagtaggcactggataaatacatgttgtatgaatgaatgaatgagtcccagtggctcttccagctcctggattctgcggttgccccatgagcctcccacccaggtgcccacccatccccaccagcttaccgatgaccagggtggaggcacctgtgttggtgaacgtaggacccagggaggcaggctcaccaggcccgatggtcatgaccccaggaagtgaggccatgatgaggttctggggctgctggttgaggcctggggatgtctgctccaagctgtgcagtgctgtcagggtgctgacaggggggagggggcccccagctgctgagacctacgaggggaagccaagctgtgtccggggggccggggtccccacagggcctccctagggactgctccagaatctccctgccaaggaaagatgaggttgggttttccttacaagcaaggacactcaccagcttggcttctgtactc

SEQ ID NO: 71915 - DNA, 2192 bp, Homo sapiens
gcctcccaggttcacgccattctcctgcctcagcctcccgagtagctgggactacaggcgcccgccaccatgcccggctaattttttgtatttttagtagagatggggtttcaccgtgttagccagaatggtctcgatctcctggcctcatgatctgcctgccttggcctcccaaagtgctaggattacaggcgtgagccaccatgcctggcctcatcttgttttactatgtctttaaaacttcttcaacacttactggaataaagtgggctttaaagaaatgaagcactgcagttcgcgtggcagaggctggtcagcatgttataaccagaccatcagccctcttactaggccagcacgctttcgcttttgcatttacaatcacataccccatcccctccacttgaaaaagaattttgtttttgtcgttatccaaaaatctcatcttaaatcaaccgtctcgtctccctgtagcttcattaccatctcagaagcagcaaaggagccagcaaaagctaaggtacagaaagtcgctttggaggatgatggtgagtggttatacttaatagaagctatcatttattaagcacctaatgtgtgtctggaggtgggcgaaacagttttggtatattcttttttttttttctttttttgagataggaactctctctgccacctaggctggagtgcagtggagcaattatagctcaatgcagcctcaacctcccggacccaagcagtcctcccacctcagcttcctgagtagctgggaccacagacacacaccaccacccctggctaattatttatgttttttagagacaggatctcgctatgttgcccaggctggtcttgaactcctggcctcaagccatctgcccaccttagccttccaaagttctgggactacaggcgtgcaccaccacacctggctaatttttgtatttttttttagagacagggttctgtcatgttgcccaggctggtcttaaactcctggcctcaagctatcctcccgcctcagactaccaaagtactggggttacaggcatgggccacctcaccattctttcatctgctcagcccctgtggtgaggcaggtattatgattgaaccccatgtacagacaaggagactgaggccctgagaaacgaagtcatttgcctgaggcggcctcgtctgtgtcaccctgagcaggagcactttactgctgccctccacagcctcgcccatctgcgtctgtcctgtaccaacacatttgccactttgaaggctgccttaggtcaggagctcaagtgctgacttccagaagcctctgagggcttgctgagctgatgtggctgctggctcctgctccagcgcgccctccactggctccatcaggcatcagcatgacccttggcagatgcagaatcactttgtagttagacgactgattcctgggtctttgcctctggaccaggagctcctgagggcagaggcggggcagcttcagcacctggcacctgggaggaggggctggcatctgggggtgctgactctgctcctttgttttttttgtttgtttgcttggttgggtttttttgttattgtttcttttttaaatttttttattttgtgtcttcttaaaattttttttttgtttctctttatcttttctttctttcgttttcctttttaaaatttttttcttttttgtttctttattttttatttttttatgtttctttttgttttgttttgtttttgtttgactctgccccattgaatcttaggtttccgccttttcttcacatctgtccctggaggccgtgagaaggaagagtctccccaaccccgccgaaagcgacagccctccagctccaggtgagaactcacacctctcctcacgtcccctccttttttctcctcttctgtcttggtgggttccctggaatagccaagcagactccagtcaggaccaggccaaggcagtggccctgtcaggcagctggagaaatcatgagctcagcgggagggaaagccctcttggcggcagctttggatgtttactgcttttgagcacctgtcttgggccagacacctcacttgatcatagttgcctcctgggacatccctgggaggcctggactctgttaagatccccgttttagagatgatacagtcagagaggttaagtcacttaaggaggt

SEQ ID NO: 71916 - DNA, 1036 bp, Homo sapiens
tgcacagtgtctttgacaccgcagactacaccttccctttgcaggtgagcacctcgtagcattctcccaggctcgtcgctggtcaccgtcgccagggcctagctcccttcccctaggatctacagcctcactccagaaaaaacgctggtcctattttaaaagctctgtgaacatcccaactgagaaaacctaaaaattgcaaaactgggtgagatccaggagatgattctttgctttatcaagtcctacagggtttctcaaaatagcctcatgtcctggtgcattgaaaacaggatttgattcactcgcgcttgatttacccgcagctttttagacgcacagccaccaagccagcaaggtctgccgagattcagaaggacagagaactttctaccaaagagcaccagcccttctagattgtgtagcatttcatcaacaaaaatgactccaggagaccattcttgggtacatttttccacaaagaaaggatgtaaatgacaaaaagaagaaaggcatcggtcactgagagaaggcgtgtgacttctagatttgcaagcagggaaaatgaaagcagaattgccaaaaaagagaaattaaagtagggttgaggagtccaaaaaacagataagggggcgagagggacaaaggggcacgtttgcggcttggggagctaaaatgctttgcaaagacccatgaagcccaagctgctgtttgtttctaacagtgggtcattaaaatcctgtgattgctcaggtggtgggatgccctagtgccctttcattaaagtctgggaaaatctgaacagtgttgtgatgaaggctgctcccctaccctcgcctccccaggtctcctgagtttcaatttaatgagatttttactgcgtaaaaaaaaaacaaaaacaaaaacaaaaacatgaaaaggctgcttttgagactgcattggtaaatgactcttcaacccattcaaacgctccttcactctccctcagctcagcagggctgctcgtccagctttgatattaagcccttggcatatt

SEQ ID NO: 71917 - DNA, 1016 bp, Homo sapiens
ggcatttgcctcctctctgcccatcaacacccctctatctcgggttgtctcggtaaatatgaccaagttccagttacacaccaacatgaatagatatttgctccatttatctgtggctgcaaaacaaactaccctgatcatggtgggcttaacacaagcattttattaactctcacagttcagtggttgactgagttcagctggttggttcttctgctggtctcactagggatctctcaaggagctgcagtcagatggcagctggggttggcatcccttggagcctcaattggcacccagggatagctagacatctcttcctctctgggaacccctaagagttaccctctcttcaaggtctgtccgcattgtctctccagcagggtagtcaaactttctaatagtggctcaggttcctcaaaacaaaacaaaaaaatagaagcttccaggccttcttaaggcttaggcctggaactggcaacagcattccttctgctgcttctattggctttgcagtcacagcacaggctcagcttcagaaagtaggggaaacactccacctctcaatggagaaagtgaccaagaatttgtggccatctttaatccatgcaacaatcacaaaagagaagattaaaacaaaactaatgtgctgttttttaaaaaaaaaattagaattccttttggagagcaaaataaaactgatttctcttctttcctgagattcatctccagttgataatgaaaatgtaactttccatgagccacaatgaatgatcacacattcattccttccatgactatcaagacctactatttgccaggcacttgggctgcaaagatatgaccttggctctgtattcaaagggttcataatctaatctggggagtcacaaggggaggagaccaacggcatgccatgtgacaaggcagcctgggaaataaagagatcatgagagagtttgaaaactacaagaaacattcattgagcatgtactatgtgctaaaccctttctttt

SEQ ID NO: 71918 - DNA, 1100 bp, Homo sapiens
tgtgtatgaatgtaccacattttatttgtccattcatccgtcagtggccacttgcgtggtttccacttttttggcgattctgagtagtgctgctataagcattcgtgtgcacattctggtggatatcgaatcacttctccacgtcttagtaacacacgtcacttactccccactctgtcatccttctatctgcagtatcccacccgcaggacgctctgttcctctgaccgaggttgtaaaaagggatggatggacccgcagagcaaaggtaccttctgtttcttttcccgagaccctaggggtggatggtctggcatcttggtgacatttgtgatgcccaggtcaggtcttcagcctctgctctcagctgccctcttccaccatcaccaagccataggcgagtctgcccatgcttcggctctgtccccagcagaccagctgctgactgtaaacatgactccagttttccagtgagagaagaagctcctaaaaacctagcaggttcaggattctaatcggtagaaaattcacatggcctatagcatcatctgagtattctaaactttccccctgaatttcctcaaaggttgaggaccatgaacttttacccccagggaacctggcagcaatacccatattaacctgcagaattttttttgttttttattttattttattttttaaacattttttgcactgttttattttgattttgattttgattttatttatatctaagtgcagtgctattgcgatacctgcagaatttctttatctcacattttaacttaaaaaggcacagggcagcgagcgcagaggctggtgcctgtaatcccagcactttgggagggtgaggcagatggatgcttgaggtcaggggttcgagaacagcctggaaaacatggtgaaaccccgtctctactaaaaatacaaaaatcagccagacatggtggcacacgcttataatcccagctacttgggaggctgagacgtgagaatcacttgaacctggaaggcagaggttgcagtgagccaagatcatgccactgcactccagcatgggtgacagagcgagacccctttaaaaaaaaaaaaaaagg

SEQ ID NO: 71919 - DNA, 1034 bp, Homo sapiens
ccaatgccgggatggggggtgcgctcagcagcatcaccccttatgattctcaatcgctaatagctccactcaggttcatttctcggtcaggggcatttctttgtcacagaaggaatcacccagctctgggagatacagcagcctccactcaggtagtccttgttcaagacaagcggcccttgactgactgcagtttcagttccagctctgctatcaactcactcattaaataaactgcatctccagtgtgcctgcctctgggctggattttgacgtgacctgggcaagcaactccctgaacttcagtttctcatatattatatgaattagctaagatggttcgtttaatcattcattcaacacatccatcaccacgtagtaggtgttagatatttatttcatacgtaactacgcataagagactttgctaagttttaggtaaaatacaagtcccagatacggagcaagtctcaaccactgtacatacctgaatgtgtaattacatcactgtgagaggtgccacagtaaatgccactgggtcttgtgttagtccattctcacacaaagaactacctagccaggtgcggtggctcacgcctgtaatcccaacactttggcaggctgaggcaggcggatcacttgaggtcaggagttcgataccagcctggcaaacatggtgaaaccccatctctactaaaaaatgcataaattagccaggtgtggtggcacacgcctgtaatcccggctactcgggaggctgaggcaggagagtcgcttgaacccgggaggtggaggttgcagtgacccaagatcgcgccactgcactccagcctgggtgacagagtgagactccatctcagaaaaaaataaaaataaaaataaagaactacctgagaccaaatactttacgaaaaaaaagaggtttaattgactcacagctccacaggcttaacaggaagcctcaggagacttacaatcatggcagaaggcgaaggggaagcaaacacatcttaccatgatggagcaggaggcgg

SEQ ID NO: 71920 - DNA, 1050 bp, Homo sapiens
gtggcttcaagagtccttactgaagccaggcaccgtggctcacgtctgtaatcccagcgctttgggaggccgaggcaggcagatcacctgaggtcgggagttggagacccgcctggctaacaaggcgaaatcctgtctgtactaaaaatacaaaaatcagccagacatggtggcatgcacctgcaatcccagctactcgggaggctgaggcacaagaatcacttgaacccgggaggcagaggttgtagtgagcccagattgtgccactgctctccagcctgggaggcacagcaaactgtcccccaaaaaaaaaaaagagtccttaccaatagcaggggctgcagtagccatgttaacatgacatttaccagcaacttgaacttcacctgcaaagctctgtggccacattttcagccaaagggaaatatgctttcatcttctgttgctctctgtgtctgagagcaaagtgacctggttaaacaaaccagaatccctctacatggactcagagaaaagagattgagatgtaagtctcaactctgtccccaggaagttgtgtgaccctaggcctctcacctctgtgcctctgtctccttgttgcccaactactatctcagagatattgtgaggacaaattgagacagtgcacatgaactgtcttttaatgtgtaaagatctacatgaatgcaaaacatttcattatgaggtcagactaggataatgtccaactaaaaacaaacccttttcatcctggctggagaatgtggagaactaaaggtggccacaaattctttgacactcaagtcccccaagacctaagggttttatctcctccccttgaatatgggtggctctgattgctttatccaaaagtggaagtgacattgtgtcagtttcagatcctgatcttaagaggctgacagcttctacttgctgtcccttggaactcttgctatcggggaagccagacgccatttaaaagtctgcctatcctggccaggtgtggtggctcacacctgtaatcccagcactttgggagaccaaggcggg

SEQ ID NO: 71921 - DNA, 1048 bp, Homo sapiens
actctgtcagttgcaaataactgacaggaaacagttctcagtgccttaagcacatgtgcacaaacacatacacacatacacatgcgtgcacagcgggggggcagtgtattgtccggctgaccaaaaagatccagcgtggccaggagaatctcgtgccaggctgaggcagaagaatctcttgaacctgggaggaggaggttgctgagctgagatggtgccactgcactccctcctgggcgacagaggccactgcactcctgcctgggcgacagagtgagagacaaaggacaacaccctagtctcccttcctggctctgcatcccgccgtgccagcttcactcgcaggacccacagcatagcccgggaggcagcgctgcacttacagccccccaagtctgagtctccctttccagctgtccctggagattctagacctgtccatcatcgtatcaatggccatatctctcaacccatctctgtggctggggaatgggttttgcttatcagcttgggcctgggtcacatgcccacctctgcagctggggctagagtcagacccacccaagtgacataggcaagcattggggagatatggcttccaaaggacatttggggttctgttaccagaaaagctgggagcagatgctgggaagaaaacaacggatgtttgctacagtgtattttaaactaaactagacaggttcatcctggcgcggtggctcatgctgtaatcctaacactttgggaggctgaggcagtcggatcatctgaggccaggagttcaagaccagcctggccaacatggagaaaccccgtctccactaaaaatacaaaaattagggttagggtggcgcttgtctgtaatcccagctacttgggaggctgaggtaggagaattgcttgaacccgggaagtggaggttgcagtgagctgagatcgctcttctgcactctagcttgggcgacagagagagactctgtctcaaaaaataaaaatttaaaaaaataaataaataaaaatttaaaaatcaactaaactagccaggttc

SEQ ID NO: 71922 - DNA, 1049 bp, Homo sapiens
tgcttttttaaaggctgcagaaaacttcactcttttggttaagaacaacatctggtatcccaaatttaatttcagcaagtaagtggtggccaggtgtgtgagttcaccagggtcttggagaaacttctggctcttctctcttctctgaggttttcgtcgctctgattttctgcttcctctcgactttaggaggaatatccttcccaacatcaccactacttacctcaagtcgtgcatttatgatgctaaaacagatcccttctgccccatattccgtcttggcaaaatagtggagaacgcaggacacagtttccaggacatggccgtggaggtgggtgcgggccctggctctcctgacccagccctggaggcgtctcgtgccaggtgctgaggaaagccttgccgtgtctctgctgctcatccccagggaggcatcatgggcatccaggtcaactgggactgcaacctggacagagccgcctccctctgcttgcccaggtactccttccgccgcctcgatacacgggacgttgagcacaacgtatctcctggctacaatttcaggtgggcgtgagcttgggcccctcgctcatgttgtagggggtgctggtggctgcgtacgtgccagtgggccgcccactgaagaccagcactcaggcagcaccccaagggcaggctgccggtcccccgtccaaggcggcgggaaggccatgctgggaaaatgcccttagtggtgtcctgctccggggccatcccggcccccgagacccctccttgccctttcctgccgcaagaaacatgttgagatggttcttagagcagccaggagaagctgggggcttaagctttccagcacctgcctcagccatgacctccattcactgcctcaaggagcggatgatcttgtgatcctccagtccaaaggcctctggggcctggcccaggaattggtttctcaaaggttgaacctgtgccagaatctccagagtgcaggggacacaggtctgaggcccctgaaaggccttgctgggttccctgctgcaaatgct

SEQ ID NO: 71923 - DNA, 1059 bp, Homo sapiens
aacagagggagactccatctcaaaaaaaaaaaaaaaaaaagtccctgcactgatgctgtgttggggctggcttagtcccctcctgcaatgctggctggtcacattcttactgttagatgttggaggtcagggtcccttgagggaggcaggcaggatgtaccaggtgggatgttgagagcaaactgttcaggttcaggagaggacactggtgctggaggaggaggtctccctgtgcccctgtacctcgtgggccccgcatcctcctgcttgcacagcccgcctcagccaggagaggccccgagccgctccagcgtccattcagccggcagagtggaccattcacctgtgccagctccactctaacgttctctcacagggcccaaggtcctgccccagccatctccccctgatccatcctccttcccctcaggtttgccaagtactacagagacctggctggcaacgagcagcgcacgctcatcaaggcctatggcatccgcttcgacatcattgtgtttgggaaggtagctcgccgccactggctcccctccgtcactccctgcagggacaaggggcctctccctgcccctgcagaaacactttttttctttttcggtgtcttggcaggcagggaaatttgacatcatccccactatgatcaacatcggctctggcctggcactgctaggcatggtgagtggtttaggccctgccttcaccctcacggtgaggtgagaccctgggctggggtcctggtcctggccctaggccctagacctcagatgtgtttctaaacttgaccctcctaccttctttcccttggcccccagccctcctcccaccttcccttctccaagaccacccccctcaggtcccagccttctcccaagagatgggagtgcctttccattccggtaaagattccaggcttctcaggaaggggcacgcaaagaataagatgggttgatgggttgcaagcatcctggctcactctcaccctatgctaaactcaggcgaccgtgctgtgtgacatcatagtcctctactgcatgaagaaaa

SEQ ID NO: 71924 - DNA, 1150 bp, Homo sapiens
gaaacccagcacgtgtgtagagcctcgatcgtcatctctggttatttgttttttcctttgttgttttaaaggggacaaaaaaaaaaaaaggacttgactccatgacgtcgaccgtggccgctggctggctggacaggcgggtgtgaggagttgcagacccaaacccacgtgcattttgggacaattgctttttaaaacgtttttatgccaaaaatccttcattgtgattttcagaaccacgtcagatataccaagtgactgtgtgtggggtttgacaactgtggaaaggcgagcagaaaactccggcggtctgaggccatggaggtggttgctgcatttgagagggagtagggggctagatgtggctcctagtgcaaaccggaaaccatggcaccttccagagccgtggtctcaaggagtcagagcagggctggccctcagtagctgcagggagctttgatgcaacttatttgtaagaaggatttttaaattttttatgggtagaattgtagtcaggaaaacagaaagggcttgaaatttaataagtgctgctggaaggggattttccaagcctggaagggtattcagcagctgtggtggggaaacatttctcctgaaagactgaacgtgtttcttcatgacagctgctcaaagcaggtttctgagatagctgaccgagctctggtaaatctctttgtcaaattacgaaaacttcagggtgaaatcctatgcttccatgtacattacatggcttaagattaaacaaaaacatttttcaagtctctaactagagtgaactctagagcacagtagttcagaaactatttagagcttccaggatatatttcacagcttcaggcatgtgatcagttagagccgatgaaacctatgcccgcctgtatatatattagcagcttagctagttcataacctgtatattctaaagactgctaaggttttgttttcattttaaatcctagctgattgttgtggtcaatgaaatacccagtttctggagggccaggtgggaaatgctttcactggaccaacacacaaatgatcatcctgaggatctgagcttccctagactccacacaataaccttggggcacccttttagagaagactgttgaaacccacagcactcgtt

SEQ ID NO: 71925 - DNA, 1338 bp, Homo sapiens
gatgaaacccacctggtgcactgggacagtcagcaccccaacctgggctcagcccacctccttttgctgacagctaatccacctgaagtttacctttctcgggaacttgcactgtagctggggggctcttggtcagtcagaagaaaagcacttttgtggcccgggaccgtgagtgcctgatggggaggtttgaggctctgtgctgggcgagcagtgtggtctcactcaggaccctgtgtgtccatgcagagaggtgtccactcatctgctgtcaacgccaccctggctccagctctatgaagctggtgtttggggtctgagtgtctcagggtgggggaacgggcatcccgtggatcccaagggtcccttctcacttcccttttccctccctctggtgattccagcaaaaaaccaaccagggaatgtgagtccctgtctgagctcaaggtaacgcccgcctgcctgtgccgtagcctctgctggggcctgaggggggcgggtgggcagctgcagagcacgggggcatccccacccgggcagatgctccttccagcctgggctgctgtggcccggctcaccgcgggcctccagacccagtattagaatgaggggcctcgggggcttggacccaatggtgggtcatgcatgtgggctggggctgcgggtgcatggcgctccagctggaatgcctgagaatgcacccaggtctgaagatcctgtgtggcacccatgtcttctcagtgcacgtcaatggtgttgaagctctgtcacagggcccatgggtgcccccccgagtccgcatggtcagcacataggtcaggcatgctgcactgtgtggctcttcgctaggggctctccagcctccacttctctttctttgatgtgtttagacctagaaaataagtccccttcctgcctgttgcaaagtaacgtaagagttccctcacccgagtggatgcagaccttcttgctgtcagccacccttccttcatacacatagccagcccaggtgaccagaacctcccaggacagatgaggctttgtgtccttatgagactgggagaacctgctgggcacccctgctgcaggtgctgtggtgggtggggaccccactgcccttcccactgagcacatcatggctacctgacttggtgggagctccaggcagtcacttctgtttcttaaacatagctttactgaggtacaattcacataccatgtaattcacccacgggaagtgtatgattcagtggtttctaatacagacttctgcagccattaccaccgtcaactttacgacattttcatcagcccaagaagacaccctacactccttag

SEQ ID NO: 71926 - DNA, 1038 bp, Homo sapiens
gtaggtgacgagcagtgtttgctttggtgtaagtaggtaaactgaggcccagctacagagggagcctgcagtgtgcttgggaaaggctctagcccttcgagagggccattcctggctctgccctgcgtcggccaggccccacacccctgtgtcttggccattctcggggagaatgggaactgcttgccccctagcctgggccgcaattgttgatttctctgctgtatcctatgtggagtggcacagcacaggtggccctcgaagggcagatgtggccgccattgactgccactctgtccctggcctctttgcagtgcccattcatggacgagcggatcatgtgtttacacagtaagatcaagagtcaggccctggaatttccagaccagtgagtatctcccgccgtcccgcatctctcctgtccgagttcttggcggtcccgtgtctgccaccctgacgcctctccatccccaggcccgacatagctgaggacttgaaggacctgatcacccgtatgctggacaagaaccccgagtcgaggatcgtggtgccggaaatcaaggtacccttggctcagcctgtgccccgtgctcggaattgtttggctcagccatgcctcagccagaccccacacccttgtgtccacagcaccacaccctccttggcaccgctgttctcctatgccccagggcctctgagctgctgggggctgttgagggctgggtaggaagatttgggcattgtgtgcactgtgactgtgggagtgggatctatgacccgccagcctgcacttgctctgattggcgtgggctgatgggatccaccctctgcagaccggcatggggcctccgtgctccacaccctattcccagagctcaggtcctttccaaaggcccgtccctttgagaaactgcagtgaggatgggaggaaattaatgagcaattcgacctccccagcctgctgaatcccaccctcttgcagaaagcacttttaggaaagtgtattcccctacacatctccactaatgccacacacat

SEQ ID NO: 71927 - DNA, 1110 bp, Homo sapiens
caacaccacgcctggctaatttttgtatttttagtagagatggggtttcaccatattggccgggcttatctggaactcctaacctcaagtgatctgcctgccttggcctcccaaggtgttgggattacaggtgcgaaccactgcatctggcctgaatttgactattctagatacttcatgtaactgaaatcttacaacacttgtcctttagtatctggcttgcttcacttagcgtatgtcttcacggttcgtctgtgttgtagtgtgagtcagagtttccttcttttttgtggctgtatagtattctgttgtatggctctgccacattttgtttattcattcgtctgttgatggacacttggttataccttttggctattgtgaatgatgttgctatgaacattagtgtacaagtatccgtttgaatccctaccttcaattcttttgggtctatacctaggagaggaattgctggttatatggcaactctacgtttaactttttggggagccaccaggctgcctgattgtagtttgaatttgcagttctcttactgtgaggttgaacatcttgccgcatgattggactctttggcgttctcttaccacacactctgtgtgcatgagtcaggcccgtgtcagggctggggcgttgggttttcccttttgcctttcctgttgggctttccctgccacgtgcctggcgtagtagctatttcatcagttcttctggaaggaccgttccgagagcgctgagggccattttctgcctctcagccagatcctccagggagctctggctttccgctgtctgtaccttcctctcttttaccccactacctcccaatgtcatcggagataccattttattcattcataaaatctctgctgagccctcactgttttcctgggacatctagagagaccccccccccaccccgccctttttttttgagatggagtctccctctgttggcaggctggtgtgcagtggtgcaacctcagctcactgcaacctccgcctcccaggttcaagcaattctcctgcctcagcctctccagtagctaggattataggcatgagccactacacctggcttattgttgtatt

SEQ ID NO: 71928 - DNA, 1010 bp, Homo sapiens
gtttccctcatcctggcccgggtcccgggtccatctgctccaggaaggctctggtggctcgtgatgagctgccctgtgagagggaacagggtagaggcaaggccttgggggatggcctctgcctggatttcatggggaaggatgcagggccagggctgacattttgtcaaatccaagcaactttgcaaaaaagtcctcctctcacgctccgccctctggaatcgaatgcttcactgtccttccctggcagagggcctggtcctgtgagggttacatggccaggcggttatctccgtgctgggtgcctgatgagagctcagttgaatgttagccgttgctgtttccaggctaaactattgtctttttgcatgatttcttctgcacagagtgttggtagctttcatcagatctttgtagggtctgtgacccccaaaccgttcaggacactggcctagactctaggtgtctgtgaggccagaagcccctggatgcatctcttcctgtcagggcctgcgtccctggggctcctctctgctgagctctggggtttcacgcttgccctgccagcgccgacgtccctgcccggggtctgagctgtctctcctctccatcctccaacagaccgcagaggccgagactccgtcagagctgtgagggaggcccgggccagatgccagcttgccaaggaggccgattaaaagcagccttgctgggggcggatggctcagtgcccttggcctggtgtagagttcgataagcaattgttttcctgttggtgagaaaaaaacaaatctccattgactttcccaggcactgctcagcctcattttcttctcaggaactcttgcagccctatcagaggcagctctaggataggggagagactgactgcctgccctgggggacgcaggccacacagccagggctgagggacacacttaagagcaggccagctcgcttggacattggtcctcgtgggaacattccagagcataggctacctaccagag

SEQ ID NO: 71929 - DNA, 1034 bp, Homo sapiens
ccactgcgcccggcctcatatctattcttgagttacccacttgaccagagcaattgatagccagctggccaggcttgagtcacatgcaaatctctgaagctgatggtggggtcagccctgtagggccacctctcatatggagggatggcttcccagacataaattgggctgctgttatcagactaaagaaacttcaactctaggccagctaaagaaagcttctgaccttctgagtggccttgggacagaagaaataaacaacaacttctagtcagtatttactgagtgcgagcagtgtcctagaaagttctaggcccgggaattcagctgtaaacaaggaggccaaagccacagctctcatgagttagtcatgtccatgtccctgtgcccaaatcctgtgcatttctcctccaagcactttgagaccctgtgctttcgctctcatctctctcaaacacaggtcgaggtcccagcaaggcagaggaatgggctgcctgcccaaatcccttgttagagattttggtccagcctggactttattcaggacgcaatatgtggacatggcagggctatgcctgtaattgttggccccttcctgaaaaactcagcccggccgggtgcggtgactcatgcctgtaatcccagcactttgggaggccaaggcaggtggatcacttgaagtcagaagttcgagaccagcctgggcaacatggtgaaaccctgtctccaccaaaaaacacaaaaattagctgggcatggtggcgtgcctgtaatccccagctacttgggaagctgaagcaggagaattgcttaaacctgggaggcagaggttgcgctgagccgagatcacaccactgcattctagcctgggcaacagagcgagactccatctcaaaaataagtaaataaataaaaataaaaataaacaagaacaacaaaactcagcccaattgtcgccctgcctagaaccactgcgtgactttgggcaaatcagtaaatccttctgaaccttcattttcctcattggtggaatg

SEQ ID NO: 71930 - DNA, 1069 bp, Homo sapiens
tcccaactttggctccttgtactggcaaattatgctcgttttctgatggagtggagtccaccttccctggcaggttatgggatggaaagcatttccgaatagttttgggctctgagaaataagatttagaattattatttgttttcttccctgattggacccctttctcaacaaaaccaagataataataataaaaaagacatctttaaaatgatgtgagttctgttagattttgtagggaagacccctggctgctgctttccccgttggggacgttagtgatccaaatgggaaagggattattttagctgccagtgtttcggtttcagtcatgtttgtagtattgccactgaagtttttttttttcaattatgaaacattttaagcatagagaaaagccaaagttttgctttgtttttttaaactggctcgctttttggaaagctggaaggaggcccaggaggtgacggaaacggggcagagtggggcgccctggctctgcaggctcgacccttcacccagcccgctcttttggttggggtggggtggggggattggtgctggtgacaggctataccctggggaactgagaaatactgggacttggttcctgtcccaggtgagtggtctcagagccttttggaaaagatgaacaattctgacatcctttcccttttgaaaaggaatgaaagaaaatgagaagattctgtagtgcccccacccccaccccaccccatcctgaaagctgctgagcaactatttttatgttgcctctttttatcctggtggcttctgtaaatagttgagagatggcagttgcagagataaaaatgctaatcccaacctggaaaagagagggatggtggtcctcggaggaaaggggggtgggagtcagtggggaggccaaggtgttgcccctctgcccacgtggcttaggcatgaggcaggaacccagcgggtggggtaggagcattgtgggtggtgcctgagagaagcttctgttagagaagtttaaatggggaaccagtgttttgcgggggccagggtgcagaagggagagcacactccc

SEQ ID NO: 71931 - DNA, 1010 bp, Homo sapiens
gtgctactgcactccagcctgggcaacacagagagaccctgtctcaaaacaaacaaacaaacaaacaaacaaacaaacaaaaaaaacaaagaaaaaaaaatgggagtgggccgggcgcggtgactcacacctgtaatcccagcactttcggaggccaaggcgggtggatcacgaggtcaggaattcaagattagcctggacaacatggtgaaaccccatctctacgaaaaatacaaaaattagccaagtatggtggccggcgcctgtaatcccagctactcgggagactgaggcagagaactgcttgaacctgggaggcagaggttgcagtgatccgagatcgcgtcactgcactccagcgtgggcgacagagcgagactccgtttcagaaaagaaaaaaaaaaaaaaaaaaaagggagtcggggtggagctctcattggctcgttgcatgtgagtgtccctacggcctagaaatacaagagaagcacatcggaacgggctggaaatccacccagttaactagagggctttgaaccttttattaacttggaggttgactctcctgtcaactcgattcccttttggctgtttggcagggtcagtgagacatcccctgggtcgctcgaccccgtaggacggttcagggagccctccaggtcttcgtttctcctcttccccgcacagtgctgttatccagctgggggatccaacgcacacttaaggctccagcaaagtaagtgccaaaaaggggagaatgggaagaatatgctgtatttcacaaaaagcatctaagtagccatctggaaaagccagaatgaacttcaatggtgcatccaggtgggctggggatgggagaggaacgccttcccccagcctttagggccggccctgagcaagtggtcagtcggcaggcagctgcggaagggggctcccccgagtcggtggtggcccaaagtccaggccgcatccaccgcccggcgcctagcgcaggggcagcagccgggtcgcca

SEQ ID NO: 71932 - DNA, 1030 bp, Homo sapiens
ggaccagaatcaggattcagccccagaagtgatgggctccacagcctaggctctttctcacatcaccaggctgcctttgtattcacctccatactctgaatatttctacttgttcaaagtgttttaaatttggtcctaatatttttgggtggttacactggcttttttttttcctgtttctttttctttctttcttttttttttttttgagaccgagttttgctcttgttggccaggctggagtgcagtggcgtgatcttggttcactgcaacctctgcctcccgggttcaagcgattctcctgcctcagtctccctgcctcagcctaggattacaggcatgcaccaccatgcctggctaattttgtagttttagtagagacggggtttttccatgttggtcaggctggtctagaactcctgacctcaggtgatctgcccgccttggcctcccaaagtgctgggattacaggtgtgagccaccgcgcccggccagtttttttcctcgaagatgtatgctgagacaaatgaaaagcctcctcatctgtgcccccatcacttcttctatgatgttgtttatgtttgggactagtaatctcactgcctgttgaagtgaaacttctcaagatcttctttctgacagcatttttcttttcttttttagagatagtttcactatgttgcccaggctggccttgaaatctgaggctcaagtgatcctcttgcctcagcctcccaagtagctgggactgcatgcgcgtgcctctgagcctgacttgacagcatttttttccttttctttctttctttttttttttttctgagacggagtctcgctctgttgcccaggctggagtgcagtgacacgatctcagctcactgcaacctcctcctcccaggtccaagcgattctcgtgcctcagcttcctgagtagctgggataacaggcacgtgctaacatacctggctaatttttgaattttttagcagagacagggtttcaccatgttggccaggctggtctcggactc

SEQ ID NO: 71933 - DNA, 1040 bp, Homo sapiens
atggggtacccttgataaaccatctctagagaggacatccctgctgggctgctgtgcagagtataagattttggacttgttcatgtcccctctctccctataaatgatgtatttgtgacaccctatcttgtcaataaacagcattctgattagtttgtcttattttgttgctagtaactacgtatttgttttattccccttttcttcccttttggtagcaaaggacaccaactttttcttaataaatgggtattttgctaacaagttagtgcaagcatctcagattatgttctctctgggcaaaattgccaatatcttgattagaaattgtacacactccatcattatgtaaattcatttagcacctattctcagacaagagctcttcctggaattggtagatctctccagggtggtcagtgcaggtctgtatgaggcttggactttcttctgaggcctccctgccttgttggactgaaccagcgcttgtggttcctgtggctgctcacgaggacttgttggtccctgactggagattaagaaggaaaagattttttcataatttttggaccaatgaccaggagcatttttcagtccctttctagatgttggctttcttatatattctgcatgggcactttttttttctatatttaactctataaatgagggatgatgataaattacgtccaggaattcatcatgagtaaggtgattataaattaagggggccggctgcggtggctcacgcctgtaatcccagcagtttgggaggctgaggcgggtggatcatgaggtcaggagatggagaccagcctggccaacatggtgaaaccccatctctactaaaaaaaaaaatacaaaaattagctgggcatagtggtgcatgcctgtaatcccagctactcgggaggctggggcaggagaatcacttgaacccgggaggtggaggttgcagtgagccaagatcgcactactgcactccagcctggcgacagagcaagactctgtctcagaaacataataataaaaataaataa

SEQ ID NO: 71934 - DNA, 1142 bp, Homo sapiens
acaacaaaaacattttttttttttgaggcagagtctcactctgtcgcccaggctggagtgcagtggcacgatctcagctcactgcaatctctgcctcctgggttcaagcgattctcctgcctcagccttctgagtagctgggattacaggtgcccaccactacgcccagctaattttttgtatttttagtagaggcagggtttccccatgttggccaggctggtctcgagctcctaaccttgtgattcgcccgcctcggcctcccaaagtgctgggattacaggtgtgagccaccgcgctcagcctctttcaacaaaaattaaatcaggcacagttttttcccttgggaggtttatagcgcaattgaataaattgagattcttaccctcaaagtgactagttaaaacacttgtgttcattttgattctgtttcaggaaagcggttgtattacaagctcagaaccaaatgtcagaggcacataagcttttacaaaaattgttggttcattgtcagaaactgaagaacacagaaatggtgatcaggtaaggggtctcttgtacatctcacggagatgtggtggtggatcttctcatcctgtgttttcctctttacggtcagtgtcctactgtccgtggcagagctgtactggcgatcttcctcccctaccatcgcgctgcccatgctcctgcaggctctggccctctccaaggagtaccggttacagtacttggcctctgaaacagtgctgaacttggcttttgcgcaggtaagccgatctctgtttttatagcacatatttgtgctcaagagctggtgagtctgtgactacgtttgagtattgaaaggataataatgagttttcatttgttcatattgacgtctggaaaggtagtcttcctgtgcaagccctccaaggaggcctgtggaggtgtgaacctggtgacaaactgacactttccagtggcactggctttcctgagctgtgtattcagtaaggaggactcgcctcttcagtgagaacacctgcatcatattaatgattagctgacacagagtgatgcttgatttagcaacaaggggatgtgaataaagaaatgaggaacacagatgttcattgaaagcttttggaaatcaaattgta

SEQ ID NO: 71935 - DNA, 1032 bp, Homo sapiens
acaggcgttagccaccatgcctggtcttaaaatatttttaaaataaattgtattagcctttaaataatggcccttagaaatttgagtctctggccaggcatggtggctcacgcctgtaattccagcactttgggaggctgaggcgggcagatcacgaggtcaggagatcgagaccatcctggctaacacagtgaaaccccgtctctactaaaaatacaaaaaaattagccggacatggtggcaggcacctgtggtcccagctactcaggaggctgaggcaggagaatggcgtgaacccgggaagcggagcttgcaatgagccgagatcgcgccactgcactccagcagggctacagagcgagactctgtcccaaaaaaaaaaaagaaagaaaagaaatttgagtctctgaccagtatctctcaggttgctgcatcaagaacgggaacaggtgaatctgtcaccatctgtgcatggtacagcaggtgtggattcaacacaggttatgctgatcaaattgtgtgtttctactttagggctgttttgctgcagcttctgaagtgttaaagcacttgaaggaacgatttccgcctaatagtcagcacgcccaggtaatctgccttttgcatggcaatagatttatttctgataaaaatagcttttattataatataaagtgggacataatctcccctcagaaaaataatattgagctaaaaaggaacttgtcaaaggatgcttacaagtatgatattatttatataaagtttaaaaacacaggctcatactctatgttgtttagagacaagggtatatgttgtaaaagtataaaaaacctgaatgagaatgataaataccaaattgagtgcctactttgaaaaaagagaaagagacgtagaatttgcaaaggacttcattggtatctaatagtatatgaagcagataaagcaaaatgtgagttgacaaagttgatgattggcacacatgtatctgctattttattctctgtgctttttcacatacttgagatattt

SEQ ID NO: 71936 - DNA, 1026 bp, Homo sapiens
gaatttgaggtctttttttggcatcaatgaagggaattctaagaggtcagccagtttcatgtaactaaggaaataaataggattctttgacatttaaggtagcagaggtttgtgtgttttaggagagaggagagtataatagaagtatatctgaaatcataataactaatgttggttgtaaatttgttctgtgccagtccctgtgcctattttatgggtactgtctcatagaatccacttcatgggctcaggtttgttgttatccctatttcacagaactaaagactgaggtcctgggagctaaatcctgtatccaacacctgtaaatgtcagaggcaggtctccaaccgaaacctggttgactccaaagaagagcagtgggaatgggacataatcttgatgacttacagctcaagtaatttgacgagattctctttataagggatcaattaaagtatctcttctgctactgtaggctttatcttccctttattcaaaatatcttctttcatgggaaagagtcagggaaaactattttatctaaagccctccatctcagtaaacactgctgtggcaatccagatgtttccttgatcatatttttctcttcctctttgtgatacctgttactgttagattgcatcataacactcaacattccctaattgcagcctaaagatttttgggtggtttccactcctttcagaagtctagacatacttccctatagcaaacatgttagcattttacagtctcttacatggctgtgtaaactgaggggtggatgggccctgactgatgggttccacggcgcctttgccagctggtttcttcccatgtctgggaagcactgcccatgttttctgaggtcgaaagggctagctggttgcttcccctgggaatgttgcaagtctgtctctcgcttgtttcttccctcttcgtggcactggcacctccttaacatcacttctcttcctttcctggtgccttggataagagaagcatctggtaatgaatgagtcggtg

SEQ ID NO: 71937 - DNA, 2563 bp, Homo sapiens
accataggcagtgggattgcttaagcattctgtcttatgaagtttgtgacagacttcagtaaaatggaaagtaattacaggtagtaatttaatgtatacactttaaaatcggcctggcgtggtggctcacacctataatcccagcactttgggaggccaaggcgggtggatcgtgaggtcaggagtttgagaccagcctgaccgttatggtaaaagctcgtctctactaaaaatacaaacattagccgggcgtggtggtgggcgcctgtagtcccagctactctggaggctgaggcagaagaattgcttgaacctgggaggcggagtttgcagtgagccgagattgctgcactgcactccagcctgggcgacagagcaagactccgtctcaaaaacaaccctaaaaccaaaaaacaaatctgtagcttgtccattgattcacacctgggaaagaaactcatacgtacagaattgattataatgacaaaagtggctccttgaagtaagcgcaggcttaactacaatttttgccatgaatttaagctggcattttttagttgagctttcatccttgaagatgacaccaaaagctaatgacaagataattttgttgctcatgataggcatccttttttgatctcctattacatatgtgcgcagcactgtttgacatctattatttcattgtaatccttacgataattctttatgataggtttgatgcccattttacagatgaggaagctgaggcttagctaagaagctaagtgactggccctaagtcacacagtaagtagcagaggcagtgtttaagtccaggtccatctaatgctaaagccctgctggctctttcccgtgtaccctctgcctctctcccagacccagtttttcaggaacacatctcgtatggctcagggttaaggccaggttataggtactttccttttaaatagtgctgtcactgtgcatgtgctgaaatgtgaaatccaccacatttctgaagagcaaaacaaattctgtcatgtaatctctatcttgggtcgtgggtatatctgtccccttagtacctcgcctccctgggaatacagtcccttgttcaacagagagcttttgctgggaagacggcaaacaagctgatggatgccctaaaggactccgacctcctgcactggaaacacagcctgtcagagctcatcgatatcagcatcgcacagaaaacggccatctggaggctgtatggccgcaggtaggtctcccaaggccctgggggtgtgaattctttagagagaagcaggagctagcaagctggttctgtgaaaggccatacatacaagatttacctgccttggatagatgttgttcctgcaggggactatgttttagactataaaacattttgtattttgcacagactgaaaacttttttcccatgcatgttccttcttactcctcccaaccactttgtgaggtaatgggtgggtgatctccatgctgggagagtaaaccagggttcacacatctgatctacccgcgatcgcaaacgcagttaacaagtgacagagaaaggactcaaacccacgtcatctgactccaagcaccgggctcctctgctctgtgacaggaaccttcctgtttataggaggcatgatccatggttgctctagttgagtgtcacctgaaccccaaaactattgtgtaaaagaaagttgcttttctgttaactgaggtgttttctgtggaatattttcatcttattgtgtactttcacatttagccacttttagcctggaagtaaactttgttgccgcattttaatcctggagttctgtcgctacctcacccctcacttagacagtctgtttctaggaattcagtaatgaaaggaagtgccttttttaccagtcttgtttttgtatttcagataattttttggcacggtgtgctctgaaacagctgcagacactggccactgcttacattgccagagcagtctgtgccaggatggcatcgggtctgaattcacccgtgaaaactaattaacatactatgactgcagggaacatggggtgggggcggggggatctgggagcgtgtactcccagctgtgccctaaccactacgtgtctcctcgcgctgcacatccaggatgcttttctgcctttcttatcctgagggcaaggttgctggcactgggaggcatctgctcccaagaaagccagagcctgtgaggtgtatgactttacgcctccactcaagatagctgacgggcatggccaaagcgcagccaggtctgctgctgaaaggaaatcctgttccctctccccacccagcaccatggcactgcaacaggcccagatgttgctgagcatgaacagcctggaggcggtgaatgcgggcgtgcagcagaacaacacagagtcctttgctgtcgcactctgccacctcgcagagctacacgcggagcaggtaggcaggtggccgggcccacgtgcttctggagcaatggaggctctaccatttctttcctctaatgcttgaggaaagcactggacacgtgttggac

SEQ ID NO: 71938 - DNA, 1660 bp, Homo sapiens
aagcccagaaatagttacagcttccaacccagagacctgcatttggatgactgtgtacagatgacttcctgctatggttgcttatgcatgtttgtgattattaatgggatattaatgtttagtctgtcattagtcaacaggcagagctcgccctgcaggaggcaattaggattgcccaggagtccaacgatcacgtgtgtctccagcactgtttggtgaggccatcctctggtcttgggagttttgttcacgggttgaattggccttcacaaggccccgttgaattgggttgttttgcagttggagcagagatcttcagcagcaaaaggaaacaagttaggtggtcatgggaattcagaaagggcaacttatctttacttacctttcttaattcatgacatctgttttgcttttggcatatatctgctctacaaagtttaatgcaacttgccatgaaagaagagaaacctttatcacatttagcactggcattaacaaaagatgtatactacacttagtaactgggtgagatgttgtcctgtaatagcaaaatcaccagggcagtggaacacagaagctacttgacaagcacctgagaatcttatttctcaattgaaggccatatgggagcttcatgctttttttctgaaacacctgccactcagtggctgtcaggtgaagcagaacaatgactcatttatttcagcctggttttaatgatgttgatatgtttgacaggtctcattgagattcttgatatttcttgaaagagtatttgagaggattcattttgtcccttttaaattctttcttatgaccacattgatatttcactagaacatcagccattgccactgttatgatatattttgatgatttctcttgccagagctggctttatgtgctggggcagaagagatccgatagctatgttctgctggagcattctgtgaagaaggcagtacattttgggttaccggtaaggctcatctttctgtgagattgtttccataaatggtcgagcctttgtctctttttctgcccacctctgtcattaaccagcgatagatttagaatgggtttcaaagtgtggttttattcttggcagtttcatatgactttaattattaatcagaccactaaattctgtgtggtaggtttctctctgttccctgtatcctaataacatctgtggaaattccctttaccaatttgataagagatcattgtttagtttattgagcaacattaatttagcacatagtcacttagaaaaattttagcaaaggcttatttttaaaccagggattggtgaactttcccgcccttgggccaaatctggctttctgcctacttaggggcttcaggctgagtggattttacatttttaagtgattgcagaaaaaaaaaatcaacaacagagaagaaatacgtgacagaaaccaagtgtggcctgaaaaatcgaaattatttactctctggccctttacacaacaagtttgctgatccttgttttaaacaataaacaaagccaggaaccagtaaacctgacaggcagatttgtcctttctcgttttgagtgatagggaaggccgtgaattatagtcctcaatgacatacacagaggggcattgaaaaggcttatctggctgggcgtggt

SEQ ID NO: 71939 - DNA, 1055 bp, Homo sapiens
tctactaaaaatacaaaaattagccaggtgtggtggcaggcacctgtagtcccagctactcaggagactgaggcaggagaatcgcttgaacccgggaggtggaggttgcagtgagccgagagcacgccattgcactccagcctgggcaacaagagtgaaactccgtctcaaaaaaaaagaaaaaataaataaagatttgctattttgggagaaaagaaaagggaaaagaaatggaagaaatgaattctcaaatgttaattgtgatgcatttttaaaaaatgtattttttaaaaagaagataggaaagcagctcatcaacctggactagtcagtaacttccatagagggaaccttattggcactggaacagtttatgaaaaccttctgcctaaatagtctgccccctagtgtcactatgtaacattgccgtcttagtgcctagcctctttcattacttctaagaacaacaggccgttcagtgaaaaagaaattaggtcattaggccagagagtccctaaaggattttttggaggtaaaaatggggatgcagaagctatttttagtatttcaaaaagccagaaggcagttgtacctttactggatgaaagactacataggcttactgaaagtcaggtttgctttcaggtagaattcaggctgctcagtcaggtgacactggtttatactgttgcctcagtgtgcctctgtttttaatgaatagaaataggaaaatcgatcaattatgttttagtaaatagaattaagtagataaaacaactttcaaaacatggaggctatcttggaaataatgaaataatgtaaataatggtgaaaggtgggaaattactaattcaaagatcccttcacccccccacctgccctgtggctttttaccagttgagagaagtgtggtctttgctacaggcatccttctatacagactatagcgtgtattaatgggagcatagtgttcacagttcaataatggagacatctatccctttctctgtgtcaggcagcacctagggaattctttttatctctggttgtcaggt

SEQ ID NO: 71940 - DNA, 1042 bp, Homo sapiens
cggcctcccaaagtgctgggattacaggcatgagccatcacgcccagcctaaatgacagttttgaggctgaaaaactcttttcctttctcttcttttgtcagtgtttatttttaaagttctaataattccattccttaatggattttttactcggaaaattttcttaaatagtatttggattttccatctgactttgggtgcagaaatatatctattttgcttcctagtaactgagatctgcctgttagggaagtttcagtgattaaaaaaaaaatgaaaataattaacttagtaaactagtaagtctcagtgtgttttaacttgtacattaataaaacttaattttataatttgtatatgaattcaggttttaggatctttaattctgaacactcagttttcctcaatatttgaactaggtaaggcccagtattctcatctatcactcatgtaaccagtggcatagtggagtatatttgagataaaactgacacaaatactaatggaactcccatttttaatttgtggactccctctagggggaatgtgtcttgaagctgttttattctgcctctagggagaagattaagctaaactatgaccatcttattagaagggtatgggatacactagtgtttgtagacagtggaactctctgcagttgtcttacaccagagatatttacagcgtttaaaatacattgattatttcttgttttagcattatctcagctacttaaacaacctccgtgtccaagatgttttcagttcaacacacagtctcctccattattttgatcgtctgattcttaccggagccgaaagcaaaagtaatggggaagagggctatggccggagcttgagatacgccgctctgaatcttgccgccctgcactgccgcttcggtcactagtaagtttatagacctttgtccttgcgcaaattgaaggaaccgatgacaataaaaagtctgctgtttggcctggtgcggtggctcacgcctatagtcccagcactttgggaggccaaggcgggtggatca

SEQ ID NO: 71941 - DNA, 1079 bp, Homo sapiens
gcaaacacattacctgcctggaaggagcttacagtctggggtggggtcagattggcaattttactatagtttgatagtgccacagggggggtaagtgcagagggcttatgggagcatggaggggcttataggatctcaccttcatctagaaggtgacagaagcaggtggcccagaggatgagctaggcatgggcgtcggtttgctcagctttgggtagtatatggctggggagcgatgggtgggaggcttggtgtttctggaagaggaaacagtgttgtagatggtcaagaggagagcatgtggcagggtccaccttcagtgttacctagagtgagggaaggccagccaaggctggcgagatgaggggccagagcctgaagggacccctgtagaaaagaaaataatcaggtgatgctagttagtatatcttttcatatgtttattgaccctttctttctactgagttaccatttttaaatttcaggcttctttgctaaagaatgatgagactaaggccctcactccagcttccttgcagaaggaattaaacaatttgttgaaatttaatcctgattttgctgaagcggtaagtctttcccagaatttgttgctgtgttggaaaggaatgacaaggcaactttttttgtttgtttgtttttggaaacagagtcttactctgttgccaggctggagtgcagtggcacgaccttggctcactgcaacctccgactccctggttcaagtgattctcctgcctcagcctcccaggtagctgggattacaggcacgtgccaccacgcccagctaatttttgtatttttagtagagatggggtttcaccatgttggccaggatggtcttgatctcctgacctcatgatctgcccgcgtcggcctcccaaagtgttgggattacaggcgtgagccactgcgcctggccaaggctactttttatattgagtagctgtgcaaatgagaatcagcccattggcccaggttcttgaaggaaatcgtgttcttggtaggcaaacaactcggtataggttgcaaagctcctccctccctcctcgggccatagg

SEQ ID NO: 71942 - DNA, 1080 bp, Homo sapiens
tgagctatttctctctctcttcctatgtgccaggctctggacgtgtaagatagacatggaatttcctcttatggagattacctctggttgggggagccagttggtaaaagtaaacacataaatatcatttcagatagtgtaacagccatgaagaaagtaaaatggaagccttcaggtggaggtggggtgggtagattgtgccctgtataagaagaaaccagctttgtaaaggactggggaagaacattccaggaggagggaatggcaactgcaagtgtctctttcttactcttctgaaggaagaattccagcagacagtcattgccattgtggagttgccattgcgtagcctggatgtcagttaatgctttccccttgtctctcgtcttattttgtaggtttgtttctgcgtcacatgatcttggcctacagtaagctttctttcagccaagtgtttaaactgtacactgcccttcagcagtacttccagaatggtgagaaaaagacagtggaggatgctgatatggaactgaccagtagagatgagggtgaaagaaaaatggaaaaagaagaacttgatgtatctgtaaggtaatttggcttttctgacagggatccttttcctgtgaaatagtataatttcaagtgcaataagtccttgttcatttagaattcacgtgctggcttatgccctttttacccttccagatctgggaagttaactgataagggctgcaccagtgggtcccttgccctctgacttgtgattggccaatgggaggcactggcaggaaatcccaagggccagggagaatgacgtggagtgtggattcattggctccctttcttgggggtcctggggggctggctgtagggtcacagcttctgtcaggtcgctctttctgcactccttcagggggttcggtgactaggagcaagtgtttgcaggccccaggtgaaaggtaccccactgttatcagtcctggggactgtattgtgtcttatgacttctctgtcctttcccctacttttgtcaattgatcctttgttaaactcttctcagactactcaatttgaatg

SEQ ID NO: 71943 - DNA, 1095 bp, Homo sapiens
atatcgtctcaaacaacaacaacgacaaccaccaccaccaccaccaacaacaacaaccaacaacaaaaaaaccactttgggagctcctcagtcccttcagccccgaccccaagcatcgacttcccctcccatccggtccctgtccacgtagcctgggaacctgctcccactcggcaaaagtttctgtagggagtcagtcttttggtgcacccctccccgcactcttgtacattctgactggctgtcgctctcccatgtgctctgacagactgctctgattggttaacaaatgccgcgagcacgcggatgtctgtttcctgggatattgtgagggcgggcggagatgtagacccggtagtgttgtgccttgtggtgacaactggcggcagcgcgccgcgggcccgagacttagtctcgggccgccatggccagcgtccacgagagcctctacttcaatcccatgatgaccaatggggttgtgcacgccaatgtgttcggcatcaaggactgggtgacgccgtacaagatcgcggtgctggtgctgctgaacgagatgagccgcacaggcgagggcgccgtcagcctcatggagcggcggaggctcaaccagctgctcctgcccctgctgcaggtgagaggcgcccgctggctcctgctcgtgcagcaaacttttactgagcatctgctctgtgcggaaccctgggcttggggacactcgtgtccatcagatactctccctgcctggaggaacgtgaagaaataaagatagctactaccggtagctaacacgtactgagcgtttacggtgggccaggcgctttacatgcattttttttttttgcaagttcatgtctggctccagtatttattagctgagagttagagtctcagatcctgtatcttctttaaaatggggctatacaatagagcgttggagacacagggataagtcatacaggctccctatcctagaggaccgtaataaacagtaaaaatgccataaaaccgggccgggcgcagtggctcacgcctataatctccgcactttgggagggtaaggcgggtggatcacgaggtcaggagttcgagaccagc

SEQ ID NO: 71944 - DNA, 1687 bp, Homo sapiens
aattttcaaatatgctgcatggggctggcgtggtggctcatgcctgtaatcccagctctttgggaggctgaggcaggcggattacgaggtcaggagttcgagaccagcctggacaacatggtgaaaccccgtctctactaaaaatacaaaaattagccgggtgtggtggtgggtgcctgtaatcccggctacttgggaggctgaagcaggagaattgcttgaacccgggaggcagaggttgcagtgagccgagattgcgccactgcattccatcctgggcaacagagcaagattctgtctcaaaaccaccaaaaaaaaaaaaatgctggatgggaaaaaaaaaaatacttcaaatatactagtgacaggggcttcccctgcttcaaatttctgaactttccagaaggctggagtgttgcaaatgctcctctcagagatgataactataagtggatttgcccttcaatatgatgctaaggttattctctcactgggagatcatgttctcattggaagattttgcccaaatttaagttcagagattctaatgaggctgcaacctaaatttttcaggattgcttctttaccttctattcctgtagtatttggctgacagtagttaatatgtgtctgagttgtactgaatattgggttatagcaacatttttgcctgggacactttggaggttggcttgggcttttttgttgtttgtttttgagacagggtctcactccgtcacccaggctggagtgcggtggcgtaagcatagctcaccatagtctcaacctcccaggctcaagagatccttttgcctcagcctccgagtagctgggagcacaggcacatgccaccacacctggctaattttattttttgtagagatagagtctccctatgttgcccaggctggtcttgacctggcctcaaacaatcctcccaccttggccacctaaagtgctgggattacaggtgtgagccaccattcctggcctgtttttaattttttattttataatgagggctaaattaagtgtttttcttcattttctttctggggaacaaagaggaaattcccttccttgtatagaaacgtgaggaatgggacaaaattgtccccctccaaaattggtatctacacagagaatccatctgttttcccaaaataagtccttctattccctttaccagagctgtgtagttgaaaaaaaaattttcagcctagaattttaatgctcatactcattaacatggtttgaaaaattgtattcttccctaattcattgtaaaactatccctgatacaaaggtcataatctctgacagtgctgcttttaaaaaggggtgtcatttgagatttttggttttctttaccaagaaaacatattttgaactttctaaatagcatgtaaaattttataatgttacattgtctgtgaagagataataggaattttttacacagttacttgtcagtcataccatggtggaaagaggagcaggagaaaaagaagtttttgtccatgaggaactttcactgtagtccaggaggcaacatcagacatgaattagaagggggataaaagctaagagagctgttggtttagtagctacattagtaggaagctaaacttgtaaaactgcacttctgttaaccctggaatgaagagaagtttatcctgggagtact

SEQ ID NO: 71945 - DNA, 1524 bp, Homo sapiens
tctagaaagccttcgttggaattagattgtctaagtacgctgtggtaggactgagatctttcaaatcagatgcccctgatgcttgggctgacccatcagagctttagcttttttctgtctgcatcttacaggctccagttaaactagccatttgcaggtactttgataatgacacagtgctgtcccatatccttaatggctttggcattccattatgggaccttcctgagagagttaatactctggttagattttataactttacacacacacaggaatttgtgttttgagctaactttatggaaggtaggttcttcatgcaattttgtagggcccaactttttggaagggtcagcagcattctgaatccaaagatgtgcattatgctggctttctggtcatcatggggagcatcaatgacaaggttttctctagtgataaatacagattgattcctgacctaatcagatacgttgtataagtgtaggtacaaagtgaaatcacttcagcaaacacagaagatgatgatgacgacgatgatgaggatgatgatgatgaagaagaaaacgcagaggatcgggtgaggccacctataaaatttggtttccctgacatgtcagcctgacaggaagggacagtgccctgtggacattcgctagattagtacaggatgtttcttctggtttgaatgtaggacagtatactgaaacacttctaggactgctgagatggctgggagaatattcagggccagtgatgagtttagagtggggagggtctggacttatgggaccagggctaatggatgctctgtggtttcagaaccccgggctctccaaggagagagtgagagcttcactgtctgacttgtcaagccttgatgatgtggaaggaatgagcgtgcgccagctgaaggaaattctggctcggaattttgtcaactattctggctgttgtgaaaaatgggaactggtagagaaagtaaaccggttatacaaagagaatgaagaaaaccaaaagtcctgtaggtttatcttttcattttttccctgtagtatttttccttaggcttttaaaaactgggttgtttttgtcacaattaagtcaaatttatttttgagaaagctgtgtaccattttactgagtatcagttagttacatgagcctgtttatagatctggaaaggagtaacttcattatgtgatgttcattatggctgcgagaccaccactgccaagtgagttagaaaattattcaatttggtttttcttactataattaactatttgttacaaccctaattaaattcctcgtctctgtaaaaatgcttattttctcactaatgcctttggccggccagtaccttggttctctcaacttttaaatctaacagtagggggaaaattccctatagcccagatgttacatagttcttagcatcaactatctgtagatttctgtgtaagtcacaaaaagctgaggttaagaacttctgaactaggctgggcttggtggctcacaact

SEQ ID NO: 71946 - DNA, 1048 bp, Homo sapiens
agttgatgctaagaactatgtaacatctgggctatagggaattttccccctactgttagatttaaaagttgagagaaccaaggtactggccggccaaaggcattagtgagaaaataagcatttttacagagacgaggaatttaattagggttgtaacaaatagttaattatagtaagaaaaaccaaattgaataattttctaactcacttggcagtggtggtctcgcagccataatgaacatcacataatgaagttactcctttccagatctataaacaggctcatgtaactaactgatactcagtaaaatggtacacagctttctcaaaaataaatttgacttaattgtgacaaaaacaacccagtttttaaaagcctaaggaaaaatactacagggaaaaaatgaaaagataaacctacaggacttttggttttcttcattctctttgtataaccggtttactttctctaccagttcccatttttcacaacagccagaatagttgacaaaattccgagccagaatttccttcagctggcgcacgctcattccttccacatcatcaaggcttgacaagtcagacagtgaagctctcactctctccttggagagcccggggttctgaaaccacagagcatccattagccctggtcccataagtccagaccctccccactctaaactcatcactggccctgaatattctcccagccatctcagcagtcctagaagtgtttcagtatactgtcctacattcaaaccagaagaaacatcctgtactaatctagcgaatgtccacagggcactgtcccttcctgtcaggctgacatgtcagggaaaccaaattttataggtggcctcacccgatcctctgcgttttcttcttcatcatcatcatcctcatcatcgtcgtcatcatcatcttctgtgtttgctgaagtgatttcactttgtacctacacttatacaacgtatctgattaggtcaggaatcaatctgtatttatcactagagaaaaccttgtcattgatgctccccatgatgac

SEQ ID NO: 71947 - DNA, 1045 bp, Homo sapiens
aggatgcacaattattcctaactttcctaagggggaactaaggctccttttcctactgagatgaggctccagagactgtggtgttcccagggctacaaagctggggcaactgagttaaattccaatagcatcctgactccaaagcccatctacagaagaccagctgagggtttctttttctagttacagaagtaatatatccctatcacagatgtcttgaattagacaaagatataaaatagaaatacatagctaacatttgttgggtacgtcaagcattttattctttacaaaaccctgaggtatagcttttatcattgccatttctagtggagagaaccaaagtgcagagaagttgggattatttcttgtacaacactggggtggcattgggcctgcaggggtcattcagcaggtggctgctcagcttcggactgggagggtggctggctgactggccatgcctgaagccgaggccttagctctctgttgcctttcagatggcgagcggctgcagctgcaggatgaggaagacgacagcctgtgtcgcatctgcatggatgccgtcatcgactgtgtcctactggagtgtgggcacatggttacctgcaccaagtgcggcaagcgcatgagtgagtgtcccatctgccggcagtatgtggtgcgagccgtgcacgtgttcaagtcctgaaacaggctcccctcaccaggacagtcacccccaaacttgacccccaacatttcaatgcacagaagggactggaaagttatgttcaaaggctgaagctattttaaaacattattttgactactaagtggggacagaaagatccatcctgagttgtggaaacattggtccatgccgtgagcctgtctgcctgtggacacgtgagcttcccgggctcagctgggctttatcacacatcccgtgaacactcattgaagtcagcctgtttgcgccatgtgggcatcagccactgctgtcttgggaggacacttatcctgttctcttatttccccttcatcctatttttaacttaaactg

SEQ ID NO: 71948 - DNA, 1026 bp, Homo sapiens
ttctacgtcttgactcactgtataaattagatctatgtaagtacaagagctcatgctggagcagaacctcctgagtgcaaaggctgaagtcgaaattttaaaatttgagaaaagtgaattctctacagaggaaacttggcagagtatcttactttgactataatttacatttatccacaacatgctcatgtaactcttgaggtacaaagcagactctcaacttccagttaaacatgcttttaagtggaaggtcttagcctactttgttagatctgggcacatttgtagatgggttgtgtcgatgaagtacacgttaaattctctcctaccttaaggaaatcaggaaaattggcaatctcaaaacaataaaaacactggtatgcattcaaaccttgcataaataacttttaaacaatttgtacaaaaatagttctgcataatgtaagatgtaacaaaaccaaccaaacaaaaaaaagtgtcaagacggcagcagatgtggtgtgtggtccactttatgtcaacacccaaaacctcggtgttgcaaggaatgaagtgtccaaaacaccactaccactaacagaaactcctaagctcatgcttcagtatgagaatttctccgaagtccaccctcctctccgacaggaatgtcttcttgtaaaggccgccttagaaatggtccagaaagcagtgcagttacgattcagaaagaccaaaggaaagtgtcggctcactcatcccccaaacgggtggttgaacagcttctcccttggaaagacttgcaaaatggaattgcgttgtggtctgttgtcccacgttccaaatggaaaataaaagccctcatttttgtaaagtctctcccctcccagagcccgccccgtatttacatacttatccttggactaactcagtttttgcaggagtttttcttctacttgcccaaactggacactcacagacatctcggctatgaactgctcacagccttccttggtgacttgcttgcagtacctcaggtcaatatgacag

SEQ ID NO: 71949 - DNA, 3168 bp, Homo sapiens
gcacacctgtaatcccagctactcgggaggctgaggcaggagaatagcttgaacctgggagacggaggttgtggtgagcagagattgcaccactacacaccagcctgggaacagagcgagactccgtcttaatacatacatacatacttgatggagagtggaggccatggctgttagagcaggtgggaggtgcccgcgtgggggcaggataggtgctacatagagaagggtccagagcgctgagttaaggagcctcccagaggttgttaggtggggacagttaagagctgtgtgtgggctccctagaggagccccacctctgacgatgtgtccccacggggccggtccccaggtgctgcgataagcggttgtggacccgcattgacctgaaccactgcaagtctatcacacccctgatgctgagtggcatcatccggcgacagcccgtctccctcgacctcagctggaccaatatctccaagaagcagctgagctggctcatcaaccggctgcctggtgagccctgggccagtggccccgagtgtgtctgctgcagtgagggctggggacacatcccctgaccttcacccttttctatgtccccccagggctccgggacttggtgctgtcaggctgctcatggatcgcggtctcggccctttgcagctccagttgtccgctgctccggaccctggatgtccagtgggtggagggactaaaggatgcccagatgcgggatctcctgtccccgcccacagacaacaggccaggtgagttgccaggctgggggtttctgtgggggtggggtgagcgagctagactgttggatctgcttttaccctcagaccccagctgttccccaaaggacatagggatgagtctctgctgccatgttctcagtttgcttcaggcacagaggggatctgggaggaggcaggggctcctgtgcacacgtgagactcgctcctggggctccgcgtgcgtctctctgctttcctgttgactcgctcatggggctctgcgtgtgtctcactgctttcttattgactcgctcatggggctctgcgtgcatctcacttcttttctgttgacttgcccctcgttggtttcaagcctccactgccatcgggatcagtgtggttgtgcaaaggcttccaggatggcacctccccctggactgggctggactgcctaggtccgtgcttctcgccaagccatggggatcggagatgctgcgcagcctctgcactggttggctgatgactactgggtggaatgtgggcatagtgtttctaggtcttttagtttttcaagagaatctgaaaatctaagttttgatgtggagtctgatttttcactgttggaattatgattttgggaggaagcagtttataactaaatgaaatctgagtgttctgtctggctggtgggccttttagagtgtcatgtcagcatgaccaggcctcctcggtcagattgacgggttgccccctccttcctgccccaccaggtcagatggacaatcggagcaagctccggaacatcgtggagctgcgcctggcaggcctggacatcacagatgcctccctgcggctcatcatccgccacatgcccctgctctccaagctccacctcagttactgtaaccacgtcaccgaccagtctatcaacctgctcactgctgttggcaccaccacccgagactccttaaccgagatcaacctgtctggtgagtcaggggcccccatcgggtctgcctaacactccgtgggagaaccaggaggttcacatttgtggaaaacgattcgtgtgtctacagctatgtggtcacagtgctaggtgtctcgtttactgagacagacagcccagtccaggggggaaacacagtaaacaaagagttactgttggccgggtgcggtagctcacgcccgtaatcccagcacgttgggaggccgaggcaggtggatcataaggacaggagttcgagactagcctggccaacatggtgaaaccccgtctctacaaaaaaatacaaaaattagccgggggttggtggccggcgcctgtaatcccagctactcgggaggctgaggcaggagaatcgcttgaaactggcagtggaggtcgccgtgagccaagatggcgccactgcactccagcctatgtgacaagaccaaaactgtctcaaaaaaaaaaaaaaaaaaagttaccattggagttgtagtaattgctaccccaaaatagtgccagttagcagcagccacaagcacatagcagtggttcctgacccaaaatacggacaagggacagcttcccgagggggtgcagaagagccggtgcctgacaaccagggtgttgagacagtgggggccgggaggcaagggccctggtgggcaggagggagcttggtttctgcctttgctgtcgttgcttacatgcaccccttgtgaccctgctatcaaggggcctgttgttggagagaaaaaaacccacagtgagttccattattgttctctgtctgtcgctgtggtgcaggatcttcgctcgctgcacttgccgttggggcggcagttggttctgaaggacttggggctccagtatgcagcgaggtacacagagcaatgctgcctgctcttcgcccaactaacccaattttggtctggtagcttaggatggtctggattggggggtgttgggtttgcgtgagagcaaaaaaagaaagagaaaaagaaactacaggtttttttttttttttacccttagaaattaccaagtactaaggacatccccatctcatcaaattacatttttcacacagcgcagtggtgacatacacgttgttttctcctctgcatcccacatttatgcctgataaactgtctggcaaccatgcctcatagcaggggcatgggagctttggatgggatgagatcattcgggacctaggaagccattccttctcctcatgaagttttggtggcagggattgttccacctcgtggacgcaaagaaccagagtgaattgaggcttctccagctcaagggccaggtcatggccttgaatgggtgatggagctgccctttggagagggcctgggagtcgtcttactctaagtgctggcattttattacatctcttcattatatcctggtttagttattatggat

SEQ ID NO: 71950 - DNA, 1734 bp, Homo sapiens
tccacccccctttaggcctcatcgcttcaaacgtcccccggttcctcctctcacctctcgccgaggccccctctaggcagcagcctcagcccctggtggagatccagtctcacttacttccagcagcaggtgctcccacgacgcacgccctcctgaggccccggggactggcgagtcctgggctgtcccccaccccaccccgctggtcctccaccccactgctgcctctcctgaggcttcccaggtctcggccccagatctctggctcgtggttctggcttggggcctgggaagctgtctgtgcctagagcctctgttggttgggatggaagctgtgagtccagggaacctctgaggagcctggtggccctgctccacccacgggccgtgctgtcaccagccacaaggtggcgccaggagtctctcccagctctagccattcctgctgggccggggattcccacagggctgtgctccagaactggctcccagagccgaggatgatttgaatgggcggctgcacatctccaggtctgtggggtgggaggtcagttgggtgggaacagttcaactgtactcctacttccagcttcttccttgaaagctgcaggcagggctcgcccgtctgtcggtcagacgtggagatggcatttgtggggaaggcctccctccagcccctcctctggagactgtggactcgtggtggggtggggtgtcgaggagaccaaatcccacgagcccggggagcaagctctgcgtcctttctttttcgtgacagctcaaacctggcaaagaagataagcttttcaggaaaaaggtaccatcttcccctccctcctgtgccccaggcctgagcggttagagctgcaccgcagctccctgggccacagtcccgtggcaggggggcgggaggccttgggcgggcgcagccctgagccccagaggctgacgcgtctccgctctcgccctcagcggcggtcctggaagaacgccgaggaccgcatggcgctggccaacaagcccctccggcgcttcaagcaggaacccgaggacgaactgcccgaggcgccccccaagaccagggagagcgaccactcccgctccagctcccccaccgcgggacccagcaccgaaggggccgagggcccggaggagaagaagaaggtgaagatgcgccggaagcggcggcttcccaacaaggagctgagcagggagctgagcaaggagctcaaccacgagatccagaggacggagaacagcctggccaacgagaaccagcagcccatcaagtcggagcctgagagcgagggcgaggagcccaagcggcccccgggcatctgcgagcgtccccaccgcttcagcaaggggctcaacggcaccccccgggagctgcggcaccagctggggcccagcctgcgcagcccgccccgtgtcatctcccggcccccaccctccgtgtccccgcccaagtgtatccagatggagcgccatgtgatccggccaccccccatcagccccccgcctgactcgctacccctggacgatggggcagcccacgtcatgcacagggaggtgtggatggccgtcttcagctacctcagccaccaagacctgtgtgtgtgcatgcgggtctgcaggacctggaaccgctggtgagcggcggcctgtgtagggctctaggttaaggctcaggcggcaccagggatggcccgtggtgtgtggagtcgctggcga

SEQ ID NO: 71951 - DNA, 1086 bp, Homo sapiens
ggggtggagtgggaagaggagtgactcgctggttttcccctcctttctttggggcagggctctcaggacttaggtgacctgctcagggcagcaagaggccgggattatcccaagctctacctgctgcccaccccctgccccatccctccaacccagcacccgggaccagccagaccaacccctttgcctcccagcccctcctggtccgtacccgcttgcgtccactcagctcctggggcttctcgtatttccgcttcttcctcaggtgcacgtcgtcagactttctgcgcagaaggccgtccggcggcaccttcttcgagtgctcatccgacctgcgccggggcgcctcctcacactcactcctccgcttggcaggttcctgcccttccttgttgtcccggttcatcttctgctccttgagcagggagccgggcaggttggaggcgtacttaaagccagggccacgcttttgcttgtaggccaaaaagagagaatgaacagaccaactgtatacctttggacttgcccttcctcctccccaggccgacggcaacccacctgcctgaaactcctgggacaggctggtcccggccaggcccaggcccgcccctctcccgactgaccctgggacttggagcccggcactcactttcccggtcttgccggcgtggttacacttcggacactcccagcagtttggaagctcgtcgttgaccacaccctctgactccttaatctgcggggaacaccaggactcagaagagggacgggcggagaagatggcccacgggcacaaggctctgtgacgccacgtcttccagaagcagcagcaccccctccccaacgtcacatctatcccgtttccaggcaaaagaaaacacagctgcagaggctggcagagacgggcagctgtggatccaggccagggttcagaggctgagcccctttgcttctctgggaccctgggcaagacactccgtctctgtgggctggtgccctcggccataaaagttagtgtgcccatctcactgggggggtatgacccaggtaaagccatgagctcagcgcctggcatgcagaaaggac

SEQ ID NO: 71952 - DNA, 1403 bp, Homo sapiens
gtagctcatttgctcaggcatgatgttgtaacaccatgtattggtcatctggaaaatattggctccctgagttaggcggattttccaaatattggcacataatattattttagaaatcacgtttgttaatatgattactgatctcattggaaaagtctctcagtattgggaagctgtgcgggttatggtggttcataaaagttttccaaaagtctaattttcattcagaaacttgaattttgtcatttgcaacaaatgctgtcagttatttttctggaaatgacaagctcacttctttgatcttcacaaaaatacaccagtgtccagggggtttctatcagtcattccttcaagtaaaaataatctgtggagaaagtggccatttcacctcccagctcagtcacgagtgcttttcctttggtacgcgtcacctgtgtgccgaggcactttacgcatacttcttattgtcacaaagcacatgaaaaggatgtgtactctagggtaaggttttcataaagtaatttttactgtttcatcagagatattcttagatgaaactggtgatcttttttttgacggagtctcgctctgtcgcccaggctggagtgcagtggcatggtctcggctcactgcaacctctgtcttccgggttcacgccattctcctgcctcagtctcccgagtagctgggactacaggcgcccgccaccacgcccggctaatttctttttgtatttttagtagagacggggtttcaccgtggtagccgggatggtctcgatctcctgaccttgtgatccgcccgccttggcctcccaaagtgctgggattacaggcgtgagccaccgcgcccggcctggtgatctttttaataagcgtatggcatgagtcaccccatggctgctggtgagctgggggccttgccttgcctggtgctgaggggccaggagtttcacccgccagtacaaatatcaatactgtgcaaaaggcaaataacgtctgttattctgaagacagttctgacctcctaacctttctgtaaaggtcttgggagcccgcagtccatggtctgtgccttgaatacccactggtgagatgcagcttcatctcatccgcatggatctgggctgcgctcacgcccctgctcctttggggcttttctgaatgtgaggccttccctgacctccatatttaaaatcagccccccttctgcccctcactccagccctctaatttttccccatgtctctgtctctaacatgctctgtccattttgtctgcctccctccactaaaatgtaagctctggatggcagagattttgagctgtcttgttccttgctgtatccccagcaattaagagtagtatctggcatgtggaggtagtagcctgatacgtatttca

SEQ ID NO: 71953 - DNA, 1759 bp, Homo sapiens
taaaacaaccggcctttcttctctcccggttctggaggccaggagtctgaagtcaaggtgtgggctggcgggccgggctggctctgcgggctctaggggagggtccttccccgcgcctccagctcctggtatgtgctgccatccttggcacttcttggcttgtagacagggctccagtctgtggaaggcctgtgtcttcacacacgttctctacgtgcgtgtctgtctctgtgtccaaaagttcccctttcgtaaggacaccagtcatactggattagcgttcacctgaattacctcgtttaacctgacggtctctgcaaagcccccatctccaaataaagatcacactctgaggaatggggtttagagcccccatcgtgtctttctgggggtacacagtttgctccctaacaccctttccgggggtctggccgtgcctgcagtctccccatctgaccagtcgtgtctgttcccctgcagaaccgggctgtgggtcggcccaaggggaagctgggcccggcctccgcggtgaagttggccgccaaccggacaacggcaggagctcggcggcgccggacgcgatgccgcaagtgcgaggcctgcctgcggaccgagtgcggagagtgccacttctgcaaggacatgaagaagttcgggggccccgggcgcatgaagcagagctgcatcatgcggcagtgcatcgcggtgagtgcggcccccgcccagccctgcgctcgattcaggcccctgcgtgccggcccgcgtgtctgaccgctgctcgctctggccgcccctccgcacacagagaagccggggctgtggactccccgagagctcttcctgtggacgggaaggcgctggccgcttcgcaggctcaggcctcctgctccttccctcccagggtgctcaggtactttgaagttgctgccattaaagatgacaggcagcctgtcctgtctgtgaccccgttgccaacattacggttctgggtgacggttctgggcccttccttccttccttccggccctgccttcagagtcagaagtctgggtggaaggtcagcgccccatctcagggggctgcccccaacaaggagtgatttatggtactgaggagccgcgcccgggagagcctggcccgcccctccacaccgcctggcctcagctccggcagtggccccgcgccgctggtctcgtccccagacagggcagtggacatggacttcgcaacggggcgaggtcgcggggtttgcccttgaattcccttgtacacacccacatgctctgccttcctcagggcgctgctccccgggggccggcggtcctccctgtggaggagtcatctcccagtccccgtggaaaagcaggctcggctggagggacgggattcctcggccctggtgcgctcatctgcaggcccagcctggcatagggtgagcccttcctccttggctgtcgatgccccgcaggcccagacacctcagccatctccttccacgcatatttcttgtgttttgttttttgaaattgtggtaaaaaaaatacattaatcatttttaagtatgcagtacagtagtattaccatatgcacgtttttgggaagctgatccctagaactttttcattttgcaaaactgaaactccatacccactgaagctctactcccctttcccctccctcagcccgggcaaccaccattccactttcagtttctaagagcttgactcctctcgggacctcatagaagtggaattatgca

SEQ ID NO: 71954 - DNA, 1087 bp, Homo sapiens
aagaattgcttgaacccgggagccagaggttatagtgagccaagatgacgccactgcactccggcctgggtgacacagtgagactctatctcaaaaaaaaagaaaagaaaagaaaagaaaagaattggcgtttgaaactttgggtagcacccaaaagatatcaggacagagaaagctgtgtgctgaaaggagagagctctggcagactcaccttcctttttattccatttgtccctttttgtgtcactgttttctgtattctgccatcacgtttcctggttgggtcttcagagtcccagttggactttttaatggaggcctccgaggtctgtcttacctgtgggtttttcagtgggcttcattaggatcctgcgttgctctgttgttgaaccaactcttgatgagccaggcgggggccactgccggcagcagaaaccttcctggcctgatttggcagcggctagacagggcctcatcaaggtctcgagagactgcagcttctcacacctcttctttcaggatgttgtctggtatgtgctctgtgattttcccagatgtctcaactgctgttgaggtccaggcaggttgttttccataggctggatgagaaggtgctttggttggtgcaggcaaatgggcttgttttgcagtgacataggagcttcgagactcagactggattggcccaacgtttttacttgcccagacactgtcctcggggcagggaggccagaggcactcagtggctattgatacctggcgttcctttgaactcctggaattttttcagttttttaccagagaagctcgtctttagactctccagctccggggatctggttttgtcctgggaggtggcccacacgctggccacttcacacctgactggaggccttagacgccgcccatagcattgcctgtgttccaggtatttgaagagtgagctggtaacagggcacctgtcgtttggaggggtagaatcagaaagtgctattgtaggctgtgatgacagggagaaacgtttttggatttccgcttctctggaagtagccgtgcttctctgcacctcttgttggcacccttcgca

SEQ ID NO: 71955 - DNA, 1030 bp, Homo sapiens
gaacttctggcctcaatgatcctcctgtcttggctttccaaagtgttgggattacaggcatgagccactgcgcctggccagtttttttttttctcttgatgtgaaaacagcttctattattttttctataaaaatgactacaggctgggtacagtggctcatgccggttatcccagcacttatgggaggctgaggcaggtggatggcttgagctcgggtgtttgggaccagcctgggcaacatggtgaaatcccatctacaaaaaagtacaaaaattagccaggtatggtgtcatgcacctgtagtcccagctactcggaggctgaggtgggagaattgcttgagcgcaggagttcgaagctgcagtgagtagtgatggccccattgcattccagcttgggtgacagagtaagaccctttctcaaaaaaatttttttaaataaaaataaaaatggctacagcttgttgaaaaaatcaggaaattatggagaagaaaatctctcagaaatttatgtggtcatagaaccattgttaccaattatagctattttattttactttaagttctcggatacatgtgcagaacgtgcaggcttgttatataggtatacatgtggcatggtggtttgctgtacctatcaacccatcatctaggttttaagccccacatgcattaggtatttgtcttagtgctttttttttttttgagacggagtctcgctctgttgtccaggctggagtgcagtgacgcgatctcagctcactgcaatctctgcttcctgggttcaagcgatttttcctgcctcagcctcctgagtggctaggactacaggtgtgcgccaccatggctggctaatttttgtatttttagtagagacggggtttcaccatgttggtcaggctggtctcgaactcctgaccttgtgatccacccgccttggcctcccaaagtgctgggattataggcgtgagccaccacgcctggcctcttttttttttttttttgctgaggcagggtctcactttgttg

SEQ ID NO: 71956 - DNA, 1030 bp, Homo sapiens
gaccccgcgggcgccggcacctcctgcctctgcgttcgcaaagttgtgccaggaccctcggcttcggggctggagcgctcccggggcccgtgggcccgacggcccgagcttttgtctgggcgccgcgcgcccgccgcccgccgtgggcagacggagacaggaaggggtgcgagccgcgggccggcgcgggccacccggaacccgggcgaatccgcacggcggcagcggcggcggcggcggaggaagccgcgaccccagatggcaggagttggcctcggtggattcagaaggaaaagcaacctctctcgggaccagggggagaaatctgtgtgtaaaacaaagccctgggtgtgtttacggcgtgaatttactccgggaaggttcgtgtttaggaagaaggcgaaaaaagttgaggttttacgaagtataatctgcaaaataatacttggaacaggacgcaggccaggtagacctgtccgaggaattaagaatgggatggattgagttagcatgtggcattggacggacttgggtgcataaaacgcttatttataatcctggtgggataaaggtgttgtggaatgacccagccaaaatgtggtaactttttttttttttcatcattaggtgcaattgaggaagtgctctataggctgcgcttaaatcgtattatacgtagtattaagtggttttacctaacaggcagttgatttttattttctcagctttgttggagaattttcaggcacgtgtgcgttttgaggtgttaggaatctcacggctctttcggattggattaacccagggacgattcaagtgcttttggcttgaacttttattaagtcagtagccctacgtgtgaatggctctcaaagtcttgttccatagatcacacttcaattcctgctttgaacattttcatttcagtttggagtctacttaatcctgcgacagtttgccatttctggggcatttggtcattcattcgtaggatgtcagtattctgtgtcagctgggctttgatgtctcc

SEQ ID NO: 71957 - DNA, 1021 bp, Homo sapiens
cggtgcagttgagagcccaggctccagttgcctacagagtcagatccaggtcctttcccttcctcgcggcaatgcgcctcagtctcctcatctgtcaagtacccaccttatggggctgtttaaaggaataagtgagatcatgtctacagcagacttaccactggtctggccctttgaacatgcttaaagctgctgttattgcctgggcccttggagggaggtctttctctggatggtattatataagagactctggtcttgaaagccactccctaattttctttgggccttcatttcctcacctgtgaagtgaaggggtcaggagagacccccttctatctctgaaatgatataaagggaggaagggagtttgtgttagcggcaacttttttgtttgtccgcacttttcctttccgctctttgagccatgatagttgagaattgtgtttttttacttccttaaattcagaagtgagcttttgagagtcctcaaaggaaatcaacctcaagataattcttttgctcctgattggtaatgggaaaaacctttgagaagaattcctgcttacagacatctctctctctctcctttttttttttttttgagacagaatatcactctgttgcccaggctggagggcagtggcacgatctccgcccactgcaacctctgcctgctgggttcaagtgattcttgtgcctcagcctcctgagcagctgggatcacaggtgtgtgctaccatgacctgttaatttttgtatttttagtagagacggggcttcactctgttggccaggctagtcttgaactcctaacctcaagcaatccaccctcctcagtctcccaaagtgctgggattacaggtgtgagccaccgtgcctggcctagacatttctcttgatgtattatgttatttgggtgactctatacccctgtaggcttgaccaatcacaatgaagtggaagcatgattggcatgttatgagcccctcctctttctttagaggctcctactgagtag

SEQ ID NO: 71958 - DNA, 1049 bp, Homo sapiens
ataacctgtaattaaagtcagtggccaaggatttcttttttggtgtgataacctgctcagctggctgagttaataatgcctaagataggctgggtgtggtggctcatgcctgtaatccctgcactttgggaggccgaggcgggtggatcacctgaggtcaggagttctagaccagcctggccaacatgatgaaaccccatctctactaaaaatactaaaaaattagctggatgtggtgccgggtgcccgtaatcccagctacttgggaggctgaggcaggaaaatcgcttgaacctgggtggcagaggttgcagtgagccgagattgcaccactgcactccagcctgggcaacaagagcaaaactctgtctcaaaacaaacaaacaaacaaacaaacaaacaaaaaaaaccctaagataagttcttgaaaagcaattgagatcttgagggctctggcctttggagtaattagaaagccacgcaggtactataaccgattgcttggcattaccatggttttatttctggaataatggcttatcctttagactttgtgtatttcccacattaaaggaggacatttgatcattgacattaggaataagttgtcattccccgcccccacccccccgacttctttctcgaatttggctttgttaggaagatggatgtatgctcaaccaaacgatgttgtcagataatctgtccctcaaatttaggtgacctattgaaaaagggacaaggttgggtttagacaggtgaaatattttcatcacttatttttgcttcatgttacaaagttgggaaggatgaaggggggagtcttaattacacaaaaagaaagtaggtgcaaacctgctctaaatcactgacctcttccaccaacgaacagaaacatctcatcaggaaagcaggatgaagagaatcagaaatactctcatcggctgggcccggtggctcacaccacccaacaatttgggaggctgaggcgggtggatcatttgaggtctggaattggagaccagcctgaccaacatggtgaaaccctg

SEQ ID NO: 71959 - DNA, 1050 bp, Homo sapiens
gctaaattttgttttttttgtagagatggggtcttactctgttgctcagattggtcttgacctcctgggcccaagtgatcctcccaccttgacctcccaaagtgctaggactacaggcgtgagccaccatgtccggcctccatcttcgttaaaagcctctcccggcttgtcagcctggccttgagtgcccaagtcgccatctgtcgctgtgccgtagactctcctgacttcctctcatcttcctttcattgctggggaaccaaattcctccatgatttccttggaccagtccacctctgtctttgcttacactccttccttctcggagtgcccttttccccatttctcccatgtagaaatcctctccatgccagccccaacccagttccctcctcaccagggagcctcctgagctgacgcgttccagttgcacctcagcccctccccagccgcctcaccctccttatggactgctgcaaggggcttctttgcctctctggcctctggttgggctcagcctgtgggaagcacctgcaggagaggggaaggtgggaggagagggaggcggggtattgatttctccagcttcctccctgtgggatcattgcaggttgagtgtttccatccatggcagaccacatctctattgtgtggccttcttcaacttttctgtttctggtcactgttccctccccttgcccattggccaaggggaggaaacagctcttcactgtccctgggcttggctgcatcgaggcctggctgttttcccttagccctgtttacgttttgtcaatcaaacctctgctaaactctccattatgcctcagtgtgagggggccttggtgccatccgattcctgccaagatcctggctgacgcgcttccacacttctctccccactgcacttctgcattctactctgcattttgtgtttgtgtgtgtgtgtgtgtgtgttgttgttgtttgttttttttgttgtttttgttttttttctgagatagggtctcactctgtcacccaggctggagtgcggtggtgcaatctcgg

SEQ ID NO: 71960 - DNA, 1052 bp, Homo sapiens
gagcaagactccatcttgggaaacaaaaaccaatacataaatacaaatgaataaataaaagcttcccaggtcattctctgcactactcggatgcatttttggggtcagatgcacctgtgggtggactccttccttcaccactgactagctgtgttgtcttgggcaagtctcagcctcagtttactcatctgtgaaaggtgctaacagcgcctttcttgcgggcctgtggtgagatgctgtctgtaaaatgcctttagagtgggccatcaatcagtgtttgctagtctagtttttcgtaattatggtttaaaagtaaccctgaatctgcccacccagaaggcttttgatgttcttgatagaaatcgaggacacgagaggaggagcagggagcagcggaaggggctgaatggtttagaggcatttcccatcccaaaattatcatttgcttgtgcaaaacttaatctcaagcaaggacctgaatgacttaatttctttgcaatagttatggctgtgctgaaatgggctggcacttcctgggggtttgggagtggggactgatttaagaagctgctttagctaggtaggatggctcacgcctataatcccagcactttgggaggctgaggcgggcgggtcagttgaggtcaggagttcgagactagcctggccaacatggtgaaaccctgcctgtactgaaaatacaaaaaattagccgggcatggtggcgcatacctgtaataccagctactcaggaggctgacgcagtacaatcacttgaacctgggaggcggagcttgcagtgagccgagatcgcgacaccgtgccacagggcaagaccctgtctcaaaaaaaaaaaaaaaaaagaagctgcttctcctttatctcttcctcctcctagacgggaggagtcctaggctctttggaggggagtgatggtttgcctgagaatgtgcccctgggggtttgaggccactgagaccatggggttctctactgggtcagggtaggaggagagggtgtcaaaggccaagggtgtcagatgtccagtgctg

SEQ ID NO: 71961 - DNA, 1068 bp, Homo sapiens
gttgaatgaatgaggagatgaatggggactggtaattggcaagctgtgcaggtggtttacaactgaattccagggggcccagctgctacaaagggggctggcagcttgggagaactgcaggtatccaagctgtgaaggagcagagaggaagcctctaactgggggagggcagaggtggggcaaaggtagaaacccaccccgttaggaacctgtaaagtggtctgtgggttgccacttctcgcaagaacctgaaaacaagtgtatcactcccagcctctggggtaggtaggcgaccagtgcttgagatttgtcacctgatcacaggggcttcccccgtggggaactccgattacatttggatttttaaagaagaaaaaaagaaaattccccagcgtcagcgtttataaaagggcaccagttcaggacctctgaagtcctttgcttacgtcttgtgatttagatcttgacttgtgttctgtctccctgcctctgtgttgcaggtactgtctgatgagcgtgaaaggttgtttcaccgacttccacatcgactttggaggcacttccgtttggtaccatgttttccggggtgggaaggtgagtttcagttgcctttaactttctatgcatctctagctgtttgtgtggggaggggctcacttacctttccctctcctcccacctccctcctccaaccagccctgccccaggagtactttaaggattactctttttttttttttttgagatggagtctcgctctgtcgcccaggctggagtgcagtggtgcaatctcggctcactgcaagctctgcctcctgggttcatgccattctcctgcctcagcctcctgagtagctgggactacaagtgcctgctaccacgccctgctaattttttgtatttttagtagagacggggtttcaccgtgttagccaggatggtctcgatctcctgacctcgtgatccgcccgccttggcctcccaaagtgctgggattagaggcgtgagccactgtgcccggctttttttttaaaaaattattattttttaagagatagggtcttgctc

SEQ ID NO: 71962 - DNA, 1032 bp, Homo sapiens
cccggtccacctgaaagcgaggtgcaaaaggcagccagagggagggggcaccaggagccctccgccttctaaccagctcagccccactccccgcattatctccactcgtgccggcgcgctgctggctcctccctgtccgtccccgccccattccttccctcttccccaaaccatggaaaggcaaagtgcagcggggaaaagaggtcagtggggtaagcatgtgttgcgggctccggaggtgccaaggtgcatgggcgtgagcggtggggaggctgcccatccgtgccacctggggctctagtgggaaggggcaagtggcagggaggggtccctggcaccgtcatgtgccaggcctggacttggaagccttctctgtgccccctcctccttcagctctgccccactcctaagagggcagcagttgagggaggaggggagccctgggtgtttctgcaaggaagggtgggctctccagccctccatagcactgagaaggggatggctgctggccagttcctgcttcccctggattcactccccggccccagcctccaaggtccaagttcttcctcctccttctcttcctctgtgcatggccaccacccccaatttaatttctcttaaattctttacttgtttataacagccttactgagacataattcacagaccgttcacccatgtaaaagtgtacaattcaacgggttttagtatgttcacagagttttgcaaccacagttaattttagaacattttcatcaccccagaatgaaaccctgtacccattagcagtcattccccattgtcctgccccccagcccctgacacccactaatctgctttctgtctctatagatttgtctactctgcacattttgtatacgtgggaccagacaccgcttggtcttttggggctggaacccccccttacttttctagctgcattgcttacttggcaatcaattgcagttttgtttttttgttttttgtgtgtgtgggtttttttttttttggtcatttaacttttcctgt

SEQ ID NO: 71963 - DNA, 1019 bp, Homo sapiens
gccaccgggggagttacgccaagttggagggaaaaaggtggggcggggccgccccgcctccgcagcccccaggcagcgccccaaagttggtgctgcaggtgcagcaaccctcctgccgccctcctccccggctggcccggccgtggcaggcgggaacccccaagggctcggttcgggggctcccgatgatctgccgccaacttggagggtgccttgctgcacagaagccacctgagctgggggcggccgggggcggccgaggcccaggcggaagccgggctagccggctggccgtggggagagcttagcggccgtggcaccgagccggggtgcccatgtgactgcggtgtgcttgggaagaggaagctgcagaggtcagtgcaaaggcgtcacgccagagcgagcgagcaaaccagccaggggggagccccggagccagcgcggggcgggagcgggggtggcctgtcgctgcaggggccggacaaagccgcgctgtcccagccaccctggctcccctaatgcctgcgatcgcggggtgggaggggcggccaggcttggcggccaggaaatgagggacaccgggaggaggggcctctccgggagaggcaggtctggaagaggcggccccagccccccgaggggcctctggatgctggagggtgacccagagggcagatcagacacagactcaacttggagaactttccctgcacactgcagccagcttgcagcgattcttttctgcacgtgctggggaggtcggggttgcggggagctggaggatggcaggatgggggtgacctggttagccaggcagccctggggcccgcagcccaagaggcgagctcctgtcctctcctctctgctgtgggtacccgcgggcttccagctgtcgacaagagaagcacgttctctgggctccgccccgcacatacttagattgttttccctagactgtgttcagctgaggcctggagggggtggaaaccaaggttagattaaaaaaagaaaaaaaaaaa

SEQ ID NO: 71964 - DNA, 1010 bp, Homo sapiens
aggcatttgtgactaaaaatacaattctcttatgtggatagcctggtccggccatcaggactgtctcctctcctagctcatttaatgccacatccttttctttctttttttttttttttttttttttttttttgggagagggtctcctatgtcacccgggctggagtgcagtggcgcagtcgtgattcacccttgacctcgtgaggtgaagcagtcctcccaccccagcctccctggtagctgggactacaggcgcgcaccattatgttggttgtcttaggggtgaaacgagatcacgcatgtaaacagctattattattattagcactggtaattagaacctgttaattaatattgctcagtagtcctggtggctggggtttggagaaagaatggagaggctggaatctgcccctgcagtggctatgggaccatttccagcccccttgtggtttgggagaagggtgtgggacagggtgggaggagggcggggactctggtgaccttgagtgtgggacttctgatttgagcgggatcaccacctgcagctggaggttagtggtgaggtttggctgtaacctctggactcctcctggagttgaggtgtgtcaggtagaccaatgggggcaaagctgagggactgggagacaggctgcctgggtgagcactgcctctgataggctggtgacccgaactggaggctggacccgaactcgaggcttgagtcacaagcctccctgtgcttatctgaaaacaggaagaatcctgggaatgactttttagggttgttgtgaagtttggattaagtaatccaggtaccacagtttggatgatgcggtgaatatgtatttatctcaaaggagtctctcaaccatgctatgatgtagggtacacagtcactaagccaccaggcaggggaaggggtggtaaaagaacatcttagaatgcagaattgaacttcagtgccgagcagtgaggatgctgttcagagaggggaagtgagttgttta

SEQ ID NO: 71965 - DNA, 1048 bp, Homo sapiens
atggtgtggaattgggagtgacgggcagggagagcggaggggctgagggtccagctggacatagatttaggaatgcaaaagagactgcgctgggtgacacagatttcagtttcataattaatgcctaccttgccttcctgagatactcagcatattctgcactttattgaaagattcctttaaatagtaagctctattaatatattgaggatcctatctaattaccaaaaaaaaaagtgaggctcacacactcatttttttttctttttttaaaaccgttgtctgtcactgtgcacacactgccagttttctaggaccatttgtcttggggtcgaattgtgtggcgaatagagctacggaccccgtcagtggtcatgggaactggttagaggattcgaacctcgttaggaaggaaattgtcatcttggaaatagtccatttgttttgctgaaaagaataccgatttcagttaataagcaaggtaaaaaaaatcccaccctgatgaagtcctccgggatcgtagaacagttctgtagaatttaattaagatgacattgtttctagaaatcatggagctttcatgctggaggccctggagggtagagatggctgtcagcacacctgagggaaggactgcagtagggaagagagaagtgacacagacacacgactgcttcccccacccggctccaggacttttggtgatgggcttaggaatttttaaaaattttttaatttttatttttttagagagggtctcactctgttgcccaggctggagtgcaatggcacgatctcggctcactgcaacctccgcctcccaggttcaaacgattctcctgcctcagcctcccaagtagctgggattacaggcacccaccaccacacccagctaatttttgtatttttagtagagacagggtttcaccatgttggccaggccggtctcgaactcctgacctcaggtgatctgcccgccttggcctcccaaagtactgggattacaggcgtgagccaccacacctggctgattttttctttttttggg

SEQ ID NO: 71966 - DNA, 1049 bp, Homo sapiens
aatgagagcatgtctcaaaaaaaaaaaaagacaaagaggctgggcgcggaggctcacacctgtaatcccagcactttgggaggccgaggtgggcagatcacgaggtcaggagatcgagaccatcctggctaacatggtgaaaccccgtctctactaaacaaacaaacaaaaaaaaaaaaccaaaaaaaaattagccgggcatggtggcgggcgcctgtagtcccagctactcgggaggctgaggcaggagaatgatgtgaacccaggaggtggagcttgcagtgagccgagatcgcgccactgcactccagcctgggtgacagagcgagactccgtctcaaaaaaaaaaaaaaaaaaaaaggcaaaaaaaaaagacagaggagatgggagagaagtgaaaagggccccgaaaaaaggctgtgggactcagagattattagttagaggcagatgatggctcattgattgattgagatgatggttcattgattggttgattgattcattcattcattcagcgcctatgtcttgagcccttgattggtgctgagtactggggtttacagtggggaggaaaccagaagaggttcctgctctcctggagcatacacagtgtatgggggagacagatgtaaatccagtaatcacagaaatagatgggaacttgcagctgcgatgaggcccacagtgccccagagctggtactaggggaggagattcgcccagtcaaggtggtcggggaaggtgttctgagctggagtctgaaggctgagcagggttacttaggtgaagaagactgggagggctttcctggctgtgtgtagtcgacttgggatggtggggaggggcaggggacctgtggaaggaaggccagtggggctggaacagaggcagtgaatgcagggtgggtgtggggtgggccaggcagaacagagggtctgcatttcctgtaagaacagctggaatcctctccaagattttgagcagagagaaatgtgttcaggtttgcattctgcaggtcctcttgttgctatggggattggatggcg

SEQ ID NO: 71967 - DNA, 1027 bp, Homo sapiens
cccctgccacctgggttgtgccttgcaaaaaggctcatgtgggtgtggctggctgggcttggcaggcataggggtgactaaggttggtaacgtggtttgtagagacagggatcttgctatgttgcccaggctggccttgaactcctgggttcaagtgaccctctcaccttagcctcccaaagcacttagattagaggtataagctaccgtgcccgacccccagcgactgtttcatctccttcccttctacaaagtgtgggtcctgtcatccctgcccttccttcctcccatgttgggactattgagcccacagtagattgggggagcgggggggcccaaggactctccggggaaaggggtatttgtgtctggctcggcagtggagaaatgcagtgctcacactggtctggctttcaggtagacctggtggactgggtggacaacatgtggccccagcatctgaaggagaagcagacagaagccacgaacgccattgcagagatgaagtacccgaaagtgaaaaagtaagactgcctggctggtggccagagctggcagggttgacccccaggcttggggaggtggggaggtgggaaggaggctcctggccatcagtgaaggcttgagcgtcacaaccgctcccgttcagaactgaaggactgtgcctgtgggggcacagctgggacaggagggacggggtccttcgcgtgtgcaggttggctgcaggggctctgatgtctgctctgggaccagctcccctggggatctgtgatctgaggaggagtgatggcagacgcctctgcatcggtgtgtgtgtctgtacgcaagggcacaactgtgcatacttttgtgcactccctccatgagacattgtgtcctgggagtgggcattttcgggggacctgcccacattggatgctttggttttggtgagcaatggggaaatacctacctggcattcttttgttccttggtgttgagaccttgaagctcatacccaaaataacctttcccaaacatagtccag

SEQ ID NO: 71968 - DNA, 1083 bp, Homo sapiens
gttttgccacgttggccaggctggtctcaaactcctggcctcaggtgatctgttcgccttggcctcccaaagagctgggattacaggcgtgaactactgtgctggccaggcctttttaaagttttttttttccccaagacagagtcatggaaaaaaagtcacccatgttggagtgcagtggcttgatctcggctcgctgcaacctctgccgcccaggttcaagcttctcctgcctcagcctcctgagtagctgggattataggctcgcaccaccacgcccggctaatttttgtatttttagtagagacagggtttcgccatgttggccaggctggtctcgaactcctgacctcaggtgatccgcctacctcagcctcccaaagtgttgggattacaggcatgagccaccgctcccggcctaaagttggtttaaaatcatagactttttccattttaagctcgggaaggagtcttagagttcttccagtcctgcttccccatttcacaaatgggaaaaactgaggcctgtagacaaattatttttgagttgctcagatagtgcttggcacatcagagtcacatgtaggtttgactttcagtgattgggagaacacaatgcttccaatagacccccagaagaaaagcaacttggggctggacatagatgggtgtggttccgggcacattgagttggatctcatgagagaggtcaaggccagagcggcaggtaggggaggcatccaattgccaggacagatagaaatgcagggagaggggccaggcgccatggtgcacccctgtaaccccagcactttgggaggctgaggcgggcgtatcactcgaactcaggcctcactgctatttcaaaacagtagagcagagtcggatttgaacctgtgaccagtgctcttgctaatcagtgctacctgtgtgacacggatgaggaacaaaatacaaaaccagtccagaaatgtgaggatgctggagaaggttccagaactgtgatgtggaagagttctgtgagctctcggaagagccgggctctggggagtttggggtcgcgcccgtgtatgtttcacatta

SEQ ID NO: 71969 - DNA, 1031 bp, Homo sapiens
gtcgggtgtttgggacgatgcccccttaggcctggggtccgcagagccgcattcccccatgggctctgccagattggatcagggaccccatgagccctgaagctgttgacctgaacccctacctgggccggagctgtctagcgctacagccttgataggttgaagccaagaattggggtcagggggtgacttcccttcaggcttctgggggagatccctgtcccctggcagtttgaagtgaggaaatgggtctcctcccaggcctgagacttggagagctctgttccttgtgggcccacccaattgagagcggaatctggggacgcctccagggttttggagaccttcacggcctgagtttctccctggctctcctactaggagggtggtgggggtcaccctccagatgttaaggtgacgccctgggttgcctctgaggcctccagagccctggccttcccagcctgcagccagtgtggctcctggttgaggaacctagtattgcctgcgggattggggttttgaacatgccctacctagccttcccaggcccttcactccttttccctttcagatatttcaatttcctttaagttacaaagtttctattttgttccccccacgccccttggaaaacccttccatccctcagtgagctgataacctggagtgcctccttccctcctccaggttctggttgagtggctgtggctgtggggttagctctgagaagagactcccagctttgcagttttgcgatttctcttttgtgcccattgcctcctggagcgctgggctccggtggtgaggggtgtttgttgggggagggaagaataaatttctcccagcctgcctggtcctagagcagggtgctagtcccagctgatttaaattttctctacataagtggaattttaattcctctcctttcttcccccatttttactgagttgagtcatttggtggatcctatgtgcaaacaatatgcaaactcttcctagtcatttgggaggaattctcagcccaggatt

SEQ ID NO: 71970 - DNA, 1054 bp, Homo sapiens
ccccgccccatacctcctcgggccgccgcccccacccccccaagcccgggccgagagcccccccaaatagcccggccgcgggctccgagcgcgatcggcaacaatgtttacgttccggggattatgacgtcgacgcctccccccccccacaactgctgaaaatggtttcctaggactttgcaaacggatctgcctaagtgttggtgcaaaactttgtagatctcggctctggcttgctttatttatttattttttggtttgttttctttggtcttccctccttcccccctcggccaaaatgcagggggcaggagtgttgacaattaattggtgaactctcctaaaaaaatggaggcagagaaagactctggaagaagattggtgtgtagctttttttttttttttttttttccaaatctgtatctggcatatgatagatctttttttttttttttttggttgtttctcgctgccttttctttccttttctgtattttgcaagaggaccgggaaaaaaatataataaattgcatgcaaaaggaagcaagctgcttactcctccagccccttgtgaggcttagagtctcagacacttaagtggggaggtggtatcggggaaaggcgtggaggggggctgagcgggctcggggttcgcccggaatctggggggctgaggggccgggcgctgggcggtggagggaggaggcagggggatgcggggagtggtgggggagtctccttaggaagtgagtgtgcgcgcgcgcttgtggggagatgaggcagctgctggtgcgttttggggtctccgatccgagctttgtggcgggccgtctgcctctcccccttccaagccccgattctcctccccccacctcctcttcttgcactggcgggcgggcggcgggggcggctggggtctcagcccttccatttcagctttccagcttccccggtagctcgggggcggctccagctttagaaatgccgccggcccccggttccggcttcccggctctgccgccgcggccgctggggctgctgttaccgccgagcc

SEQ ID NO: 71971 - DNA, 1155 bp, Homo sapiens
tactcagaaggctgaggcagaatagcgtgaacccaggaggcagaggttgcagtgagctgagatcgcaccattgcactccagcccagggacaatgcaggactctgtctcaaaaaaaaaaaaaaaagaggtgacccattgttctgccttcagttaagtcttgatccaagtgctctccgtctctcacttctgccttctgtgttgtgtttatctcaggctgctattggggcacccagcaactccaggctcatgtcactatttatagcattcccagcaaacggagcacattcctctcttccaagactctcactgggtcgcactggctatgtccaggtgcagaatggatcatgtacctatccctgaaccagtcactgttgccagggattgcagtgctgtgactggccaggctggagcctcacacccaccctgatagccgtcactgggagcggagaagctgagtgtcaggagaggaatggttcctcagaggaaaactgggagaccgttactaggaggatggacgggttttggtgacaagagtgggtgggtggtcttctacggggagatagaggggagagtggacaggtgaagaggatattaggccaaacctgccccaccagagagatgatgctggggaggacagaggccgggctaggagtgtggactcctgggttccggtcccagtgcagtcactgagcagccctgtgaccctgggcaagccatgtatcctctttggactgtttcagagtcccacgggggagtgggtgtgtcacagtggtgctgagtgagtccaggcaagactgggggttcccttggcccccatctctgaagggctctgagtgcgagaagccctgttgttttctctcagtctctttcctgccctgcctgcctctaagctgagtcttgagacccagttaaaacccatgacttgccacctggaggacctattttccaaaggtctaattccttttgggggtggccattggaacctcggcatgcctttttttttttttttttttttttgagacgaagtcttgctctgtcgcccaggctggagtgcagtggcgcaatctcggctcactgcaacctccgcctcccgggttcacgccattctcctgcctcagcctcttgagtagctgggactacaggcgcccgccacca

SEQ ID NO: 71972 - DNA, 1023 bp, Homo sapiens
gtttttttttttgccttttttttttttttttgagacagtcttgctctattgcccaggctggagtgcaatggcacattcttggctcactacaacctccgcctcctgggttcaggcaattctcctgcctcagtctcccgagtagctgcgactacaggcgcctgccaccacacctggctaatttttgtatttttagtagagacaggatttcaacaggttggccaggctggtctcgaactcctgacctcaggggatccacctgcctcggcctcccaaagtgctgggattacaggcatgagtcactgcacccggcccagctgggggctcctgatccacagttgggtagagcctggttgtcaccccccacccccagcatcaggggcagcctaggaaaaaaggagttggacccctcaaccctgtaaccttcaacatcccagagtgtgtctcaggccttggctggcctccccaggctcctctagtccaaacacatggcagcaacttgccaaatgcacccaggagcagccaactccctcctccccaggactgggaggtggaggctggggatgctcgtgggaacagtcattaaccttcatccctccagaactctcttgggactgggcagggaaatgggtccacacacacgcccacgtgctttctcttttttttccaggcagggtctcgcatacgcacatcgtaagaacgagactggatctaaaccatcactcttcccttgacggcccatgcaacagttctgggcataaattggcttttcaagcaacagcctgtgtgttccccaggagttatgctgaggggcaaggttttatgcagctctgtgttcacagcactaacagcaccaggtaaacaacaggcactcaataaatgttgacatgaatgatgcctgggaggtgtggctggtgaaagcagcagctaatctggatgccaccagcgcagaggtgacaggagattgttgcaggtgccacgtgcggtcatggggacagggtgagatgtccatctacttctttgtcc

SEQ ID NO: 71973 - DNA, 1059 bp, Homo sapiens
accaggctctacccaactgtggatcaggagcccccagctgggccgggtgcagtgactcatgcctgtaatcccagcactttgggaggccgaggcaggtggatcccctgaggtcaggagttcgagaccagcctggccaacctgttgaaatcctgtctctactaaaaatacaaaaattagccaggtgtggtggcaggcgcctgtagtcgcagctactcgggagactgaggcaggagaattgcctgaacccaggaggcggaggttgtagtgagccaagaatgtgccattgcactccagcctgggcaatagagcaagactgtctcaaaaaaaaaaaaaaaaggcaaaaaaaaaaaccccaaaaaacccagctgggggagtgctgagttctggaaacagagttcccatagcctctggactggatagatgaagtccagggctgggcaagggcctcctgtcactgagatgacaggagatgggcctggggcatgtagctcctggggagaagctgcctcggagatggtgtgaggtgccgcgtgtggcatccatcagcctctgcttctgtacagggcaatgtcatagctgcagtcctgtgtaagaatgtctggccaggcacagtgggtcacgactataatcctagcactttggaaggccaaggcaagaggattgcttgagcccaggaatttgagaccagtcggggcaacatagcaagaccctgtctctaaaaaaaaaaaaatttagctgggcgtggtggcgcacgcctgtgatcccagctactcaggaggctgaggtgggagaattgcttgacctgggaggtcagggctgcagtgagccatgattgcaccactgcactccagacagggtgacagagtgagaccctgcctggaaaagagaaaacgtgtgtgtgtgtgtgtgtgtgtacatgcatgcttattcaacacatttattgagcagctgcttggaacccagggtcacagatagactggtgaacaatagagacaagacccctgctcaatctagaggtgacataggggtgggagagggggcagatcacaggaagaaagg

SEQ ID NO: 71974 - DNA, 1043 bp, Homo sapiens
aaaggaggccaggatgtctcgcctcctgaactccacaggctggtagaagcggggcttgagggacagcaggttgggagcttgaggactaagtgggccagtcctgtcctaccacagtggggggaacagtccacagaaaacttgctcatgaccacactgggagccgactgttcttcccatcccaagtctctgacactgggggctttgggtgaaaccttaaggagatggtcagatgggtggtccagggtatacttttaacaactgagaagccattttttctgccccctgggcacatgtgcccagctctgcaaagacagtggccaagttgaagacaagtcttccatgtggggtggagatgggaggggtgggtgccaggctgcagcctgtgtcctcctgataggcccagccccctcggtggcctccgtgttcctgggggaaggaaggaaggagctggaggatacagtggtgcctatctcgggagcccagggaggcagggacacaggagtggcaggcttggggcgcccgcgtggaacagtgccaggtctacgtttacccactaccagatagactttttcatttcaagcataacttgagtctgcactggggagacactcgtggtgggggtggctgtgatgagggcacttgcgagtcccgacaacagacactggctcctgcacccacatcaccaccatgtcccaggggcagcctggaggggagtttgtggtcagagccccagccaggaaaggagagagttccagaatgttccaagagtctagccgcaggccccagacaccatgagctggagggtcgggatggggcagcctccctggtgcaatcggcacctgggcccccgggccctgtcagtgctgtcgtgaggtctgtctgccctgggtcagagcagcaggcagagccggcgcttcttctgccgttgcgccttcttcagagcgctgagagccaccttggcggcctcccggaagacgtcctccacattctcccgaaacttggcggaacattccaggtagagagcagctcggatctgttcgcag

SEQ ID NO: 71975 - DNA, 1081 bp, Homo sapiens
cctactttcaaacaaggcagacaggacacgacaggacggcggctcatagcacagactttggattgcagtggatgggaccagatcctggctccacttctcgctagctgtgtggccctgggcaagctgcttaacctctctgggcctcagtttctccccctgtaaactgggggatgtgaacagcgcctgcctccgagtcctaaggattgggagtagtcgtgtaaagtgctcaggtccacaggccatcaatactaatagttaaaaattattcttagaatcttgcttccctcagctccctgaaaggccactaaggcaccccagttgcagaggccaaaggtccgggaggcttcacagccacggctgtgccccagggtcttggccccggcccacctgcatgtaggtgatgggctccagctgggcggcccggagcttccgcagctgctccttgtccttcctcaggtctgtcttgcagccgatgagcaccatggggatcccgcggcagaaatgcgtgacctcagggaaccactgtggagggaggaggcgggatcaggggtgcggccgggcccagatgtggggccaccacccaggaggccggcctcaccttgatgaggacgttgtcgtagctggtgggattcatgacgtcatagcagatgagcacgaggtgggtgttctggtaggacaggggccgcagccggtcatagtcttcttgccctgaaagcacagagcagcgggggtcaggggacgtcccctccctgtctggactctgacgggtgaaggggaaggggccaggcaagtgaccctgccttagggcctcaatttcctcatctatacaatgggcagcaagccaggagtgctggcacaggcctgtggtcgcagctactcgggaggctgaggccggaggatcgcttgagcccaggaggtcaaggctacagtgagccgtgatcatgccactgcactccagcctgggtgacagagcgagaccctgtctcttaacaacaaaacccatgagcggcagccccccagtcctggatggtggtaaagaatcctcaagatcaaacccacgcagtgctgagagcttggcctg

SEQ ID NO: 71976 - DNA, 1128 bp, Homo sapiens
gacctcttggctccgctagtgcccggcgcgccgccgccagtgctgcgggctccgggcaatggatgcccccggggccctggcccagaccgccgcccccggtccgggcaggaaggagctgaagatcgtgatcgtgggcgacggcggctgcggcaagacctcgctgctcatggtgtacagccagggctccttccccgaggtgaggcccgcagcggggctggggtgggggcgagggacgccccttaccctgagcccagagccccgaccctcagtccccagcgtcccgagcacggacaggcggccgccaccccggggcgccccctcgggaattccagagcccagcggggtgagggggggctgatccgggacgagtgaggggggtggacagtggattcagctggaactttggcccccgccggccccactaaggaccaacccgaccccctctcccgcagcactacgccccatcggtgttcgagaagtacacggccagcgtgaccgttggcagcaaggaggtgaccctgaacctctacgacacggccggtgagtgcgcctgcgcgccggggggcccgagggtccgcccgcccgaagggtttcccctcccgggcgtcccccactgggtgtccccgccctgcagccttggcagggccttggccggctcttcactcctggaggccgctcaggggcgctggctgcggggccctagaggccaagccctatacgtaagtggaaggtgtttggaggaggaggtgaactctggggccaccctcccagctctgtgctgagagcccacagctcgttcctctcctgtggttctagaaagcagtgggctgctcttgggcctcccatggttccaggattgctgcgctacctgctgtggtctctgcagactctgtgagctgcagatttgagtcccttggtgctcggattgcctgggctgtgtgtctgggtcctgtggttctgggatgctcccggctgcagatcagcctgtggctccagggctctgtggcctgcgctctgcagcctgaggctctggggtcctgtggatgcgagttctgtgtctgcagctcccaggattccacggcttgcagttggtggttctggaattgcgtggctacaattacttctgtg

SEQ ID NO: 71977 - DNA, 1856 bp, Homo sapiens
ccccccccccagctgcgagcgcgtagggccgcctgctgggccgccggggccatccatccccgtctgtcagcttctgttgtcaggcatttggggcgtgtaagtctctgccgaatatagcagcatacgagaggatccacttgcaagtatttcccagttgtgtgttcttcggcggggggagggccctgggtgccgcctacttctgaaagacacaggtcactgtcagaaagcccaactgtgctgtggccttccctccagccgcccccgtggggcatgtggggtgacagtgtgagccgtcctctgatgtctggctgctagagaggcaaagaacagagacccgaggttccggccacctttctctatgaaagggccttccttgacgcttctccaccttcctgggattgttttcttctccagtccccgaatgggcaggcctgtatataagccttgtttctagaaccagacaaagctggatttgaaacctggcgagccattgaacagctatggccttgcgtaagcggtatagcctccaagcctatttctccatctccgaaaacagggctagatcagtggttcttagtctggaaccggcatcagaatcacaccggaaggggggctcactgaaaatggaccaccgggcctggtgcccaagtgtctgattcagtgggttggtccttaggactggcatttctaacaagttcccaggtgaggtgaggctgatgctgtggtctgggaacacattttgagactccagcccctagcctggtaacacctggggttttgacgcagaagtgccacgttccacgcttggcacatagtaattgatttcattctaacgctagccgacttcatgtattgaatagtttcccatctcagtgtctaagaagctccacagctggagatggcggcccttggtctcggagcccccctccttgtgatttctgctttgtgattgctttgatgaaccatttgggtccaggtgctcctgatcacaccacctcccctatttgggacttgtgccccactcccgctgtgagggctacaccgagctctgggggcctgttcggattaacaaggagatcttgctaaaggtatcttggtgctaagttaagggagatagttcgccatgggctaggatctctcagtgctggtgaccttgggtgagtgtctccctgtaaagtgataaggatgcctgctggaaagggtggtgggaggattaagtgcgttaaagaggccctcctcccaagcttttagttggcctccattgtgatcgtggttattgctgggagtggctgcagggggtgggggctgggctgcctcagagcttccccccgcaccagcccacctgctgaagcacgtgtccctgcctcagggcaaaggggaatctggcgctccctgggaaggcggccaacgcggttctcctctggagtggttgagtccagctgcaggcctttccccatccacaggggctgttccatgatggggtcaagatttgggtcacccacccatggtccggggagaagtgactccccaaggtcacaaggccaccaccaatagagccaggatggggttccaggtggcttgacttggcagccagcgcctgtgcccatggcaccccctcaccccagctgtctgggttattttgggcttcctcccgtgccagctgtctgctggcatccctgcccgggactgtctggttggaagtaactggcgtggtgctgttggctcctcctgtgagggccagggctgggtcttcaatccccgatgagccgtgctgggtccagctcctttgctgggagggaagagtgttcctgcccagactccccgctgcccaagtacagcaagagggcgaaagcacc

SEQ ID NO: 71978 - DNA, 1040 bp, Homo sapiens
gcaaaaaggcggcttcgctgaggactgtttactgctctggatatagcaatggtgtgatcgtcattaagagacaaaaggcgaaaatacagtcaaatcaaacaaaaggcacaagacgcaccagccgcccaaccaccatagaaaataccccccacttaacgttggtgtttgctggaaccagctaggacttgttttccagttttaatctagtttcctgtgacggctttagtctctctacacaaagaaaaggtcttcctttccctcacccaccagctccccccaacccccaacaccaaagacgagaaaaacagggctgtttttcttcaaatagatcgattttcaaagaaagtgtacaagctacggggaagaaagctgactagcatttagtgctgtaaacattttcaaaagcataaagctagaaccttagctttataaagcaagatcgtctcaagcatcttaactggcttatattagacaagagagacaaagacatacatgcagatgaaggttcggaaaattaaggacatctcagcaacattaacatcaaaactgtactgcgtcaggacagaatggattgggtacttacaatgtaaaaggttttttaaaaactaaaagagtaacaactgctcacaattttttgttgctgccatttcgctagtcctaaagctatatacatttaaaacattaccttgttaaaaagagagaaggagttaataagatggccaggtttaagtgtttaatagaggaaactagatatatttaaaaatttattgttcagtcaagagaatacagattaagacagctccaagctccccccacccacccatagaacaaaaagaggaaaaaaaatatgtcatttacttaggtttttttggaattcaaaactgttaactgctgacatgaatggtgtgctatgacctagttatacaagacaaagatggattccaagtcataaggaaaaatccagatctttttaaaaagtcttctccagtcttccaactgtgagtccttgggcctgttgacaaatgttaaacacactgaga

SEQ ID NO: 71979 - DNA, 1017 bp, Homo sapiens
aagtgggtttttcctttgttgcaaatggggaatgtttttcctttgactctaccatccagttcaggacgtctcagtgtgtttaacatttgtcaacaggcccaaggactcacagttggaagactggagaagactttttaaaaagatctggatttttccttatgacttggaatccatctttgtcttgtataactaggtcatagcacaccattcatgtcagcagttaacagttttgaattccaaaaaaacctaagtaaatgacatattttttttcctctttttgttctatgggtgggtggggggagcttggagctgtcttaatctgtattctcttgactgaacaataaatttttaaatatatctagtttcctctattaaacacttaaacctggccatcttattaactccttctctctttttaacaaggtaatgttttaaatgtatatagctttaggactagcgaaatggcagcaacaaaaaattgtgagcagttgttactcttttagtttttaaaaaaccttttacattgtaagtacccaatccattctgtcctgacgcagtacagttttgatgttaatgttgctgagatgtccttaattttccgaaccttcatctgcatgtatgtctttgtctctcttgtctaatataagccagttaagatgcttgagacgatcttgctttataaagctaaggttctagctttatgcttttgaaaatgtttacagcactaaatgctagtcagctttcttccccgtagcttgtacactttctttgaaaatcgatctatttgaagaaaaacagccctgtttttctcgtctttggtgttgggggttggggggagctggtgggtgagggaaaggaagaccttttctttgtgtagagagactaaagccgtcacaggaaactagattaaaactggaaaacaagtcctagctggttccagcaaacaccaacgttaagtggggggtattttctatggtggttgggcggctggtgcgtcttgtgccttttgtttgattt

SEQ ID NO: 71980 - DNA, 1024 bp, Homo sapiens
gcgtggtggtgcatgcctgtaatcccagctacttgggaggctgaggcaggagaatcgcttgaacccaggaagtggaggttgcagtgagccgagatcgtgccactgcactccagtctgggcaacaagagcaaaactcaaaaaaaagaaaaaaaagactcctagtgaacacatgccccacacacatatctgagggccgtgttcagcctgggtgccaccagtttgaggccattggtgaggggtctggtgggggctggggcacagcgggtcctcaggcagcccctcgtctgtgtcccccatccagaggagacagtgagcattgtaacctccaaggccgaagccacgtcgtccagtgagagttccgagtcttctgagtttgagtcaagctccgagtcctcgccctcatcctcggaggatgaggaggaggtagtggccagggaagaggaggaagaagaggaggaggaggagatggtggccgaggaaagcatggcttctgcaggccctgaggactttgagcaggacggggaggaagcggctctggccccgggggcacctgcagtggactcgttgggcatggaagaggaggtggacatcgagactgaggctgtggcccctgaggagcggccctccatgctggacgagccccccttgcctgtgggtgttgaagagccagcggactccagggagccgcctgaggaaccaggcctgagccaggaaggggccatgttgctgtctccagagccccctgccaaggaggtggaggctcgacccccattgtcccctgagcgagctccaggtaacacctgcaaccccctgggagggtggtgggagggaggcaggaagtcctcactgtcagaatcagcccgggcttcctggggtagatcgctgaccgtccccagcctcagtttcccgtgtaaaacgagatcagccggttgtgcctccctcgagcgagatgaggtgttgggtgccagcactgagcctggcactgcatggatcaacccaaaggggaacgactgctatttttcag

SEQ ID NO: 71981 - DNA, 1602 bp, Homo sapiens
ctgtgtgcctgacactgggttgggcgctgaggagtccttgaggggtttagctggagaaggacaggtcccgtgctcagactcagggctgtgagcctgccaggtatggagcacaaaataaggcactgagagacgtttggattgaatagtaaatgtctcgtgttcgctcacctctctgcagaacatgacctggaagtggagccggagccccctatgatgctccccttgccgctgcaaccaccattgccgcccccacgaccaccccggccacccagcccaccgccggagcctgagaccacagatgcctcacacccatctgtccctccggagccccttgccgaggaccaccccccgcatactccaggcctctgtggcagcctggccaagtcgcagagcacagagacggtgccagccacaccaggcggggagcccccgctatcagggggcagcagtggcctgtccctgagctctccgcaagtgcccggcagccccttctcctacccagccccgtcccctagcttgagcagtgggggcctccctcggacacctggccgggacttcagcttcacacccaccttctccgagcccagcgggcccttgctcctgcccgtctgcccactccccactggccgacgcgatgaacgctccgggcccctggcctccccggtgctcctggagacgggcctgcccctccctctgccccttcccctgcccttgcccttggcattgcccgccgtcttgcgggcccaggctcgtgcgcccaccccgctgccacccctgctgcccgcccccctggcctcttgccctcccccaatgaagaggaagccgggccggccccggcgatccccaccatctatgctctccttggatgggcccttggtccgaccaccagcaggggccgcccttggaagggaactcctgctcctgccgggccagccacagacccccgtcttccccagcacccatgacccccggacggtgaccctggacttccggaacgcggggatcccagcccctccaccaccccttcccccccagccacccccacccccacctcccccacctgtagagcccaccaagctgccctttaaggagctagacaaccagtggccctccgaggccattcctccgggcccccgtgggcgcgatgaggtcactgaggaatacatggagttggccaagagccgggggccgtggcgccggccacctaagaagcgccatgaggacctggtgccacctgcgggctcgcccgaactctcgccaccccagcccctcttccggccccgctcggagtttgaggagatgaccatcctgtatgacatctggaacggtggcatcgatgaggaggacatccgcttcctgtgtgtcacctacgagcgactgctacagcaggacaatggcatggactggcttaacgacacgctctgggtctaccatccctatatcctgctggcatggggggctctgcaccttctgggatgcaggaagtccctgctcacctctctgggccccaccacccagtctgtagcagcccgcggtgcccatgaaggtgacagcatgcaccaccgtcacttcccaagcagggtttgtgtcccggcaccatgc

SEQ ID NO: 71982 - DNA, 1051 bp, Homo sapiens
tacaaagaattgttatttttctcttttttgttgttggtggttttgttgtgtgttttttgttgttttttttttattcctttcccccaggccctctctatttgagactgtgcccgccggtttcaagatcaaggaaattggtggcaacaagacacagatggggtacctgggcacagcggcgaacttctcttccgtttgcggttttctgcctaattgtgcaactgaggaaataatttatttttcacatgaggaaatgcgtagcttgtagagacggctgattcaagttacatgtacagcctccaaagggctgtctccattctgtccccttcccataaaagaagtgggggtgttcgagaagaccagggaagggacccttgcctcacccctccccctggcctcaccttgctcccagccatcgtgcccagtgttaacctcggctggccttcactaaggggactagacctccctctccccaggagccccagccccagagtggtttgcaataatcaagatatgtgtcgagtcatttttctttcaactccctcatttttcattgaacaaatctctgcttttcaagagttgggggtttctgctattttttgctttctctccctccccctgcaaagatgagaaccaatgagttttagggatgtttgtgcgggtagactccatcatccatatgtaacttgttttgaagagaagtgtttccgttgtgtgtcttgatgtaaatatttgttcatatttttgtgaattcaatactatgtaccattgtattatagtaacttttataaagcaaaccataaatatactgacttttcttacagatacgccgtctctcttgctctcctctctccctctcctctttattctttctttctgttgggagcacatcctgcttctgtggagggtggagtggtccactcagacactcagatcagcaggggtttttttgtttgtttttgagacagggtctcactctgtcacctcaggctggagtgcagtggtgcaatcatggctcactgcagccttgacttcctgggctcaagtgatcctc

SEQ ID NO: 71983 - DNA, 1035 bp, Homo sapiens
acaggcatgagctgtcatgcctggcccttcattccttctttttttttttttttttttttttttttgagacggagtctcgctctgtcgcccaggctggagtgcagtggcacgatctcggctcactgcaagctccgcctcccaggttcacgccattctcctgcctcatcctcccgagtagctgggactacaggcgcctgccatcacgtccagctaatttttattttttgtatttttagtagagacagggtttcactttgttagccagggtggtctcgatctcctgacctcgtgatccgcccgcctcagcctcccaaagtgctgggattacaggcgtgagccactgtgcctggcccttcattcctttttatggccaaataatattccactgcctggatatatcatattttatttatccatttgtcagttaatggacatttgaattgttaccactttttggctattacgaagcatgttgctgcgaacattcttgtacagtttttttgtggagatgtagttaaatttaattccacagccacttctgggataggtcctaatctttactcatttcatcctcgaggaaaagccttgcagacctgaagtaacttatgtcaggacacatagttcctgccaggtggaatggggtcctaaaccctggtcaggacacatagttcctgccaggtggaatggggtcctaaaccctggtcaggacacatagttcctgccaggtggaatggggtcctaaaccctggtcctaccagtcttctttaatggtcacaagtctgtaagttacacagaagctccctatcattcactaccccatctactgcatctaacccagtgccagttggcccacaacaaatacttgttacaggggtgaatgagtggtggtctgtcttcttaggacctagaacaagagcgtcactctagtcttggatgcgccctgtgcctgtggctgcttgtctgggggcttctagggcaagtgtcttgtctaaatgttgatcactgaataaaatgggcccagcctggcttgccttc

SEQ ID NO: 71984 - DNA, 1077 bp, Homo sapiens
gatgcccaactctttccaagagcacctcgcgtcccgaaccggtgccttcaactcggagaagtcaagagacccgcaagaaacttgcacgactgcacccgccgccgcgctctgggggctgggcaggggcagctgggctggctcccggggaacgcgacccccccgcgccccgcagaccggctgtctcccatggacccctcggcacctgcagcctccgaggaagggtcagcgcgcgtgtccgcacgcccgcccccaccgcgcgcccagagccgggggtcgccgtgcgcccttcgccacctccccaggagggcgtccggggcgtcccctctgggggcgcaggaggcccgggggcgctgcccggtggccgcggcgcccggaggccgcactgccggcggcggcggcggcgcggctccccctgctctgtgcagctgccgcccggcgcttgcgcactgggccaggcgcgcggcggccccgggctttgtgtgtgtgtgtatgtgtgtgtgtgtgtgtgtgtgtgtgtgagtgtgtgcgtgtgagagtgcgagtgtctgtgcgcgagtgagtgagcggcgggcgggcgcgagtgtggccgccgcggagcgcgagcaggacccggcgggcgcgctccccagcctccgtctccccgccggaaccatgtcgggcaggtcggttcgagccgagacgaggagccgggccaaagatgatatcaagagggtcatggcggcgatcgagaaagtgcgcaaatggtaagcggaggcgcccgccgccagccgcctccccggccgccccgagcccgagcgcggctccagagagccgcggggcgcagcgccccggccgcctgccccggcccagccccgccgcgggccccgggacttggcgagggcgggcggacgggcgggcggcgcgcgagccgggtcacctgcgccaggctggggccgcggccgctgcccaggtgcgctcgcgcctgtagcccacctggcgcggcggcccggaggcggcgggcgccggggccaggcggttggagcggcggggcggcccccgccgcggcgctcggctcccgggaggggggctcggggccgg

SEQ ID NO: 71985 - DNA, 1035 bp, Homo sapiens
ttagctgggcatgatggcgtgtgcctgtaatcccagctactcaggaggctgaggcaagaaaatcgcttgaatctgggaggcggaggctgcagtgagctaagatcaggccactgcactccagcctgggcaaaggagcgagactctgcctcaaaaaaaaaaaaaaaaaaaaaaaaaaaagagcagtggggctttgttgctggttaatgtgtcaagaaagcccccccaaccagccatacaatcatagttgggttatgtttcattttcagaaatagatatgtgagctgggatgtggcctgtctcagtggcattccttagcatcccctttccctctggggactggggagaccccacgcccgactcaggactgaggttggattacagacgcagaattacaccagagggccttttcgagctgaggccaggaccccacctgggttcacatcctaactctccctgcaccttcccctggctgtgtgatcttgggctatttgtttaacctctagctttggggtttgtttagttttaatctgtagaatggggatggtaatgcctacttcataaactcactgtgaggattaaattaaataatctcttaaaaaccttggcatgggaccaagcacagtggctcacacctgtaatcccagcactttgggaggccgagttaggaggatcacttgagcccaggagtttgagaccagcctgggcaacacagggagacctcatctctacaaaaaaaacaataggtggttcgtatctatagtcccagcattctgggaggccaaggcgggcagatcatgaggttgggagatcgagaccatcctggctaacacggtgaaaccccatctctactaaaaatacaaaaaaattagccaggcgtggtggctggtgcctgtagtcccagctactcgggaggctgaggcaagagaatggcgtgaacctgggaggtggagctttcagtgagccaagatcacgccactgcactacagcctgggcgacagagcaagactcagtctaaaaaaaaatagattaaaaaaa

SEQ ID NO: 71986 - DNA, 1696 bp, Homo sapiens
ctgggaccaccgatgttggacgaggaagaggtataaacactggctgcatcttgtgttacccgactctatcgactccttcctccaaacgctttgtgtgtttcccccatatccagcagcggtcaggaccacctgttcggggtgactggaggctggctctgctgtttaatggttgtgtaacacctcggagcctgtttcctcctttataaaaggggaatgactgtagtgtctgcctccaaggggctgttgtggggatggagtgagataggtaaattgcttattccagtgcttggccagagttaggtgtccctgcacctggaggctggcccccttacaacctcatcgggaggcccgcccccatctcgggagggctttgggtgcctcctaagaagacttttggtgccacagctgttggaggtgcagtctgtccttctggcaagttggagggttttctggccggtcctgaaacattatatgagggagatgtcattgttgagggcagacatcccagacaccgttctgacatgtggattcggctctgggcagagattcctcttttccaagtcacagaaaatgcctggccctcaaagattaaagcgctttttcactctctctccctttcccactatgaatattaggtatttgctgcaggtaacttttttgtctgcgcaacagaacttctttggactggcagcagcggccttgagcagcttggccctgcagaaagctcatgatgggatctctgctgagttaagcttattgcattaggaactggactagcgggggctgtcttaggtctgctctggaggcatcgcgggagaagtttcctaggagactccataaacagcgtaataaaagagcaggaatatcttgccccctctcacctcacctttttaagagagctgtgagccccaagcatatccaggtttaaatgttatgcttttacctgaagttaaaatattagatacttagccctggatggcacccccctcaccgccgcggtccctggaataaacgattagtcaacttgttctttgttatgttcctgaaacacccctatttcctctcttgaaggtttccctgatgatctgttcccgtagctcctcctcccatcccccttacccggcacattggtcagtctctgctgattctctggtcttgccagtttgagctggcactgagcctgtaaagatgttctgctttttaaaaaacaaatggtgttgaggctgcagccctgtgcgccctccagtctctgattttgagcagttccattggaatcaaacccgactggatcgcagcatatgctatgcctcgagagagccttttcaaacaaagctcgaggtgaaagactggaatgtatcttattaagaaaacttaatcctcttctttattttaatataaacttctacatatacagggagagaatggatgagtcacggggggcatggactggaaaggtctcacctaagtaagctctgctaaatgaaaactaaatcagtctcccctttgcactcttgtttggataacctaaaggcttattaaacaacaccaaataattttagtaatggcattttttttttcatttctctcaaaaatattttggcagctggccgttgctcagttaactttcttgattgcaaaatgcaccatcagtttggtgcaagaagcttatcttgctctcttggctctctcactttcg

SEQ ID NO: 71987 - DNA, 1517 bp, Homo sapiens
aagtgttgtagaaagttaattttcctttttttaaaggatttatgtgatggctgatgagagcctgagctctcattccctagaatcaaattacttcttgggtagaaaatgtgcagtccagatagccagtgtcttaggtgattactttctgtattttgttggagttctgttgtctgtgattagaattcaggccacagggtgtgtgtttttggcagagttctctagccgcgtggatcagggaccctcgtgctggcctgtggaatggggtgctggtcacctcatgctaattccaggacttcgaggactggccgatttcagtggagactggtcctgggttccaggcagtgctaggtcccccgcgggggagatgctcttcttcactgtccggccagacgccttgaagagactgactctcacaggccagccctgccgtctttgcagccctgcttcttgtgctgccgccggctgtcacccaccaccctgtttcttttctggtacaaagctctgcccctgggagcttctggatccgcccagcttgagcctgccagggcctgtgtctcacatatggaccttgctatgagcttcctgggaccatcaacactcttggcggttgtctaattgaattagccccatgagggctaattgagagggagcctggctggccgggccccagagcatgaggctggctatgatctgggtttggccgccccagcacaaatgctttttccctccagaagtattaatcaggcacaccctgttgtgtgcaggcacggttctagcccttggggatacagtggtaagcaaggcgggttagtcctctcccctcatgggacttccatgctagtggggggattgtcagcacatcaggtcttatattgtgagtgcaggcaagaatagaaagaagatgaaggctagagagtactggggctggggagggtgggtggctactttaggctgggtagagaagtcctctgggggaggtgacctttctgggtgaactctgaaacctaagtgtcaagtaggagccaggcacgatggtcgttccaggtgcgggaagaggcccaggcagaggccttcgctggagtgagcttggcgcattgcaaggttagaaagaaggctagcttggtcagaatgtagagggcaggagtgagtggcaggaggtaagatagaagaggcaaggggccttgtgggccagggtaggaagttaggagatggttttggtggcactggggagtactggtttatctccacagggcggctggggccagtctacaggagacgggtctagggagggtgagagcaggagcgaggctaccagttgggcggttgtggagctccagcctcagactaggacggtagcagcgaggtggtgaggagctgtattcagggtggtttttggacttgctggtgaattggacctggcagatgaaaggaagaaaggaatcaacagtgactctgaggtttggcctgagcagctggggccattactgaaatgaagaaggctgggcaaggagcggtca

SEQ ID NO: 71988 - DNA, 1051 bp, Homo sapiens
aaacagtatataattatcctagcttggtgttttaaacaactgttttctagttgagtagcagggtcttttaaattgcctcttttgtctttaaattatcaagcagatctttctctgccttgaagcagaaaactctttcatccgtttgtagtcaggcttttttctttttaacacaactttctgtaagtgtaatttacatagcataaaatggacccattgtaagtgtaaggttcagtgatttttttttttagttgtgcagtcattgtcacagcccagtgctgggacattccatcacctcagtaagatccccagagtacatccatgttgtagcacacatcaggtgtttagtgcattttaatgctgaatagtcttcagttttttggatgtaccacattttgttttcttgacatgtttttgaggagacacctagtacctttgttattcgggtattgacttcccatttcctgtaataaggctcttatagaatcagctaggaacttccttacaggatgagaagaaggaaatggctgtgaggtatgtggaaagatgatgggattggaagccacaagacagtggtgcgactggttagcatctgccccttagctccttaagtcttggtgcccatgagggtggaggatgcaagagagagagggttagactggagtcatggttaccaaccttactcttcttccatggctttcttttttgaaagatattaccttaggaacaaagcgcattcagtaatttaaaaagaaacaaattaccagtatatgccacaacatggatgaatctcagaaacattatgttgaatgaaataagccttacccagccgggtgtggtgactcacgcctgtaatcccaacactttgcgaggccgaggcaggcagatcatttgaggtcaggagttcgagaccagcctggccaacatggcgaaaccctgtctctaccgaaaatacaaaaaaattagctggtgtggtggcacatgcctgtaatcccagctactcgggaggctgaggcaggagactctcttgaaaccgagaggcagaggttacagt

SEQ ID NO: 71989 - DNA, 1045 bp, Homo sapiens
ggtgtttttgataacgcctcccatgtttctaggcccctgttccattcatctctgttttcatagccctggttggctactttctctgaaaatgtctgcttcctcctccttcctgataggagcctttaccctgggaagctttcaagtctctaaaaatggcagcaattcttatcaccactttaggcacccctccttgtcccactgtcccaccctcccaggacaggtgtgtctaggggaatggtggtcagcaggcgcggagctgaacggtggcctgtttattctgagtccgggagtggaagctcctgcgctttcacatttgtccagcagcctgctgtggggcaggggtagaacgcacagtcagcagcatgcccgcaggactgatgccgcagcttgcatgccttgtggtgctctgctgacagacccccgaggctgtgaccgcggtgtccccgaggtgactcctgcccttggctgtttgttgtgcctgaggtagggagagcaaggctctgtgaaagttgtgattccaggtgtgagtccccccagctggcgtgagctctcacgtggaactggaatgctgcgggtacatgtccctgcaagttacaaaactggggaatgacttggtacatggaaggaagagctgactcaacgctctgaaaaatgatttaagtattttttgtcagattgagtccggagatgccgctgtctggcttggcagccttgcttctcagctgctcgcttgtggtgcttccgtgggcctgtctgtcctaacacttgcattgtcagaagagtgctcggcagaggagcttttggccgaaggcatgaggactttggttatgggtgttttttttgggcggacagggtctcgctctgtcacccaggctggagtgcaatggtgtgatcacagctcactgcagcgttgaacccctgtgcttaagcagtcctgtcaccctggcctcactacaggtgtgagccactgcacccagccttaattttaaaacataaccagggccaggtttggtggctcacgcctgtaatcacagcactttgggag

SEQ ID NO: 71990 - DNA, 1042 bp, Homo sapiens
tgcgcctgataagtttgtttgcttatctttgtttgtgtgcttgttgctggctccttggagctatgggtgtgtttgtggggtgttggagatgactgaccctgattggtaaaatagggatgaagcgagcagggcagggtgtggtgtgagaaataatgtcatctattcttccggtgccccccacttcttccccacagagagattttccttctgttccctgtcctagagggccctggggcagcagcttttaggttcttggaaagatggggagcagccacccccgctgagcaactcagattgaggttggggtgtgctgccctcccagacgactggaagattgacacagcagcgctctttcagttctttgttctttgttggctgggatcactggaaatatatcagtgagacttaaatgtgtcctgggagcttgagctgcccagtaggcgacccatggctgcagaacagccagctccagcaatgtgtcatcctggaagggcagctggcctgccttctgtcaggtcacatgggttggctgatgttggtttctgtgtaatttttttcctcctttttaacatggtgcctcaaagtcacggggacttgagggtagaaattaggagggaagggcaggtttttcagctggctcttgggctgtgcttgacaaagccatcattgttttgaataaagtgccagttggtgtggtttgcgtcgctccggtgctctgaaattggcttctcttcttccacctctgctgctgatcctgggggtgggctgggaggaggaccactggttccagagaagaaaccacttccctttgcctccctgctcagcaggagcagcgggaacagcgtcttaggacagtgagttaactactgcagagcagctgggcgtggtggctcacgcctgtaatcccagcactttgggaggtcaaggcgggaggatcacttgagcccaggagtgtaagaccagcctgggcaacatagcaagatcttctacaaaaattatttaaaaaattagccagtcatggtggcatgtgcccgtggcccca

SEQ ID NO: 71991 - DNA, 1009 bp, Homo sapiens
caaggccatgtctccaaaaaaaccaaaacaaaccaaaacaaaaccccaaaacaaacaaacacaaaaaccaaactattgcaaagcagattgctgtctcttggtccagagggcatcctggaccccagctgttggcagccagcgggcatcctggaccccagctgttgcagccagccttgcctcttggtaatgccctgggggcattgcccttccaggcatcgtgctgcgcactggtggccccagcctcacttggccctagcctgttccagacatgagaccgcctgctgtggtcaggttccccacctgctgtccctgcagcccgggctgatttccccaatgacctttttggtctgatgtctgtccctatcatgtgtatgatgcctcaggctacaaataaccagcaagagagaacagttcctctgctgaactccctcagggggaggagcagagcctcagggctttggctttctgatgccaacttaggttgcattgtcctacctctgcgcctccttggtttcctatttgtgtggctatatgaggaatagtcctcatatccaaatatatttgtggaaatcccagccctgaaggagtttagggcattaggagaactcccttggtgggtgggagggtggaggcggctcacatggaaaggtgtttgtagtgagaagatggagactacatttcctccccaagtcaggaacttcgtttctctgcatttgaatcaatagctctccaagtgcagtgtggttataccccgacatttgaagagccaggaaggaggaaatgcagagtgcaaaaacatgtcaggtctctgccccagacagccaagttcaagtgttttttttttctcaaagatggagctgcagtgcaggaggagtgtagacctggtgaacagagctgggtggtcaggtggcaagatgaaatgaccttatctacagggttagttattcagactgacttgggaagcacctctgtggtaccatttgaggagcacagaagaatctgtgaatgg

SEQ ID NO: 71992 - DNA, 1035 bp, Homo sapiens
ggcaggagagtggcctgaacccaggaggcagagcttgcagtgagccaagatcgtgccactgcactccagcctgggcaacagagcgagactccatctcaaaaaaaaaaaaaaatgtgtgtacaaaacccataagaaacaacatccagaagtggtcccaaatatatgtatctatgggaagggggtgtatgatgaagatggacctttagtttaatggggaaagatggattatttaggaaatcttacctaaagcaggatccctacatcatccctgtacattcattccaccaaataaatcctagttggctttattgaattgaatgtaacaagggaagccgtgaaagttctagaaggaaataggtaagtgttttcaaagtcttaggctaggaaaagccttgttaagtacgacacaaaaaacagaagcataaaaaaaggacttctaaattttgactatgttaatgaaaattagtgtttatcacagcattgtttatttgaaacagcacgtctgttaatataaatgtatgtctgtggggaaatggttaagtagattatgataaatgtgtacagtgaaatattctgtatataaaaataaaataatataaaactttattggcataagatgtctgtgacatataagtgaaaaatgggttataaaacaaacctgttcctacctatttaagcattatgttattcatatatatatggattttttggttttttctttttgttttgagacagggtctcactctgccacgcaggctagagtacagtggtgagttcacagttcactgcagccctgcagcttccacctcctggactcaggtgctcctcccacctcagcctcccgagtagctgggactacaggcatgtaccaccacacctggctaatttttgtatcttttgtagagatatggtttcgccatgctgtccaggctggtctcgctcttctgggttcaagcgatccacccacctcagcctcccaaagtgctgggattacagatgtgagccaccacatccagcctatttatatatttttat

SEQ ID NO: 71993 - DNA, 1075 bp, Homo sapiens
aaattgtcctcggggattcccgagcagctgcaatccaggctgcctctgctcagtaatagaagatggcagagactttggggagactctgctggactccagaaacaagatattcccaggctgctagccagctgtgtgagggccgttgccttatctgagctctgagttatttagtttttaatggaaacaagacccccgcagacacgcagggaaacacaaatccctatcagatcagcagccatggacgtggagacgtggcctttgtccctctgtcccagcgcccggcctgtgtagttggacttggcagtgtgcagcgctagaaaggaattgtctgaccccagcattgcttcctggctcctttcttcctttttcaggagagcatcctgccgaccacagccctccccactgtgagccttcctgacagcctcatcgcgccccctaccgccccatccctggctcacatggatgagcagggctgtgaacacacctcccggactgaggacccgtttatccagcccacggacttcggtccctcagagccgccactgagtgtcccgcagcccttcctccctgtcttcaccatgcccctgctgtctcccagccccgccccaccgcccatctcccccgtgttaccattagttcctcctcctgccactgccctgaaccccccggctccacccaccttccatcagccacagaagtttgctggagtcaacaaagcgccgtctgtcatcacccacacggcctctgccaccctcacccacgatgcccccgccaccacctttagccagagtcagggccttgtgatcaccacccatcaccctgccccgtcagcggccccttgtgggctggcactgtctcctgtcacccggcctccccagccacggttaacttttgtgcaccccaaacctgtatccttgactgggggcaggcctaagcagccccacaaaatagtgcctgctcccaaaccagagcccgtgtccttggtgttgaagaatgcccgtatcgccccaggtgagccaggcggggagactcagtgcggggctccccccgacccagagggatgttttcccatccc

SEQ ID NO: 71994 - DNA, 1887 bp, Homo sapiens
cattgtcccaaaggcagaggccaccgtggtaggaattccaccaaggccagaagggaaaaaggaagaacccaccgtgtctggctgtgcgggccctggggagggtcgtgagtgcagcccctctctacttctgtgcctttgtaaaacgtgtagataaccgcagtggttggctgagccaagaactctcctaaatcagtggctttctccccaccccttgctggggagtcatttttaaaaaaatctgtgggatataaaattggcctcctgctgcttcagcctacctctccctctgctgacttaatgtcgtgattctgtttcttcagatatttaaggctgttaggttgtgtgagccttgaagtgtgtgtgtgtgtcccagcgactgtccactgtccaggagatgcatgtctttgtattggagatatttctgtaactcattctcttggtgctcacgattgccatggccatagggccacagtgccgtatctgctgcagacatgattgtttcttgttctagaggttttcttgttttcgaatcttgcctgatgaatccagccagaccaaggggcctagatttgacctctgtcctgggctcctgggccaggtgcaggaacatctgaggccactctgctggccacctccagtgggtgctgaccacaggatgggctttgtttacactcattttcaccctgattcttgcccccactttcataaaagaaacttcaaaatgctgacgctttggagagtaagaaaatcaatcttggctgggcacggtggctcctgcctgtgatcctagcactttgggaggctgaagctgaaggatcacttgagctcaggagttggagaccaaccctggcaacataacaagaccctgtctctacaaaaaaaaaaaaaaaaaaaaaaaatttagccgtgtgtagcagtgagtgcctgtggtcccagctacttgggcctgaggctggaggattgcttgagcctagaagttgcagtgagctatgatcatgccacactgtactccagcctggatgacagagtgaaaccctgcctctaaataaaagaaaatagaggcagactgtggtggctcacgcctgtaatcccagcactttggtaggccaaggcgggtggatcacctgcagtcaggagttcacaaccagcctgaccaacatggtgaaaccctgtctatactaaaaatacaaaacattagccacgtgtggtggtacacgcctgtaatcccagctactcgggaggctgagtcaggagaatcacttgaacctgggaggcggaggttgcagtgagctgagattgtaccactgcactccagcctgggtgacagagcaaaaccctatctcaaaaaaaaaaagaagaaaaaaatagaaaatccaaaaagaaaaaccagaaggcctgctggcgtataaatccctgggcgggtttctgataaattgccctgtgctgtcagcccctgcactgcactgctgccttccatggtgggtgggagaccccagagcggggcaggcgccactgagggcttttcttggagtcggccagcaggccacgcagcatccggcaccctgggcgggctggctagctgccttcttaggacatctctactttgaaggattttaccgcaggaagcaatagcagcgctggccattggtgctgatgacagcattgggtctggttgaggggaaggggctggaaagcagcagacccccccagtgctgcgcatggtcccggagctgtcagccaggggagtggggtcagccgtcagccagccctcccatttcccgcccatgggccctgaccacactcccttttctagaagtcaatcctaaggtttctctgctctggctaagaggatgtaaatttggattcttagagggcatggcaccccca

SEQ ID NO: 71995 - DNA, 2734 bp, Homo sapiens
tagaggggagctgcagctgagaactggcgaggccccttcctccaaggccctagctggcccccgggtgaacctgaggtggcaggttcaggttttcaagatggtgaggtctcgctgtctgctggacagtacgttaggctctcagaactcatgggtgtggagctgggcctgtcccgggccagtggacccctgtgtgtgggggatttggggtgctgtgggcctggttatgcactggcagatggaccttgctttggtccagctcttttccttaccctggctctgacgtgggaaggcttggagggcccgtctcatcacccccgttcgccctcagctgtccctttcccttgtcgcctggccgctgcctcgcccgcctgaggcctcctagcaggcagcctgggtgtgagttgagcctctctcttttccctctggtgggaaagtggcctttccctcaacacctgctccccggccccagaggaacccacctgttttggagctcagcttggcccagcgtttccttggggaagggaaaggagggctggacagcactgatccgggcaggcagcgtgtgcagcagtggccagccagagtgccaaagatgcacggggatgtggtgtgtggctccgggccctcgacatctctgctttgggggatttttaccttgtctgcacacttgtcaggggagaggggacagcaaggtgggaggttgaagagctttgaggctcagcagcatgtttgtggcattcggtggacaccatggccttgggcggctggacaggtttttgtgatgtgagggacacgcatggggcacatggtaagcttggcaagggctccaggaacgctgacgaagggttttaggacccccacccccatgcctgtaccagggctggcctccagagcgggtgaggacagagcagctgtgggcttttcattctgaggtcttggcccccctggccaccgcaagggactctttgcttgtcagggcttgcaaaaaccaaccttcgagaaagaaaagggaactcttcacgttgaatgttgactttgtgtgtatgcgtgtgtgtgtgtgtgtgtgcacgcgcgcgtgtgcgtgttgacttcatggaattttgttttgtgaaattcccctccaatcgtgtcagaatttacctccatgccccagtcacactgttggttctgcgctctgaacctgggtgtagctcatttgaaggactctcttctgcgtttcctaacagttatttggtggtctcaagagttgaggttgtggagggttgggagaaactgaagttctatacatttccatagagtttacatcctgcagttaaaaggcagggagggctcagcccgggccccacagctccaggccatcccctacgggctgcccacagtgcccccttttctctagccgaatctttttcgaacagcccgggaaaggaaaacggattcacttgctgattttgttcacggcggaagcaccatgttccgttcctttttcaggttcagtttgttgtgtaaatggcggttttttctggtgtgagctttggtgatggtggcagggctcctttgaagagatggttccacctcgtggtctgaagaacaaaccagagaagagtctggtttggccagaggccccctccggtccacgtcaccctgagtacacccctctgattgctctgctgtcaagaagcacgtttccaccagctgtattcaacactacaatgcattttttaaactatatttgcatccaagacaataaagacaccttattttttttgaaaagcctgtgatgtgtggccttaaatactatcctgttgcagcagtggaagagatgggaaaatgaagagatctgagcatagcgatgcccttggccagctcactccttctaacctcgggaggtgtgataagcctgggatggaggcattgggtggggaagaggcccagggtgggagggcgattctagaggtgtgtccagaaagtcggtgctcctcttctaaagacaggcctccccacaaaggctgatgagaaaggcccagtgtggcgggttctgcctgtggcctcagcaggggctagtgaggcaggccactgctccaggccgcacccagatggacagaactcactggtgcccctataaacctcccgtttcctcatccgggacttgggcaaagagcaccaggcctgcacgcttgacagtttcacgtgaaatcacatgtgtccaagtgttcagtagcccgtggagctctgtgcttagagagtgcagtcatcagcacagccagcactggcccagctctgcaagatcctcagtcacagtgggagcctccaggcactgtggttcccctcctcgttattgacccaataccagagatgggaaagactagaaagctggccagtagaactgttcctttgttcaggtgctgagaaggtttggctcatcttcgtttaatgtagcagcttttctctgtcgttttcctgggccccgcgcccacccatctggcgccctgtgcctggacagggtgacccagcgagaagacacagccccgcacagagccatggggttgcttcaccagatgactgcccagatctggatctcgatgtagaatgcagtgggttgatacacaagctcttgtctgatcaaacccccatacctcccccgaggagacacaaagcaagcctgggccttgagagccgggggtcctagagggaaaggtgagcgcctcacagactcctttgggctggaaggaactcg

SEQ ID NO: 71996 - DNA, 1061 bp, Homo sapiens
aaagtgctaggattacaggtgggagccaccgcgcctggcttcttctctttttttttgagacggagtttcactcttgttgctcaggctggagtgcagtggcgcaatctcgactcactgcaacctctacctctagggttccagtgattctcctgcctcagcctcctgggtagctgggattacaggcacgagctactatgcccgtttaattatttttttttttttgtatttttagtggagacagggtttcaccatgttggccaggttggtctcgaactcctgacctcaggtgatccacctgcctcggccccccaaagtgctaggattacaggcataagccaccatgtccagctcccattcctgtttcaaaactctgcctccctcctctcctgccctcagcaggagcacttcagtttataagtcttctaggagaagtccccccacccccgtccattgcttgcattcagtgcaacggtaacttcaatcccattgcttcccgattacgattaggattacgcagcccaggtcccagcaagaggagctctctgtggctactcaaccgcaccccacacttcttccctctgtgctgccgtgcattcccctccctggaaggcccagcgctctctctccgctgtggcctggcccagccctccctgctgtgcccccggaaccaccgccagtgctccatttctgctgctgatatcaagtgcggtgtagctgtcagtaccacattttatctctcctttttcaggacaaggaccacatctcattttatctgtcatctatcatagcacacagcttctatgtcccaggcacttggtaatctcgcaatgtaaatcacatctgccgctgcctgccagtgtgagccctaggaggtagatgctttataatacccatgttagagataaggaaattgaggcttacagggttatatcagatatgccccaggcgtgagccactgcacccggccttatgttatcccattttcaacttcaaaaaactctccctatagagattgttgtcctcattttacacatgagaaaacaggtttacctttcaacata

SEQ ID NO: 71997 - DNA, 2347 bp, Homo sapiens
gagattagaggcgtgagccactgcgcccggccttcaaaacatgtttaagtgaaaaaattataaaacatatttaataccttttatgctgttacataaatttatagtaaaaaaatatttttctatgcattcctttacctttaaagattagtcaaggtgatgaaagggatctttgacaattttattcatgatctctttgtcaaaaagaaatggaagatgtgtagttaaaaaaattaatcaaaggtctgtactaaaagctctgtagctataaagatgattgtgagagttgcatttaataattgtgatgttggccgctgacagctgaagaaaaatgctgtttttgacagagtgtcagttaaatccagacctgaacatagaggtggaagtttctttgcagagagagaagacagggaggtcaaggaaagtgaccccaagaggggttcagatgacagccacagcacccccaggccaacgtccacatgagccttccgcgccctgcacggctgctcaacccgattgtcccatcttttggcaggcgcagatcaggcctctataaccgccaggaatcacattcagctggtgaaactgcaggtggaagaggtgcaccagctctcccggaaagcagaaaccaagctggcagaagcacagatagaagagctccgtcagaaaacacaggaggaaggggaggagcgggctgagtcggagcaggaggcctacctgcgtgaggattgagggcctgagcacactgccctgtctccccactcagtggggaaagcaggggcagatgccaccctgcccagggttggcatgactgtctgtgcaccgagaagaggcggcagatcctgccctggccaatcaggcgagacgcctttgtgagctgtgagtgcctcctgtggtctcaggcttgcgctggacctggttcttagcccttgggcactgcaccctgtttaacatttcaccccactctgtacagctgctcttacccattttttttacctcacacccaaagcattttgcctacctgggtcagagagaggagtcctttttgtcatgcccttaagttcagcaactgtttaacctgttttcagtcttatttacgtcgtcaaaaatgatttagtacttgttccctctgttgggatgccagttgtggcagggggaggggaacctgtccagtttgtacgatttctttgtatgtatttctgatgtgttctctgatctgcccccactgtcctgtgaggacagctgaggccaaggagtgaaaaacctattactactaagagaaggggtgcagagtgtttacctggtgctctcaacaggacttaacatcaacaggacttaacacaggcctcttgttccttcctttctttccgtttctctattgtatccaaaggagaagagtgtaagattttgtttgcatctgaaagagaaaatgcgtctctcctggggtcctatgcagcctccttccttgaggtcccagactgcagcgccccaggcagcgcccggaatgccccgacaggttcctggcagcatttgctacactttggctcccattcaacatatgctggacaagttagctgggttgcagtgtttttaatcagagctaacagggtgagaggagttaaaaaaccaagttggcattttctgtagagcagcaggcatcaatttcgcatcacgatagagaatcaacactgagtccactctcaggctgttgcccaacccacccttcagcgctggggtatggggccagctgcacacttgagcccctcatctgtcaccagtgcccacatggtccacatctcgagggggctgaggcggtgaaccagcaggagccccctatacaggcaggggtctaaggggtccaggggccgccggattccaaatgtcttgaagccagcatggtgcatagggctcagccccagccgcctcaggcacatacccacaaagacatcatcaatggggaagagttcagcatcttccatgatagcctggaggcgccgcactgtggctctggacatgacatatcctcccccaccagcatagggtgggtagtgggtggccctgtacattgagggtgggatgaagtatttgaccttagtgttcctgttgggcagggcttggcggatgacatctcccaccaggaggtcctgggctgggtcccagccatccaggaactctaacacgttggggacgtggacaaagacatcgtcatctccctttagcatgaaatgggcctgggggcaggcagccaccacccagcgctgcaggtgcagctccttgagcgtcaggttgaagaagtcctcagtgaagtcccactggaggatgtcatcaaactccctactctcataggcca

SEQ ID NO: 71998 - DNA, 1028 bp, Homo sapiens
catagcgagaccacccctctacaaaaaataattagctaggtgtggtggcgtgtgtcggtagtcctagctacctgggaggcaggaggatgatttgatttcaggagttcaaggctgcagtgagctgggatcacaacactatactccatcctgggcaacagaatgagaaatgaaaaacctacagtggctttccatgaggcgttcagaactaaaattaaactaagtctccctgcactccagggccctagtgagtctcatttctcttagctccaaccaggctagatccctggacatcccctgcaacaaaagtattattttcctcattgttacctattctccaggatgcgtggccattctgattctaggtatctttagtaccaagtctcacctctatttaaagcctttccttattcctgtccaacaactatctcctcctttttggccacttaatattgtatattttgatatttgatgataatcctttggcaccctcctgagtcatcagagcataatgggaagggtacagactttgaagtgagatttggtttgaggtctagatgtgactttttggaaaagttacataactattctgagcttccatgtcattgcttgtaaataagaaaggataataactggactgttgtgaggaacaagtgaaaacacattataaaatgtagcacattatgaagacttatcagaatattgagacaaaattagcttcttgtgagcagaggtgtctttcttccttttgtagtcctgtataagatgcctaatgaatacttaattatttgaaatataaagttcttgatttgttcatatcaaaaatatttcttgactgcctctttcaacatgcagtgattctgagtgtttgtactctgaatagcaaaaacaagacaacatagagtgattgattttttgtttttgtttttgttttgttttgttttgttttgagacgagtttcactcttaccacccaggctggagtgcaatggcaagatctcggctcactgcaacctccacctcctgggttca

SEQ ID NO: 71999 - DNA, 1391 bp, Homo sapiens
tcttctgtccatcaagggcccaacatccaactggtcccacagtgagcaggggcaactcttgcttcttcagcatctggccacttcgtttccatggtaactgccacgtgtacttttctagcagtctgtggccactccgtactcagctgaaaacactgtttcagccccctctctggtgacctcagccttctccaggtgtatctcttgatgatcttggagaccagcagccacagctgctgctactcctgcaggagactgtcaggctgtggtggggggcaggggtgttggaggagaagttgaaaatccgtgtgttctctgcccctctgctcctccatcttagcttctggaggagttaaggcaccaagggcaccaagtcaggttggcagttttgctgcccttgcccaagcctccagcaaaactagctggtcccctgctttgctgggtcccagccaggtgtgattttggttgttgattagtaaccacacattgtttttccccacctttttcattagtggaggtttttgttttgttttgtttttgtttgtttgagacagagtctcacgctcttttcagactggagtgcagtggtgcgatgtcagctcactgcaacctccacttcccgggttcagacgattctcatgcctcagcctcctgagtagctgggattacagatgtgcaccaccacacctggctaatttttgtatttttagtagagatggggtttcaccatattggccaggctggtctcaaactcctgacctcaggcgattggcccacctcggcctcccaaagtgctgggattacaggtgtgaaccaccgtgcccggcccattagtggagttctgatgggcacggtaaatattattaatgaaagagaaattctgtatacttttttaaaaatctctttaatgaaagaatgaagagtggcagagataataattgaaagattagtttctcatggaattaatttggccttgatattcagtatttggaaatgtcttaaagaaaaccattttcattgtagaaaatccttttttaaatacttgttatatcccagggagattagtttataccttccacctcaggcagtcatcagctgctttagagaatggaatccaccctgcccctccattttttggttcctggggctcaattcaagtctggtcaagtctccctggctggggattctgtcctgggaacagatactcagttgtagtctcatgtgtctgcactcacccaagactctatatacttgcttgctcagagcatagttagggcagctcctaaaaatgcattcagcagaagactgaaaaacttcaattgcttcatttgtatgcaaatagaaaatggtagataattatatattatacgcctttgtgtaagttcatttaatac

SEQ ID NO: 72000 - DNA, 1048 bp, Homo sapiens
gtcccagtccagcatctacagataattatgtactgttagtgtggttttcaggtattgtacagttgctttgtaaaatagtaaagcacttaggagtcagaattaaatacacctcttttgttcgttgctaatgtatgtagtaagaactcgaatcggattattccctgagggatagcagctttcaacttctgtgttgagaatctcagaagttaaaaaaaaatgttgagatcaaaatcagtattcttaggtttcagatgaactgtctggatgaaggcacttgtttattcttatgaatgataaaatgtttgaagaggtgggaagagaagcattaataataaatagtttttaattctgaaatgtttaaattttaggtcaaccgggagaaaaccgagtgactctgatatttttccttgggggcgtaaccttcgctgaaattgctgccctgcgatttctctcccagttggaagatggaggtacagaatatgtcattgccaccactaaactaatgaatggaaccagttggatagaggctctgatggaaaaacctttctaggatgttcagaggagacttaacaagtgtactgcagaataaactacctctttgaagaaattgctgaaaggaagtaaaaccccatagaagaaacatgggaatacagaatatattctggggtcagcttcttaaattatactactgtttactgctttctccgtctcttttgtattccctttttttttttcctttgagacggagtcttgctctgtcacccagactagagtgcagtggcacggtctcacctcactgcaacctccacctcctaggttcaagcaattctcctgcctcagcctcctgagtagctgggactacaggcatgcaccaccacacccggctaatttttgtatttttagtagccatggtgtttcaccatgttggccaggctggtctcaaactcctgacctcaggtgatccacctgcctcggcctcccacagtgctgggattacaggcctgagccaccgtgcctggcccctaatctgctgaagaaagaagaatag

SEQ ID NO: 72001 - DNA, 1032 bp, Homo sapiens
tatatacttttcttttctctttttttatgtaatgtaatgatttatttgtattccattcttcctttctcattaatataaatgaaacatcctctgaacaatacaaaaaacaaagcacttaaaatatcggccaggcgtggtggctcacgcctgtaatcctaacactttgggaggccaaggtgggtggatcacctgaggtcaggagttcgagaccagcctgaccaatatggtgaaaccctgtctctactaaaaatacaaaaattagtttgggcatggtggtgggcacctgtaatcccagctactcgggaggctgaggcatgagaatcacttgaacctgggaggcggaggttgcagtgagccgagattgcgccactgcactccagcctgggcaacaaagcgagagtccttctcaaaaaaataaaataaataaactatcttccctgcttgaggcactgctctcttgtttatttcaggaaagacacaatgctaagaccgtgggggagatcaagcagtttgtttcccagttgccccacatgcaggcagcaaggggctcgcttgcaaaccatacctcaattgcagaattgatcaaagatgtcactagtgagtatcctttgtaatgattgtttcagtctggggctacttgcacatacaacgtttgacacctaggtcatcaacaccacaatgcctcttcgggagagtcagctctgtcttaataccacgtgttcttctcagtgttaatgaagtatacatatgttaatagttaaggatattccaggcggggcatggtggctcatgcctgtaatcccagcacttcgggaggccaagacgggcagatcacttgaggtcaggagtttgagaccagcctggccaacatgatgaaaccccatgtctactacaaatacaaaaattagccaggcacagtggtatgcatctgtagtcccagctacctgggaggctgaggcaggagaattgcttgaacctggaaggcggaggttgcagtgagccgacatcacgccactgcactccagcctgggt

SEQ ID NO: 72002 - DNA, 1025 bp, Homo sapiens
tcaagtttagccagtgtgactgcggcaggggaagtcagcacgtgtggcaggtgataatgagactgaaatccccagcaaccccgagctttgaaattggtggcttcattatcaccttcctgcctcctcttgcccgttcactagtttattcttgctcaggctcctttttgaaacatgggaattcaacaagatcataaagtctgaatatttcaactttggaaacataaatgggaagtttttgaaaatgaatttttcactgagtatgtagttctagatttttttttgacagggtctcgctttgtctcccaggatgggtgtagtggtacaatcatggcttactgagctgctacctcccaggctcaagcaatcctcccacctcagcctcccgagtagctgggaccacaggcacatgccatcatgcctggcagagttttttgttgtttttttttctgtagagatggggacttcctgcgttgcccaggctggcttggaactaggccatgtaattccagattttatctttctcaggaattatgttcattaattgattttcatatttctgaagttacttttggtttaagttattaaattttgccaaaaaatattatcatcaccaagctatgttcgctttgttcatagactatactcaagactaaggttcaggccaggcacagtggctcacgcctgtcatcccggcactgtcggaggctgaggcaggaggatcgcttgagcccagaagtcctagaccagcctgggcaacacagcaagacactgtctctacaaaactttttttttttttaactagctgggcagtggcgtgtgcctgtaatcccagctccttgggaggctgaggtaggagcctaggaggcggaggctgcagtgagctgtgatgacaccactgcactccagcctgggcgacagagaccctgtctcaacatcaaataaaagactgagggtcaacagaaaaaatggatttttttctgttacacaggaaacttttcctctttatggtaccctctaaacataat

SEQ ID NO: 72003 - DNA, 1022 bp, Homo sapiens
agggtgaccagacgagcctgtaccacgcagccaaggggctgatgaccctgcaagctctgtatggaacgatcccccagatctttgggaaaggagaatgcgctcgggtgagaaccggctgctttgtggtggtaaaggagggcccttcacaccccaaaagggaggaggaacgggaagctccttacaaacaaattcagttgatcttaattatttatgaatactgtactcatgaatttgcctactgattaaaatgcacttataaccctccaagtcagtactcatggtgcttttgtcggcgtgcacagtggtgacagtttgagtaaccactgcgcatgttcccaactgaggcagctgacactccaccttcccatttcagctctcagactgcaaacaagtgtacttttcacagtctcactgtcatattttccacacgtgtgtactttttttggtgatttcactgtttaaaatggcctgcaaatgtaggactgaggtgcagtcgggtgtcttgtgcacaagaaggctgtggtgtgcctggcggagacattacgtgtgtcagagacgcttcgttcaggcacgagtcacagagctgctggctgtcagttcagtgtgagtgatcaacaattatgttaagtcaggcatctttaagcagaaacacatataaaactgggttacgtattgatcaattgacagaaacgttgagaccagaggctcccaggaacctaagtctgcgtttctcctaggaacagtggttccatcttcgctaatttagtgtttgcagtgacttcatagaacataactactgcgaatcacaagaatagactgacctgattttatgcctcattggcaaatggcagctgccttggtgcaagtgtcgggatgggtgccaacagcaaggtgcttttctagagctgcttatttctaagcaatgcactcttccagtttttctccttttttacttttttgattgtctttctggttttagacaaattttaaaatctgcttgttcccaggggggccccacctca

SEQ ID NO: 72004 - DNA, 1031 bp, Homo sapiens
ctgggattacaggtgcctgccaccatgcccggctaattttttgtatttttagtagagtcgtggtttcttcgtgttggccaggttggtctccacctcctgttctcgtgatccgctcgcctcggcctcccaaagtgctgggattacaggcatgagccactgcgcccagccatttttgtatattttatagagacggggttttgccaccttgaccagactggtctcgaactcctgacctcaactgatccgcccgccttggcctcccaaagtgctgagattacaggtgtgagccactgcacccggcctgagagtcagtatttatatgatttatctagccagcatttatttagtgcctgctatgtgccaggcagtggggataaaaaaagcaaaatggtccatgactcttaggagctcataagctaacaaatgttgcttcctttgcagtgaagatagacgaggcccaacgagagattttcatattctgtttgtgccacgccgtagcctgttgtgcgaacagcggttgaaggatctgggtgtcttgggatcctttattcacagggaggagtacagcttagatctcattccattcgatggggatctcttatccatggaatcagagggtgcattcaaagtaagtttggcatttccttaacttcaggcattaatttttgcccagtttatgagtgtgagcataccacagtactgattactgtgaagctgagtcccattttatatgtttattgatgtttaagattttctgttcaacaaattgttcattttctttgcccgttttttctttttgagtaattctttgtatattctggatgttgatcattatggattataaaagctgcaagtatcttcccagtctgtgacttgtcttttaactttgtttttttgttttgttttgtttttttgagacggagtctcgctctgtcgcccgggctggagcgcagtggcgcgatctcagctcactgcagcctccgcctcttgggttcaagggattcttctgcctcagcctcctgagtagctgg

SEQ ID NO: 72005 - DNA, 1057 bp, Homo sapiens
aaataatttttgtaatgaggactatgtaaatctggtactgacattgaaaaatatcgtatcctaaatcactaatctttggggaaagaaaagggtttcttttcattacaaagaataatccttgctgatgtcattgctttgcattttatttcttgtttttaatcatatttgaatagcaagttcagtgataagtgctgataattgtacacaagataaaagaaaactttacttctgtgtagcaatctagtttgaccttttggccaggtgtacaggatatatatatatcagactaaatgtaaggaggaggtttgcagtttgtaatagacttgtcatctgtaatctcttcacccaggagactttttttttttgcgagtgactaatttcatctgtcttttcagtacacattttcatgaataatttgttcattcatgtcactggaaaatgaaataatttcatcaagtttttttctcttggtctttaagttggacacacttaaagaaaacaacttgaaaaatgtggaagagctgaacaaatcaaaagaactcctgactgtagagaatcaaaaaatggaagaatttaggaaagaaatgtaagtttctatcctttgagaaaaaaatatggaatttattttaaattgaaaatgtgaacacaatgctaattacttaaaaattatttgagaagtacataaagtaaacgtatgcagactctattgcataccccagaagcaacatcagtaaccaccgtgaggtcagagccacagctaagttaaaggatcagaatgaaatgtgtactggctgatgagttcagttggggattcagatgtgactttggggtgggtgtggtggcacgtgcctgtaatcccatcactgggaggctgaggtgggtagatcacttgagcctgggagtttgagaccagcctgggcaacacagcaaaaccctgtttctacaaaaagtacaaaaattagttgggtatggtggtgtgtgcctatttgccaattactcaggaggctgaggtgggaggatcgcttgagcccagcaggttgaggctgcagtgagccat

SEQ ID NO: 72006 - DNA, 1456 bp, Homo sapiens
aaaatagaataatcactgaaaaactccacaaatgcttagaagaggctgcccatactgagatgagcctgaatgagaagatcacttacctgacttccgagaaggagatggcttctcagaaaatgactgaacttaaaaagcagcaggatagtctcttgaaagaaaaatcctcactggaaacgcaaaatggagctttacttgcagagagagagaattccatcaaagccataggagacctcaaaaggcaatgtgatcaagagtctgcaaacagaagtttagttgtgcaagagaatatgaaactcctcggtaatattgatgctctgaagaaggagcttcaagagagaaaaaaggaaaaccaagaactagtggccagcaagtgcgacctctctttgatgctgaaagaggctcaaaataccaaaaagaatctggaaaaagaacacactcacatattgcaagcaaaggagagtttggatgctcaacttaacacgtgttgttccgagaagaacattttgctgagagatggcttgaacctgcaagaagagtgtcacaaattaagcaaggagatccaggaaatgcagcagtccttaatcctggaacaggaagccagagcaaaggagagcgagtcatccttgtacgaaaacaatcaacttcacgggaggatggtgctcctggagcaggaggtggaggagttaagagtgtgtatcgaggagctgcagtccgagaagtttgtgctacttcaagagaagagcaaatcagagcaagaactggcagagataatcgaggagaaggaactgttgactgcagaagcagctcaacttgctgcccatataaagactctgaaaagtgattttgctgccttgtccaaatccaaggcagagctgcaggaactgcacagctgcctcaccaagattctggatgaccttcagcggaaccatgaggtgaccctggccgaaaaagcccaggtgatgcaagacaaccagaacctcctggctgagaagagcgaaatgatgctggaaaaggatgagctcctgaaggagaaggaaaccctggcagaaagctacttcatccttcagaaagagatcagccagttggccaaaaccaacagccatatttcagccaatctcctagaatctcaaaatgaaaaccgtactttgagaaaagacaagaacaagcttactcttaaaattagagagctcgagactcttcagtcatttacggtaaagtgagagggtcaagtattgagcacccagactgcttactaacactgtgcactaactcaagtggtgtaggtcatctttcttcatttctgcttatggaaatccacctcattaagtcagttgcttatatgtctcaagctgttcgttacagtctgaaagggggattctttactaagtatctcactgtagtagtctctccccatttgaaaaaaattgcaaactgtgaataaaaaggatttatt

SEQ ID NO: 72007 - DNA, 1134 bp, Homo sapiens
tttaaaatttcttgtgcccaggcatggtggctcacgcctgtaatcctaacactttgggaggccgaggcaggcgaatcacgaggccaggagatcgagaccatcctggctaacacggtgaaaccctgtctctactaaaaatacaaaaaagtagccaggcgtgctggcaggtgcctgtagtcccagctactggggaggctgaggcagaatggcatgaacccgggaggcggagcttgcagtgagcggagatcatgccactgcactccagcctgtgcgacagagcgagactccgcccccccaaaacaaaacaaaacaaaacaaaacaaaacaaaatttcttgcctagttctgatgttattaattacacataacttttgaaaataattacaattattaatagtatattttaatataacttaaatttaaaacattcttatgaaaaatctgacaccttatattgaaactttttctagagatgtagaagaattacagctaaaacttacaaaggctaatgaaaatgcaagttttctgcaaaaaagtattgaggacatgactgtcaaagctgaacagagccagcaagaagcagctaaaaagcatgaggaagaaaagaaagaattggagaggaaattgtcggacctggtaaggagatactcagtgggcctgttggctggcaaggaaggcaagggatagtacacgcatgggcagatgactcattccctcattcggggtctctgcaggaaaagaaaatggaaacaagccacaaccagtgtcaggagctgaaagccaggtatgagagagccacttctgagacaaaaaccaagcatgaagaaatcctacagaacctccagaagacgctgctggacacagaggacaagctgaagggcgcacgggaggagaacagtggcttgctgcaggagctggaggagctgagaaagcaagccgacaaagccaaagtacgtgacgcgagagaatttccttgtgttgtagcttgcctgagctctgtgtcgaggcaggaagggtgcttagaaagcagcagccagtgggaaaagttaaggtggcctctacagacgttacccttctgagtgcgtggcagggtggtacattacatttcctatggcttcaagtgttttgtgccagc

SEQ ID NO: 72008 - DNA, 1078 bp, Homo sapiens
actcagggaaagccgtgatccttacacgatcaggccctattatctctcggatttcatctgggacccccttcccctgttcattccactccaaccacttcagcctccttgtggtgctcagacgtggtgggtgttcctttctcagagcctgtgcacttgcttttccccattccctcacttccttcaggttttccctgaaatgtcagcacctcagggaagccccatctgagattctaacctccttcccagctcctttgcctgcatttattttccttcctcttagcacttaccgctattaattatatgatttattttcgttatcttgcttattgtgtgccttcttcactagaatgtgatttttatgaggacaagaattgctgtgtgaaaatattaccagagcaagaatacactcagtcagtttttgttgatataacacagccgtgctattctttttttctctatatatttagatatggaggcaaaatttagagagaaagatgagagagaagagcagctgataaaggcaaaggaaaaactggaaaatgacattgcagaaataatgaagatgtcaggagataactcttctcagctgacaaaaatgaacgatgaattacgtctgaaagaaaggtatatgtgactgttgaaaagagtgctgaccttaggttaggctctgcggcaagctctaggtgggaggggagacaaaatgtttaggattgttacgttttaaagtttcccgtctctgttcttttctgttattacctcattgtgtccttgaatcaactatttaaccttctaaaatggattttacctatcttacttgtcaagaacaacagaattaaggaatacaatactatttatagaccttttggtgacttgtaaagaaaagataataaggccgggtgcggtggctcatgcctgtaatcccagcactttgagaggccgaggtgggcggatcacttgaggtcaggagttcgaggccaacctggccaacatggcgaaaccttgtctccactaaaaatacaaaattagccaggcgtggtggtgcaagcctgtaatcccagctactggggaggctgagatg

SEQ ID NO: 72009 - DNA, 1932 bp, Homo sapiens
atcagttaatggatatttatctgatttaagcttctttagaattggagatactaaagttggacttaagccattatcacagttagaaatatatattaacctataaacgttcataatagtttgctgcctgagatggggtagttattaaatatcttcagtgttaaagaaaataatcaggccaggtgcagtggctcatgcctgtaatcccagcactttgggaggccggggcgagtggatcacctgaggtcaggagtttgagaccagcctaaccaacatggtgaaaccccatctctactaaaaatgcaaaaattagctgggtgtggtggcgcatgcctgtaatcctagctactcaggaggctgaggcaggagaatcgcctgaacccaggaggtggaggttgcagtgagctgagatcgcaccattgtactccagcctgggtaagaagagcgaaactccatctcaaaaaaaaaaaaaaaaaaaaaaaaaaaaaaaaaaaaaagaaaagaaaatagtcaatgacttgttatttaaatgatctttttttctttggactgctgttaataggtggctacagtttcagaaaagtcacgtataatggaactggagaaagacctagcattgagagtacaggaagtagctgagctccgaagaaggctagagtccaataagcctgctggggatgtggacatgtcactttcccttttgcaagagataagctctttgcaagaaaagttagaagtcacccgtactgaccaccagagagaaataacttctctgaaggagcattttggagcccgggaagaaactcatcagaaggagataaaggctctgtataccgccacggaaaagctttccaaagagaacgagtcattgaaaagcaagctggagcatgccaacaaagagaactcagatgtgatagctctatggaagtccaaactggagactgccatcgcatcccaccagcaggcgatggaagaactgaaggtatctttcagcaaagggcttggaacagagacggcagaatttgctgaactaaaaacacaaatagagaaaatgagactagattaccaacacgaaatagaaaatttgcagaatcaacaagactctgaacgggctgcccatgctaaagagatggaagccttgagggctaaactgatgaaagttattaaagaaaaggaaaacagtctggaagccatcaggtcgaaactggacaaagcagaagaccagcatctcgtagaaatggaagacacgttaaacaaattacaggaagctgaaataaaggtaaaggagctagaggtactgcaagccaaatgcaatgaacaaaccaaggttattgataattttacatcacagctcaaggctactgaagaaaagctcttggatcttgatgcacttcggaaagccagttccgaaggtaaatcggaaatgaagaaacttagacagcagcttgaggcagctgagaaacagattaaacatttagagattgaaaagaatgctgaaagtagcaaggtttgtattgacatcctccattcttttcttttccatttgttattcttgttttgcattatgttacttttgagttgagatcattcatcttccaaattgctgatttaattaaattgcttgatgtccccagttgagtatagtgtagtatgttctgagtatctcaagtatggtttcatctgaggagattagagaaaataatggctcaaccatgtgaatttattttggttgcctgttatctgggtacctgatctatttatctctgggctatgctgtgacttctaatttaagcttagctccagtctataatctgtttaaaataaagaatgccctaacactatggtgttaagatgaatgaatgaacagaaactcaaaagatcggccaggcgcagtggctcacgcctgtaatcccagcactttgggaggctgaggca

SEQ ID NO: 72010 - DNA, 1044 bp, Homo sapiens
tggctgcccacaccatgcttaaatttgaggggcccttccaaacagcaactctgatttctttgaaaataaatgtatctttacagttaacaaagagcaaggggggcattttctgggttctagttttatggggcccagaatttaatggttcattaacaatttaatagatatcttcttcactcatttcatatacagccacattcctttagtcaatttttgtgttgttctcatccatttaaaaacaccccaaagtctcattagaagtttcatgtcatcatctaattcatgtgaaatatagcccatggtgtcttcaggagggtccagttaaaataatttacatcagcactgggttgtatagtctgtctgataaacttacttgaaattaatcaaataaagttatcttgaaaccctaacacatattgaagctttattggaatctcttttttgttgttgtttaattttttttatttttttactgatagcaaaagagccagatttctgaagatcctgagaatgtaagagggcacttaactgtgtggatatttcccttgttaacaaagattgatcacagattaaaatgcttattgatatactcaaacactaactgcataatctgaccttgggacattgaccttaatgtttctgtgcatgtggctttcaaagcaattacatttatatcctgaagaaattgtatgtaatgactaagctccacacattcatgtgtttaatgaataggccaacgtttgctttataaagaattttgccagaaaggggggaaaaatgttttttgtctggagacctggccttcttcacctaattcataatgtcttctaattttagtggaattattccaaaagagatgatatctggctggagcataaggcattctagatgtggagttgtgggaattctggggaagtttccaagttgtctaattttgcttcccatgagaggaaaggggattgtgaggctggctgctgtcccggagctgactggctgccttttcagtgtgcccccgccactggccagtgcctgccagtgcagctg

SEQ ID NO: 72011 - DNA, 1037 bp, Homo sapiens
gcagaggctgcagtctcggcactttgggaggccaaggcaggcggctgggaggtggaggttgtagcgagccgagatcacgctactgcactccagcctgggtaccattgagcactgagtgaaccagactccgtctgcaatctcggcacctcgggaggccgaggctggcggatcactcgcagttaggagctggagaccagcccggccaacacagcgaaaccccgtctccaccaaaaaaatacgaaaaccagtcaggcgtggcggcgcgcgcctgcaatcgcaggcactcggcaggctgaggcaggagaatcaggcagggaggctgcagtgagccgagatggcagcagtacagtccagcttcggctcggcatcagagggagaccatggaaagagagggagagggagaccgtggggagagggagagggagagagggagagggagagagggagagggacccaattcattctttaataaccagaatgacttcatgttactgtgtgcgctgctgttgggctctacacatctagtcaagccttggaatctgatttctcatcaccaacctcatttcctgtgcatgttgatttttgcatcatactttcattttcgtcatgggaatagccaaaacccagctttgaaagtacatgatgttattgaaaggactgtaggacaatctaatgagactgaattgcctcaaactagtagtttgcacagagtccagcagatgtcgctgtgtttctcttgaaattttaaaacatcctacagtgcactggtgagtttgctcagcaccctggggcatctctgcacatggtttgggaaccacacatttaatgtattcaggaagaaatattagcaagagaaggtataatttagctatataatgaaattggaaggtcaaggtcaaatggttaaaaaagacaacaggagtttcttcctggtatgtttaagtaatttcaagaacaaaaggttgattcttttgtagttctcaagttgccgagttattaattgaggaaagatcctcgctgtaagtctgcatcctgtg

SEQ ID NO: 72012 - DNA, 1002 bp, Homo sapiens
ccagatatggtggtgcacatctgtaatcctagctactcaggaggctgaaggaggagaatcacttgtacccggaaggtggaggttgcagtgagccgagatcacaccactgcattctagcctgggcgacagagcgagactgtctcaaaagaacaaaaaaccacactttaaaacacctttctaagagttctgggctactcctgtgggctgttggctttctctagtttttctttaagttagaggttgtctgcttgaaaattaaatcgaatctcttatgatcttttgttttcagttgtagctccagtagaaaaaaccatatccagtgaaaaagcatcaagcactccatcatctgagactcaggaggaatttgtggatgactttcgagttggggagcgagtttgggtgaatggaaataagcctggatttatccagtttcttggagaaacccagtttgcaccaggccagtgggctggaattgttttagatgaacccataggcaagaacgatggttcggtggcaggagttcggtatttccagtgtgaacctttaaagggcatatttacccgaccttcaaagttaacaaggaaggtgcaagcagaagatgaagctaatggcctgcagacaacgcccgcctcccgagctacttcaccgctgtgcacttctacggccagcatggtgtcttcctccccctccaccccttcaaacatccctcagaaaccatcacagccagcagcaaaggaaccttcagctacgcctccgatcagcaaccttacaaaaactgccagtgaatctatctccaacctttcagaggctggctcaatcaagaaaggagaaagagagctcaaaatcggagacagagtattggtgagtagagaaacattctgaggtcatttcattgaactgagatataaacaccagtgagtggttgaaatacacacacatcagggctgggcgcggtggctcacacctataatcccagcactttgggaggctgaggcgggtgga

SEQ ID NO: 72013 - DNA, 1442 bp, Homo sapiens
tgactctagaagaacttgaagaacagcagaggcggatctgggcagctcttgagcaggccgagagcgtaaacagcgactccgacgttcctgtggacacacctttaactggcaattccgttgcctcatcaccttgtccaaatgagctagacctccctgtcccggagggaaaaacatctgaaaagcagacgctggatgagcctgaggtaccagagatttttacaaagaaatcagaagctggacatgcctccagtccagactctgaggtgacatcactttgtcagaaggaaaaagcagagttggctccggtaaacactgaaggtgcccttcttgataatggcagtgtcgtaccaaactgtgacatcagcaatgggggcagccagaagctctttcctgcagacaccagtccttcaacggccactaaaattcatagccctatacctgacatgagcaaatttgcaactggaatcacgccatttgaatttgagaatatggcagaatctactggaatgtacctcaggataagaagcttgttaaagaactcaccccgaaaccagcagaaaaacaaaaaggcctctgaataatggcttgacttagcactgagagctatttaataactttgttccgttaattagtactaattaagtggatagatagaatggttttcctgtttgtccctcccatgtttaaaaatctatccaaggttcatgttccaaagtcaagcctattttaaagaaagactgagctcactagttcagtatattttattctcactgacaaaacttggggggagatgtgaatatgacctggtttagagagggtttgttaaggtttatactatttttggattgtgactatccgtcgagagtgatggtttttatctgtcttttgtacattgttttccctttctacattttgctaattatcctgtatataagtttaatatatcactttttaaaagaaaaaattctaccattttaaattcatgtttcaactcctacaaccaaatgagaaaaatcagggatgagcagctttatcccatttggggtatttttgtaagtgatttacatgtgtcaattttagtaatacttttacttttttgtaacttcatccttcatatatgcttgctatacaggtatgttcatctttgtgtacagaggtttaataaattagttttcatatacataatctaagactttgaatacaaaaaagtgattcacaggtaaaatcagtgtatataaccttttttttttttgagacaagggtttcactcttgttgcccaggctggagtgcaatggcacaatctcggctcaccgcaacctccgcctcccgagtttaagcgattctcctgcctcagcctccggagtagctgggattacaggcatgtgccaccacgcccagctaacttcgtatttttagtagagatggggtttctccacgtcgg

SEQ ID NO: 72014 - DNA, 1024 bp, Homo sapiens
agagaaagagcagaagatagaaaactcatgagtaagtgtgttaggagaattgggcgatgaatggccctgttagcagtgccagtgcttgatgggagagagactggagcctgggaggccccatagcagtcactcctgcctacatcttctgcttgcagtatgtagaaccttttttggccaagtgattgtgtcaggtagtcttttagtattcagtcttaattattttgcaggcaagtttagttttccttcaacacattattttccttaatttccaataaaggaaaagtaacataagaaggaaaaatgtaatttgagatctccactgtacctcctttgagcaaaatctcaaaacatgacattttccaaatacatgtgttttttttttccttctcttttcatcattaggaatggaggatctttggttccataccaatgcaggcatgtcagcagaaggatgtgtttgccaattaccttacttctaacttccaagcggtaaatagattttaagggtgtgctctataaaatgttgttgtgtctgcgagattgtgtaatttattagcgtcttacagccttttcttgctttgttatcttgacaaaccaaaaggaaaacagtggcaaaattcaccaattacctagacttaactccagattgtttttctacatcattttaagtgaagggatggagtttaattcattatctaccccgcttaacttgtgtttggtctggttgctcttttagccaggtgtgaagtctggcaacaagaggtcttcatctcactctagcccaggtagtccaaagaagcagaagaatgaaagcaactcagcgggatctcccgccgacatggagctcgattcaggtaggtttcatcctatggctctgatttctctcttttttttttttttttttgagatggagtctcactcttgtcacccaggctggagtacaatggcgtgatctcggctcaccgcaacctctgcctcccgggttcaagtattctcccgcctcagcctcccgagtagttgggat

SEQ ID NO: 72015 - DNA, 1106 bp, Homo sapiens
cggtcaggagttcaagaccagcctagccaagacggtgaaacccggcctctactaaaaatacaaaaattagccaagcgtggtggcaggcgcctgtaatcccagctactcgggaggctgaggcagtgggtggatctcttgagctcaggagtttgagaccagcctgggcaccatcgtgaaaccccgtctctactaaaaatacacagcctaccctggtgtggttgtgcgttcatgtagtaccagctatttaggaggctgaggtgggaggatcacttgagcctgagaggcagaagctgtagtgagccaagatggtgccactgcactccagcctggtgacaaagcaagaccctttctcaaaaaaaaaaaaaaaaagttctgtcctaatgatttagaaaaattataatgaaaattgaaagccatttcaaaactaattctgttgccatgattataagcactttccaggtgtacttttggtctggggagggatatatattgacatttagcaatattaacactttttatggtctgtaatagatggcactgatggggaaacagaagttggagaaatacaacagaataaaagtgtcacttacgatctctcaaaattggtcaactatcctggttttaatatatctactcccagaggaattccagacgtaagtatattgatttttttaaattatcatgtgatgtgatattattatgttaaagattggtcaaaatattaacttgttggctaggcatagtggctcacacctgtaatcccaacactttgggagtccgaggcaagatgatcacttgagtcccagagttcgagaccagcctgggcaacatagcaagaccttgtctctatgaaaaaatttaaaaactagccaagggtggtggcacatgcctgtagtcctggctactagggaggctggggtgggaggattgcagaggttacagtgaggtgagatcacactagaccctgtctcaaaaaataattagttaattcatatacacctacaaacttatatagcagttactatttaaaggaataaatttgttacttgtttacatttttaatttcttttatagaatctttctagaatcttaattgaagtcttata

SEQ ID NO: 72016 - DNA, 2760 bp, Homo sapiens
tagtcatgatccaatacagaggaaaaactgatctagcagagagagggaactgacgatgtagtttctacttacacatcaaagtctggctccttaataacaaggaagttattatttctaataattccatccaaaaataaattgttaaaacagttaatcataatcttacattatttaatgtctttttttctgcttaaatagcaatattttttgacttgttttctgcaggttgtaggaagtgtcctgtattttactaatttttgccttgataaattggggcaaccgcttctaaatgaaaaccctcagctttccgaaggatgggaaatacccaagtatcctacatagtgaatgaagatcttttatgcatcttgccactaagttcacctttaaaacaatttccaaattttgcagaccatgataactattccttaataaaattcactaaaggtaccatcaagtcttcagccacattgtttctctagaagggcaagaaatacaagtaaaggcaaaaaggtttgtgtggggagttgttttgttttacttatttacttttttaaccaaaatcataaacttttggcttgaaaagttcatgttctttactgctggtttactctaaggttaattacagattgagctagaattttaatccatacatatatgttaaatgtttaaatgaatcatctgcttcctggaattcattggttctcacctaatgtgcctgggtgggtggaaaggtataattgttgctgtcaatttgattgcagtcttataaccatctgccttctttccatgttacctaacggaaatatgatcaatgtgttcaccttgattcttcgttgttaaccactgaaaaaactcaaaagaggtaacagatcagtcaggaacagaagggttcttggttaaaagactctgcatagtactatttaaatcactaaataaaggagattaaagtgtacttcttgttgcagatattagtgatctgtgatcaacttgctttcttgtctctctgatacactttgctgtcatatagaattttattgatttgcttttctatttttattgacattataaaaatctttgtcttttgaccaaataggccaaagcctcactgtttcaattgtggttctgaagaacaccaaatgaaagattgcccaatggtaaatttttctcatgttaagaaaagtctttgaacaagagctttctaatgttttcaacacatttatgttattgtatgacatgaaggaactttctttgttcctttaatttgaaatcttgtgtcctttaatttgaaatcttttcaaatttgtgttcatattttaagacattaaattttttcagtaaataatttaaaacagtgtcctttaatttgaaatcttttcaaatttgtgttcatattttaagacattaaattttttcagtaaataatttaaaacagtactctttgtatttgagatgaataaacatgagaattaaattgtagagtttatcctaaaaacttgatttaatttatgataataggtaataaatagactgctcctttccttacgtatttttctaaaatattcaccctcttttacacttgttcgttatacattaaaactaaaataatctgtttacttgatctaaaaaaaagtatttttatttaatttctgaaatatttctgagttgcatgaaaccattcttttcaaatgtgtcatgatgtagcctcggaatgctgctcgaataagtgaaaagagaaaagagtatatggatgcctgtggagaagcaaacaatcagaatttccagcagcgataccacgcagaagaagtagaagaaagatttggaagattcaagccaggagttattaggtactaatggcattttaccatagaaggtcatttttatttccctagcatttggaatgttctgtgtctctttgggctaattatcaggatataagtgtactctggcaaagccctaggtaatatacattaattcatttagaaacacttctttaaattttaatttatatttgttagacgtcatggtatgtaatataagcaagaaatgttttaaaataccagaatactatgtgttttcatgcaaataagaattcagtatttttcttcctcctttatttttacttagtgaggaacttcaagatgcactaggtgtgacagacaagagtcttccaccttttatctatcggatgcgccagctagggtacccaccagggtggctcaaagaggctgaattggagaattcggggcttgcactctatgatggaaaaggtatagtatcttaagttagagaagtcaccttaagtgtttcctttttttttttaattaaagaatcacaacaaaatgtgataggaatggccggcttctttaatgtgtgctaactaaaaaatatcatgatgatgtttccttggtaaattttacaaggaaggaataaaatttcagtgagtttgtagattatctgatggttttctgggcttgctcaggtactgtctaggccagagtatcacctctccagccagtcctcataagctcttatctttgtcagtaataataacagacataaatcctaaatgccaggagacctgtaaaatgtaaaatacagaaaacctctaatagtctagaacttctctcctagatacctaccctagaaagatattcacacatatgaaaaggaaattgtatgtatacaagaatctttttgtatcattgaatatgatagtgaaaaatctacgacaacattaaggccctaaaaaagaatggttaa

SEQ ID NO: 72017 - DNA, 1419 bp, Homo sapiens
tcaggtgagagaaactggtactgagactggagtgagagtggtgctgctgagaagtgcttagaacgtggatgtactggggaagtagagctgatcaaatgtgttgatgaattggacgcagaatatgagagcaaaagagtcatcggagtgactcaggtttttggcccgagtgccagtaagaatgtcgtcgtaaaaaattagccaggcgtggtggtgggcgcctgtagtcccagctactcatgaggctgaggcgggagaatggcatgaacctggaaggcagagcttgcagtgagccgagatcgcgccactgcactccagcctgggcgacagagcgagactccatctcagaaaaaaaaaaaaaaggatgtcgtcatattttctctgatggggaagactagaggaggagcaggtttggagggggctagaaatccagtgcagttttaagcaggtgagtttgagatgccactcacacgccccttgagagctgtcaagttgacacttccatatataaaattggaggttaggactgatcagaacttgaccgtaaaggagaacatatattcagggcaacttcaatctatgctcccagtgaaaaaataataattaaaaagtgataacttaggccaggcgcagtggctcatgccagtaatcccagcactttgggaggccaaggcgggcagatcacctgaggtcgagagtttgagaccagcctgaccaacatgaagaaaccccgtctctactaaaaatacaaaattagccgggtgtggtggtgcatgcctgtaatcccagctacttgagaggctgaggcaggagaatcgcttgaacccaggaggttcaaccggaggttgcagtgagctgagattgcgccatggcactccagcctgggcaacaagagcgaaactccgtctcaaaaaataataataataacttgacctttagaagtcgtaagcatacatattatactacataccatgggtcaggatgaaccacctgagtagtgaaagtggagaggaggactgagacctagggcactctaatacatggaagatagagggatgagaagagtctagcacagaagagcgaggctcagtcagcaaggaaagaagagaacggagaagcatgtcctagaagacaagggaggaagatgtttttaggaggaaggaagaattgtgtcaattgtcacagctaggttaagaaagatgaagagtgagaactgttcattgaatttggctgcatggaggtcattgggaagctccattgttaggagctcagcccagtgatatgtatagaagcattactggaaatgttcaagagagagggcagtgtcattaaaaaaatggaggccaggcacagtggctcaacacctgtagtcccagcactttgggaggctgaggcgggaggattgcttgaggccaggagttt

SEQ ID NO: 72018 - DNA, 1026 bp, Homo sapiens
tttatcttttccagtttcatatttatattggtgtttccttatgtacgtattaagaatctctgggaggaggatgtggaagacctgaatatatggactatctttgtgttgcagaaatagatggccaagagacagggtaggaagggagcttttcattatgtaacccttttacttctcttggattttgaaccatttacatgtagtatctatttaaaaattaagtacacagaatttttaaataaaatccgtgtattctttgcacaactggttggcagttgttatgccaatcactgtgttactttatcataattattgcattaacttggcaataatatgtaatttatcttaaggaatatgttcctgagtattacagagtcagtgatttattaaacttctgaaaaacaacaacattcacacttgaaatcttacagtaatgcataagacttcagtctattgaatgttttactctgtctgggttctgaccattttgtcctcttacacaggcaatatcatcaagaaatagaggaatttgtatcaaatttagtaaaaagatttgaggaacagcagaaaaatgatgtggaaaagacttcctttaatcttttgccccaggtatttcaaatttaagagactttaagattagtaagttatgcgtttcactgccaattattgggccacaaggatcctcttgaatcaaaaccaaaatgattaacaccgtttaccacttctccttctactggcttgcttttccgaagcctgactggtttagccacacagcgttcttttaccttgtggctcagactttttacattgcctgacttggacatgtggttttgggtagaaaattaattttaggccagaaaaaaatctaagtttctggggtttataaaagatggattccttttatctaaaaccaacaggcttgtggactatccttttttccctctacttgtttttagaaaattaattgtgtgcccaaagaaatctgagaagttttactatgtgaatattagatcacgcatttatgtttta

SEQ ID NO: 72019 - DNA, 1426 bp, Homo sapiens
aaaaaagtgatacctctgtataaaattattaaagtagatagaattggtgaaaatgtataattttcttgagaaaactgcaatatgtggaaaatgctatatgatttttggtacttaagaattttaaggctggtgagatggttcacagctataatcccagcacttggggaggctgaggcaggtggatcccttgagctcaggagttcgagaccagcctggccaacatggcaaaaccctgtctccacaaaacatacaaaaatttgctggatgtggtggtatgcacctgtggtcccagctacttgggaaggtgaggtgggattgcttgatctcgggaggcggaggttgcagtgatccaagatctcaccacagcactccagcacgagcgacagagtgagaacctgtgtcaaaaaaggaaaaaaaaagtataaaagttatgcgtttatatatacgtatgcaagttttacttaaatatcttctaagaatatgttctaacttctgttttagtggaatattggtgaacgatactaagttagatggacctatattacagattctattcatgaacaatgctatttcaaagtaagtaattttttccctttcctaaatataataatgtgtttatggaacaattttctctataaatatgctgttttcatttgtactcatatcatttttattattttacttaaaatgcccctggagttaaagtacaaggaatcatgattaagagcaaggacattggggtcacagtgacctgaatatctggactcttactttctatgtctgtgaacctgggaaggtcacagatctttgctgcatcatccgttacttcactggaaaacaggatagtcatagtaactacctatggggtagctacatgagcacctctaagagctcaataaatagcttctaataaaaatcatcactatcactgtaacaataacaatgatgttcaccatttctctttctgaatcaggtaactgagttttccatgttggccatcttcaaagcctactcacttgattatttgttttaacagcaaaactagacttttgcaaaccatcagcatcagggtttagggtgaccctgcgcattcctgcagtgtttgctcagagtgtaaggtctaaaatggtttgctctgtccctccttcagagcatggtcatagacatttcacatagttgcttgctccctcgaaagtcacttagtcatattgttgtcttcttaatgctgaccaaggtcaggtccataacctactctatcccagcagaagtggaacccaaggctctgagggttgggaagctggatgctaaatacagcagcaaggtgctgggcacaactgggctgtagcactagtgtccctctcatgcccaggttagaatcagtaaccctctagctcatgacggtctcatttctgcaccattcacctag

SEQ ID NO: 72020 - DNA, 1342 bp, Homo sapiens
aagcgcgatttattttttcagaatgtcgtcttcctccacattgtgaggaaaattttcagaatacaaaaagttgaggccgggcgctgtggctcaagcctgtaatcccagcactttgggaggccgaggcgggtggatcatgaggtcaggaggatcatgaggatcaggtggatcatgaggatcaggaggtcagcctggccaacatggtgaaaccccgtctctactaaaaatacaaaattagccgggcgtggtggcgcgtgcttgtaatcccagctactcaggaggctgaggcaggagaatcccttgaacctgggaggcggaggttgcagtgagccaagatcacaccattgcactccagcctgggcgacagggtgagactgtgtctcaaaaaaaaaaaaaaaaagttgaaaggattctacagtggacatccatagatttattccaaattctaaagttgttaacagctcgttatactgcattctctttatcacatagtggttgttgaaaggtttgacaggaacactgatgcttcaataatggttttggttcagtttgttagtctgttgaacttcaggatcgtgtcttagaatatatgttcgaaaggataaaaaccgtactttaattttgggtttcaaaagcctacccctgcaacaaaatagaagctcaataagtgtgtcatcctcaaaatatccgtgggtcttttgtctttataatattctgacaccaaaagtgagagaagtagtagttgaattttatgatttgcattgttaaatgagggcttatcttccttaacaaataataacatcaagaacttaaacgaaaattgaacattctgactcgaccgaggtatgagatttttgaaattactccatagttgtcccttattatttatcctgatattaatatttaatcagaatttcgttgtaaaaagtgtatgggatttttgtatcatttttatttgtttagcatactctgaagaaatcaaagtaatagttatttaattgtggggataaggtctgaattctcataagtggattaaaattgtaagctcatttattggatgaaaggatgaaacaaaatccagaaaatgtttacttaatgttcagaataggcaagttgttaacctagctattcctatttaacaaacatttctagaaagttagaattaagattacaatattggctgggtctggtggctcatgcctgtaattccagcacctaaaaaaaaaaattatagtataatgggccaggggcagtggctcacgcctgtaatcccagcactttgggaggccgaggtgggcggatcaactgaggtcagttcgagagcagcctgggcaacgtggtg

SEQ ID NO: 72021 - DNA, 1217 bp, Homo sapiens
atggcaccactgcactccagacgggacaacagagcaagactccatctcaaaaaaaaaaaatacataaaaaatagtgtcaagtgagagaatatttatctccatctgaattcattgtaatgttttatgtctgatttttagagtgaagatgaagctggatgtagctcagttgatgaagaaagttacaagactctgaagcagcaggaagaagtatttcgaaatttagatgctcagtatgaaatggcaagatcacaaacccacacacaaagaggaatgggtttgggtttcacatcttcaatgcgaggaatggatgcagtttgaaaatgatcacacttgtaaagtttgggacttatagacttcttgttctgatgtcacgtccttgttcaccaaacagctagcactctagcttgcatgggtgttgcattgactttaatttattgaaaaatacaaatttttgtaaatatcagatcagtgatactggtgttagtgttgtaatcaggttaaacccacttccattaaacttgacaggactatagaaggataatattttttagttcatgaattctacttttcaaatatataaaagctgcaggtggggataaaatctcatacatggattttttcgtgtccgctgtcttgtgtacttttgtacttaaccttgtacagttattttcatctcttgaaacatgaaagaaatgttatgtagatgttctttagaagatctggccatttggtacataatccagcacagataagctgggtggtaatgataataaaaatggttttctcaaaactggtgttaatttaagttacctgggatgtttctttgaatttgttttatagtttctgtagcatttggcaattgctgttagaaaacactagctagaaatcccctccccaccaccctttttaaggccagttaactatactacagtcaataccgtggtgagcaaaaatgtaaaaggtggaaggagaaaacttactaaaatagtatgttttcctattataagggacagacttggtattcagtatttgtcaaatattacatgtgttattcaggagatagattaatgcattaaagggatgtaagcacttttattttaataaagtgccttataacaagttctttgcatgctttttgctcattatccctttgaagtcttctccagcatagactataaaatattaaaatattagaaattttttttgtttgttttttt

SEQ ID NO: 72022 - DNA, 1455 bp, Homo sapiens
atagaaagggtaaacttaacatatagcttgtttagtgtgcatactcattagtgaatttaatgtatgcacactactcattcaacagagtgagtagagagaacaagcattcatttttgggctgggcatggtggctcacgcctgtaatgccagcacttcgggaggccaaggcgggcggatcagaaggtcaggagtttgagaccaggctgaccaacattggtgaaaccccatctctactaaaaatacaaacattagctgggcatggtggtgtgtacctgtaatcccggctacacaggaggctgaggcaggagaatcgcttgaacccaggaggcggaggttgcagtgagccaaggtcgtgccattgcactccagcctgggcaacagagtgagactgtctcaaaaaaaaattcatttttgttttgggatgaatttgtgtttcatgttactagttcctttgtaaatgataaatttgttcaactgctagaagtaatttcctaattgagaaaagttttcctcccattttattagattacagagaatggcaaggtttgcttgaccttttagttttggctttttgatttttattaaattgaagactttactaaggtctgtacaatataaaaaattatccgaatgtcttgatcggctggctttttctccctcaagaaacatttagataattctataaatttatttactacttaaccatgctctaaaatttactcagctttcaatatgttacttgcaagacgtaatttttttcacttgttaattggaactgcatataaaaactatgcccatttctgactagtcaattcaaaaatgtttaaaaccactgttgtggtattcttcaaatgtagcttatatcatcttaagaatgattgctttttcttcacatacggctatcggtggagggatgctaaaaatttaaaattttatggaagttggcttgtctctgtacatgcacatatagagagatatatacataatggttttatattgtgttattttaaattcattgaaattaattttgcaggttggaaagggcaaagaaattacaagaacagcgagaaaaggaaatggttgaaaaacaaaaacaacaagaaatagctgcaggtaatttttttcattcttttttagtcatctcgatttgagctctttcaagcttttttgtttttcacagggatttgctctgtcattctgactggagtgcagtggctccagcatagcgcatggtagcctcaaactcccaggctcaagtgatcctcccacctcagcctaccgagtagctgggactgcaggtcccacatcaccatgcatggctaatttttttcttattttttgtagagaggacctttcactatgttgccaagactattcttgatctcgggcttaagcagtcctcctgccccagcctcccaaagtgctgggattgcaggcatgagccactgcacccag

SEQ ID NO: 72023 - DNA, 1923 bp, Homo sapiens
gatgcacaggaagctttagctagaaggtgtgtatatttcttaattcatttgttccagttcgcctttaaataaatgctcaattgtgtggataagatgaattctttcagtaagagaatgattcacatactttagtaatatggtggcatatttgtgatctagaactatgtaaatagtttaattctcatcctaaacatttgcacaactataagattgagatgtctacaatttctgttttttccttcatgatttaactgatttcatttttctcaaatttagactcccaaatattttcagtttgcatttgaaactttttttttttgagtcttaaatctggttcaagaactattattttctcatctaagatgacttttcctttactttttgtttttctccctcaaatagacaaaatacctgaaacagtaagtaaaattttgtcaatattattattttgaagatggcaattaacagataatacattataagctaatttatttgatcttgtaagttttattcctggtaactatgggagaactttttttttttttttttaattttctgctgtttcggccgggtgcaatcggtcacacctgtaatcccggcattttgggaggccgaggcgggcggatcacttgaggtcaggagttgggagaccagcctggccaacatggtgaaaccccatctctactaaaaatacaaaaattagctgggcgtggtggcaggcgcctgtaatcccagctactctggaggctgaggcacgagaatcgcttgaacccatgaggcagaggttgcagtaagccaagatcgcaccactgcactccagcctgggcgatagagcgagactcagtctcaaaaaaaaaaaacacacacacacacacacacaaaaataaattttctgctgtttcaaagatgagtaatggtgaaaccacacacagcacgactatatattgaaatctgcaaaactattcaaagaactgcctcatagagaggcaaaaagtaaaataaaatccaagcacttgtttgcagtatttcccatattttgaaaaatagactttttaggttttgatttttttttctctcgttacaaaattaaggtgttttgttttttgagacagggtcccacccaggctggagtgcagtggcacatgatgacggctcactgcatacttgaattcctgggcccaagcaatcctcccacctcagcctctcaagtagttgggaccacaggcatgcctggctaatttttgtattttttgtagagaagacggggtctccctatgttgcccaggctggtaacacagtgtaacctgatgtgcttccctgggaacccagcctgacagaaactgcagctgaacagcagcaaaagtgtgagctcaccccttctttccattcaccttagtgaatggtattaattccaaatcttcaatggccattttaatgcaaccagttgtagtcacacgtatcttctttctgaaactagtatggaaataatttactataaaattggatttagtatatgctagattgtaatttcattaactctgacaaatattttttaagctcttatttacttgaatgccataagtctattctgtttgtgtttttggatttttttaaaagtgaagccgttaatagcatccaaaatgtcattgatatatagattacttggtgatctttcagataaagttttaaatgtagttctttaatttcagaatatgagattatttactaccttgaaatctggagaatttttttcttaagaaactaccatgtatagaccttttatattggtttcttttttggcttaaaggtcaggatttaaaactgtttaggaaatacatttcagatctgtgacctactttttttattttttatttttattttattttatttatttatttatttatttatttatttatttattta

SEQ ID NO: 72024 - DNA, 1076 bp, Homo sapiens
aaaaagatttttgagaaactggatcacagctcaaatttgtgaatggtttttggtggggttttttttggagaattctgtgggttgtgtgtggtatcagactcaaaaatttttagtagataaactaaagtattaagatttgtaactactgtgggaagagtattaaacggaagcttaaatttgggtaggatgcattgaacgcttttgacatgttaataggtttactatgttctaggacaaattatcaaacaaaatgaagggttcgttttcagttagtatttcctttgaaaatctcgcttatttctgtaaataatatagtgcagttacttgcttgtctttattgcgttactacaagtaactaattcatgatgtgtataaatgaaacaacacaacttttaagtaattacaaatttgtgcactttaatttcagacgccatcgtagtagaagcagggagcggaagaagtctcgatccaggagtagggagcggaagaaatcgagatccagaagcagagagaggaagaaatcgagatccagaagcagggaaagaaaacggcggatcaggtctcgttcccgctcaagatcaagacacaggcataggactagaagcaggagtaggacaaggagtaggagtcggtaggtgaccatcatcctgaataaaatttaataggaccctcagagagtctgtttatcttcctcagtaagagagtattaaaattgtgagtcacaattctatttatagattatggtaaaattattttagtcattacctaacgtatgaagaacacacctaaccacttgaatagcattcacaggtattctcgtgattgataaatctcttgcgaagtgcaggtatgaataggcctattaaaatgcagttgttggctaggtgtcgtggtttacacctgtaatcacaacgaggcgagcagattttttgagcccaggagttcaagaccagcctgggcaatatggtgaaaccccatgtctacaaaagatatgaaaattagcctggggtgatgacccacacctatgatcccagctacttgggaggctgaggtgggataatcacttgagcccagaa

SEQ ID NO: 72025 - DNA, 6759 bp, Homo sapiens
cctcagatgatccacccgcctcggcctcccaaagtgctgggattacaggagtgagccaccgcgcccggccgggttctagtattttaaaaagtgaatttaaacatttatttatgccgtgccttgttcaataaaaagacagtcccctagagaagtgacctagtattcaatccagtgcttacctccttcgcagtggaaaaagatttgtctatgtttcgagccgttattagagtttgcaacaaaatgtaaattataagaaaccaaagtggctacctcgtagagccactgctggaatagaaggctgttttgcagttaacgtttatgtgtacacatagattagtactaaattaaagcttagaaaatttcagagcaattttaatactcagtttttggtaggtttttttcctggatacctgtattatgctactataaaatatcctcagggaaataaaagttttccatggcctcaatgaccacctatcattcctatttgtttagtgttaagatggtttttgttgttgctctgtagtatattttacagatgaaaatggttgatgatgtaagtttaagttagcctatgtcacagggaggtttctctgttgtccagctttgtgatgttaagcatgaagttaaagttagataaaccattgcctgaaaactgcctaggctaagcactagattttccatgagaaggttgttttcgattctagtcttgttctctgcaaaagtaaatgggatttgccactagttaaggaattctgtctctggcaaaagtgtcgtgcaactgagagaagtaatagcggtgcttaaaattttcgagatcacttctgtttaccaagtgtaagctgtacaaacactcagcaagtaataaatgagtctgaaatagtcctcaaggataacgatgaaaaaaaaaagtgtccagaattcattgtgaaaaatcagaatcatccttaatgatacagcattatttattagtagtaaacagtaaagatacggagatgcagtatcattttaagcaagtcagctaatgttgctggatctcatctgtgaaacgagaaagttgaactctattctaaggggtgaaaacctttcagcataaaaattttatggttccagaagtcacccagactggagaaataagtacatatacaatatgctggcatgagagcctccctggtagttaatttcttactgttctttttgtgccattgttagaggaataacacgtaatttatgtctttcatctcataattgaactgcaaaacctttctgtttttaatttatcattttattccctaagtctagcattggttttggcacatttttgacccttagtaaatacttgttgaagtaactcgacctctcacaacttcatttattaaagtacaatacacccatttattgtacttgatacttgtttaaaatttgttaaaatacaatacccccatttattgtacttgatatttggtattcattttctggactaactttcctaaaggaggaagttctctaatgtgattcctcctgctgaagactatcgattccctatttattcaatccagattccgtttgatgttatacgtgaaaagtccataaactgtttctgtaaagggccagacggtaaatatttttggctttgtgggccatgtgcagtctctgtcacattctttcccaggctggaggggcagtggcgcaatcttagctcacttcaacgtctgcctcatgggttcaagccattctcctgtctcaacctcctgagttgctgggattacaggcacgccccaccactcttggctaatttttgtgtttttagtagaagcagggttttaccatgttggctaggctggtctcaaactcctgacctcaggttatccgcctgcctcaacctcccaaagtgctaggattacaggcatgagccacaacactggcgttttaagtgcctttagttttaacagttcagtctttacagtgctatttactgaagttatttattaaatatgcctaaaatagttttaaaaaacgtaaaaaaccattcctagctcaaggccatacagaaacagaatgaggaccatagcttgccaacccttcctaagtaatcaattccccaggtgtatcaattattttattttcatgttatcttctctggtcagatagccgagcattgtctaccttctgcattagttgaaacttgtaaaatttatattgtaataattacttataaaatgctttaaagcagaaacaacttaatgttttcatagcccagagcacatgtgaggagaggcagaccatattttgcagcagcactgtgccaaggggctgttttcattaaagagggttaatgacattaagatgaggttctcacttaggtaagttaattttctgtttattattttataatattcttagggcattgttttaagattttatcgtcttgagtatctttaagctttaacaactcatttttgatgtttgacatgtatgctaatttaaaagtattggtaaagtcagctaaatgcattcacacatctaaaaaggactattttctctgcttgaatgcttattagaactacttggagcccttattcctcccccaccccaccccatgttttaaaagttatacaaatcatcgttagaaaattaaagatacatcagtctaaatatgtaggtcttgctttagtatcaggttcgtcatttcaagccattcagccttattagtgtacaaagcacatttagttacttggaaagcaggcattctgatttattgattgtggggggctatcttccctccctttgtccctcttttaagaaattgaaaacatttaaaatgtaattaagaactttaatcatttgtttttaaacttttaggctagtgatacagagcgagatggactagccccagaaaagacatcaccagatagagataagaaaaaagagcagtcagaagtatctgtttctcctagagcttcaaaacatcattattcaagatcacgatcaaggtcaagagaaagaaaacgaaagtcaggtatgaattcttaaaggtggttacaactctcagcatttgtataagatatgtagacctgttgtataagaagacacatacatttagtttgttggctgggcatggtggctcaagcctgtaatgccagcactttgggaggccaaggcaggcagatcacctgagccaggaccaaaaatacaaaaattgacacactctcagcccaatgcaacctccatctgctgggttcaggcagttcttctgcctcagcctcctgagtagctgggattataggcgtgcgccaccacgcctagcttatttttgtatttttagtagagactgggtttcaccatgttggaacatatcaaatataattcaacctgtttattttctttagtttttatttttcttaatggcttacctctctctattaaacccccttatgaatttgctgtagactaggaaactagatgggctggtcagaatatatgtaaaatactgaaagtctatgaccgtttaaaagatgtatctaggctgctttatgtcctggtttgctcagattgcttgatttgtttcacatgtgtgttgtattaatgtagaataatcccacccgtgccatgaaaaaattagtcattggaagaagactaatgggagtcatttttctccagcattaagagttttttaagatgaaatgtttctccaactttgtttatggtgattattttttttgtgtattcacagataatgaaggaagaaaacacaggagccggagcagaagcaaagaggtaattaacactttgtagtgaataggtactttaaaatacttataaagtgtctggtagaaagatttgtatgaatataagacgttgtcaaggtaagtacaaaacttgaaatttaaaaggtttattgggttataaaataagcatgattttgattcatcatttttgaagaagatgtttatgtgaaaagtaccttcaaaactttaattttattatattgtgaaaatattcacaataaaaatttcatatgaagaatatgattggtttttttaggcctgtcacacagagcttccattaatctgaggtcccgagtctcctggtgcctgacagttgctcaggatttttaaacagcaatcatctttacatagcaataccctagatatctgtgcgctgctttttccttatgaacgataacaggagttctcttttcttttgcaaactagttcagtttccctaatagtagtattgaattttgaaataaaggtttgagtgagggacagctgaaaaggtggcggtgacaccaaaacttgaggaaaaagaaaggcagcagctgtattgcaaaggagttacttgttcacccacctgagaagacaaagaatgagccaataaggaagtgtagaagtagtagccagaaagggagaagagtcttgtgggggctgggtaagggactcctaaaacaagagtgggcagggacttcacctcttcccgtaatggaagctctgttaaatttttaatttaggagagtttttgtgaaaatgactattttgtttagctcacatgataacatttctataataaatcatactcagcgtgcttatgcgcgaagagactgaactgaagacgctgcagactcagatagcaaaataataagcctacttcatgataaggtaactattagtcattcaaactcctatttcccttaaatatatcttaaatcagttaagggttttaatgttttttttaaattaatagtaatgttatgtttgaaaaactggtttgaaataaactttaaaacctttagaagtttaaccacttaagacttttccagtctgcctcgttatagcaaaaccaaggaaaatttcttttctaagctcctatagagaactggcaatgaaactaaaatttaattgtgtctccaggtctcttatttttctgcaaataataaattatgtactatgatcattttcagataaatcatcatgcatgttccaaaatgattggccaagttttatttttaagaaacattaatcgtgagtggaaagaaacatgctatggccttttgggagacagtagtgtcttattacagtggaaaagtggtagcgtgggcatcagaaaaacatggggaaggttcagctcacccatgtagctttgtaactttagatcttagttatacataaaataaggggattaagttagaggatcttagtttccttccagaattaaaatttagtgattcagagatgtctaggattttaaactttcactacaagatgaatttgacagatcttcctgtagggaactgtagtatgtagcacttctactttggtatttggtaggatgagacttgatcatgcagttaatttgagctgagtctctgaatgcacatgtgaaggccttggtctttttaaagtgtgggggcagtatgtattgtgtgatggcatgtggattgttatacctagtttggtttctttaaaattgaaacatacagttgccatttctaccctaggtacatgaagtgtaatactcctctaagcctattgggatactgcaagatgaaaagtgattgcttcacagtttagacattgggaggaaaatcaagagctgtcttttagaggatgtagcaggcagtataactgtaaaagggacactgcatctctgtgtaaaataatttgaaattatagaaaatattagtacttagtaataattatatttagctacctaattgaaatgcgtttctggtgcactttttgtgtcattatctccattacttacttaaacttaacattatgtaatctggatttagaagttgatgtatatacatggtctgtattcttttagataaacataagggattcctcttttgtctggcataatggcttttcaatatttcaactttaaaaatcattgtttctgttgtattgaaaatattttggggaggaactacattttgggtgtttatagtaaaaaaaatagtaattacatctgcaacatttgggtgatgtgaaactagatcttttttttatttgccacacactcctaaggttactaatgttgcatcacaacatttttgtctactgatacccatactaactctctttgttgcactattttcctgaaagaaccaacttcttcttaaaacagggaagaagacatgaatccaaagataaatcctctaagaaacataagtctgaggaacataatgacaaagaacattcttctgataaaggaagagagcgactaaattcatctgaaaatggtgaggacaggcacaaacgcaaagaaagaaagtcatcaagaggcagaagtcactcaagatctaggtctcgtgaaaggtaagtcatgttgtattataatgtagtaccttctaacaagttacataaagtttctcattgacccagcaacacccaaaaaaatcataattagggagtttttcttgttcgtttgtttgggtttgtggttttgtttgttttttgcctttgggctttgctttctcatcatgcaaaaatggtttccaagaatggggtgtaagggatgactaaatctcaagtgcctagatttcttttcccttttttttttttgacacggagtcttgctgtgttgcccaggctggagtgcagtggcatgatctcggctcactgcaacctctgcctcctgggttcaagtgattctcctttctcagcctcccaagtagctgggattacaggcatgtgctaccatgcctggctagtttttgtatttttagtagagatgaggtttcgccatgttggc

SEQ ID NO: 72026 - DNA, 1322 bp, Homo sapiens
aactaaagaggaacactcagatatctggcccctcttcctgactcacacaaccgcctctagtctttaggttccatgccacaggcttaaattggcgggagaacactaaacccaacccctttacggcggccggaagagaccaagattactttagactcgaaataggaagttgccccaccctgagttccgcccattccgttctcccgactgcgcattccgggggtgtattcttggccccgccctcttcacggtctttacactcccctatgaaagaacacccaatcaccgcctcgaattgcgttgttatagaaacttttgttaccgcccctttttctcccagcaagctgtgcgacgcgccgggcctcctcgcctttgtgccatccgggtctctcgcgcgagcgatttagtctgaggcgaagcttcggagcggccggtactgttgaaagcgacaagtggaggcgccgctctagcggccgggactctgaactatggcggtaggtaccgaatctgagtttaaagccagggatatttttctgctacgttccaacagtgggtgaacggctcccagaaccttgttcgtgtgtatgtgtgtagacaaaatggcgccgcggccttcttctgcgcccgccatcatggctgcctgctgtagggagggggaagtaaggcggtgttggtgggggtggggagccgcagggagtgcctttttttttccagaactttcctcctctcttccccaaccctacgttcctttcgcctcactgaacttcctccattttcgcttattcaccctggctagtgatttattctaagttttttttagggcctgagaatttgcggtggagaaaggggctggggaagagaaagacgatcaggagtggtctctgaaaagtattgggtcaaaaaggcagtgtctgtaaagggtagtgtgggagaagagagcgacttgtagctatttttttttttgtacgctcaatgagatgcttctagttgcataatttcaattagtgttcgtccgtgtaaaccttattattgtgtattaacgagctaggaaggtattgctgaaagggagtgaaaattcaacttaaaaggttgtggaactaccaattctgactgatgcgcggtttccgaagtggcccgtgatgtaatcaatttgaagtccgagaagcgttacagttaagtcttgtcactgaccttgttcctttaaatttaaacccttcgttggccgggcgcggtggctcacgcctgtaatcccagcactttgggaggccgaggcgggcggatcacgaggtcaggagatcgagaccatcccggctaaaacggtgaaa

SEQ ID NO: 72027 - DNA, 1131 bp, Homo sapiens
ttttctgaacttcatctggaatcttatcatcctatgatatccctgacaatctggcatctaaacctacactgtttgctgctattaaaggtttatttctaatgaaaggtttatttctaatgaaaacttggtataattaaaggtttatttctaatgaaaacttggtataattccaaactagacacacaaagtaatggaagctctaagatacattggtaagatcagaattgttggtttgtgtgcataaaccaatatgttgttctctggtaaccatcatagctctagttccatttatgttattggcccgaagtgtttagtggccacagcaataacaagaagactaagatgtctgtatatgttaatgttagacttttgtttttgttttgtgagtaagctttatcatttcccaaggaaccaggttctatgcaacaagataatatggtgtctaattttatgttgttcaggaaagacagtggttcctgactcaggaagacagtctcagaaacatgtggaatgatattgagctgctaacaaatgatgataccggaagtgggtacctgagtgtcggttcaagaaaagaacatggaactgctttatatcaagtagatttgctagtgaagatctcttctgaaaaggtagtgattattacactgactgtttcattcacagaatttttactgagtgcttagtagggctagtggcccacagtaaatattttgtgaatgaacatagcacttcctcagggaatcaagattcaatctcagattgctagaaattcacgtctgaataccctctgcatcatgtcaggatcagtattttcacaactgaaggattcttagttcctcttgatatttcatgcatacaaaaatatgtgtaagttgatacaaaggatatcttttttttttttttttgagacagattcttactctgtcacccaggctggagtgcagtggtgtgatcacggctcactgcaatctctgactcccagattcaagtgattctcgtgcctcagcctcccaagtagctgagattacagttgtgtgccaccatgctcagctaattttttgtatttttgtaaagatggggtttctccatgttggccaggctggtcttgaactcctggcctcaagaaat

SEQ ID NO: 72028 - DNA, 1067 bp, Homo sapiens
tatatgtaaaaggcctagaacaaagtttaccatatagtaagtgctcagtaaatatttcttgaccagctgcatgcagtggctcacatctgtaacctcagcactttgggaggcagagatggacaatcgcttgagctcaggagttcgagaccagtctgggtaacatggcaaaacctcgtctgtacaaaaaataccaaaaactagctggccatagtggtgtgtacctgtggtcccagctacctgggaggctgaggtgggagaattgcctgactgagcccaggaagtctagggtgcagtgaactggggtggtaccactgcactccagcctgggtagcagagcgagacgctgtctcaaaaacaaaacaaaacaaaaaatatttgttgactgaataaaagtcaacaacattcttttttactttcatcacatctgttttgcagtatttagaagtaacttaagtaatcgttggctttttaatgagaaaaatttgtattttttttgtattgaaaataaagattttcgaaggaagcttgtaactttgatttgaaattttcagatactgaagtggatgtagttggcctttgtcaagaaggaaagtttcttttggttggcgagagaagtggcaacctacatcttattcatgtaacatcaaaacaaacactactcactaatgtaagatcttgttgtattttaattttcattatttaaattctaaataatctcttagacaactaaaactctagcaaactattacttaacatgtgttttaaattaaagcaatgtttttttgaacaattaagctttgaaggtgttaccacagcttggatcctgagttcttggctctcgtgtaaatagaaattaacaccaggtcaaacagaaattttcccagggaatgtttagtaggcttgtggctcaaggaatctcaaggaaacagcgtatgggaaagggatcccaagtgctagctccccgaagggcttagctcttgtcattttgaggaagctgaggtgaaaaagggagtgatttgtaggcatgtagaggcagggaacttttagcgcctgtgaattttggtcgc

SEQ ID NO: 72029 - DNA, 1673 bp, Homo sapiens
catgttggccaggctggtctcgaactcctcacgtcaagtgatttgcccgtcttggcctcccaaagtgctgggattgtaggcatgagccactgcgcccggcctaagtgatatttttaaaatactgacttgccaggcctgtgctacgtcttgggtatatgacaagattgaagatttgttttccatagcttcatgatggagctagaaacgtaagagctattccaaacagtgagaagcacaggagagttggagtagggagaagatccccttagtaggaagagaggtggtaagggtaggtatggagaggtactggctggtgccctgaatctaacatgtcacagttagcgtattttggtcaggggcaaaacttaattctcaccagtgttctttgaactagattgtatttaatttcaccttgacacaaaacaggtgacttgtattattttgtagattaatactatacatttagcctgctttcttttttaatgcagcaattgagaatgtagacttcagtacagcaaaaaaggtaagaaaataaatccatattgtcctcttaaaaaaattacatttaatattaatgtagtagaatgtttctgtatataattggtctacttcttgatattttagaaattattatgatataacattttaataacatttctatttaaaaatacatttatgcccgtaatcccagcactttgggaggccaagggggcggatcacctgaggtccggagttcgagaccagcctgaccaactggagaaaccccatctctactaaaaaatacaaaattagccggggggtggtggcgcatgcctgtactcccagctactcaggaggctgaggcagggaattacttgaactcgggaggcagaggttgtggtgagccgagattgcgccattgcactctagcctgggcaacaagagcaaaactctgtctccaaaaaaaaaaaaaaaaatttataactgattgatatcaactgattttagtgattttatggagcataaatatgtattatatatatgacgttgttgtttttaattttgcagttacaaggacaaatcaagtccagttttatttctactgaaaattatcatactcttggttgtctcagtcttgtggctggagatttagcaagtgaagttcctgtgataattggggtaattgtttttataaagttttgttttttgttgcctaaagcattttctcagaaaaatgtttttgttttggttaaattgcaaaataatttgtaacatataaccgaaacaaggaaattataaaattaaggtaattaaaaataactcaataaataaatttctgtcttggaaaaaatattgcatctttactttccctagtctttacctgaaagtacagcatttttttcaattatgagagcagacaaaaacgatagaaaacaaaaccaaaaaattccattgttacagtacctgtgactttgtcactaatggaaaaacagcacattattgcagctgtcttgaaataaatatttacacaccactacttcaaaattatggtcatcatagtttttctaataggaagtgtaattactactggtgacatactcacagggactgctgattctactgctttttgttttttggggtttttgtggcctacattcataagtgaaagaaattctgtttcagatggagattag

SEQ ID NO: 72030 - DNA, 1050 bp, Homo sapiens
aaaaaagaaagaataagacatactatttgattatacaagagagtcaataataacttaattctatatttaaaaataactaaaagagtgtaattggattgtttgtaacacaaaggggatggataccccactctccatgttgtgattatttcacattgcttgcctgtatcaatgcatctcatgtactccacaagtatgtacacctactacgtgcccacacacaagcaaaaaagacaatcgtggataagaggtttatggacaaaataaatatttaaaggaaaaaaaagaaatcgtggaggtttttagttatgtcagtgattatccattaagaatttcatttttaaataatctatttcagataattcttgcaaaatggttggaacaagcagccaggaaccttgaattaactgataaggtaatactgatttaattaacagtaaaaagacattttgcacactcccaacagcataaaacattgttttgaactgtctgtaatcttttttaaaggcaaattggccagaaaatggacttcaattggcagagatattttttacagcagaaaaaacagacgagttgggattggcatcttcctggcattggatttccttggtatgatgtgagaatggatttttagtaatgaaacagtcagtttacctgaaagggtttgtctgcatgtatgtgaagtatctggaaatatatctacttcttaaattttctgtttttttgtgccttttttttgttttgtgcctttcaaatccatatgtaggaaaatttgctttttctttctttctgatttgtgttaaaacttcaacctatgtttttaatttatttatatatttatttatttattattcatttttgagacaaggtctcactctgttgccccagctggaatgcagtggtgcaaccatggctcactgcaccctcaacttttgggctcaagtgatcctcccacctcagcctcctgagtagctgggactacaggtgcgcatcaccaggcccgactgatttttgtattttttgtaaagaaggggttttgccatgttgcccagg

SEQ ID NO: 72031 - DNA, 1102 bp, Homo sapiens
gcttacagcagaaaaaatactcttctgaatttttctgaatagtcaaattgttctctatatgtgaaaactgaagaaataaatggttttccagtgagtggatgaaatattctcaaactaccatgtggttgatgtaagacctgctgattagactgtgctgttcacttgcatgcatcgtaaacctgagggctgttccttgtccatgcgtgcatcttttgtagctcatatttgatgccgtgctcaagatcatgtatgcggcagtggttccttggagtgcagctgtggagcaactggtgaaacagcacctggaaatggaccatcccaagtaagatgactgtctacgaaacaatgttgttatgctctggagaaacattgtgttttgagttgacgttcatttatgtttctatattgtttgctgtgtcccatagtacttcataaaaaagacaatccatgttaatatgggtaaatttgctttcagagtcaagttattacaggaaagttacaaactaatggagatgaaaaaacttttacgaggctatggaataagagaggtaaatctcttaaacaaggaaataatggtaagtacactcttcgaagagtcttttttctctttcatttctggggcaatatggaaagcttaatgaggaatttatattctaggaggctaatagagctaggtttttccactacatttcttttgttagatatgatgttaataaggtgttcagttatttatgagagtatttattctttttgacatggagtttcgctcttgccgcccaggctggagtgcaatggcgcgatctcggctcaccacaacctccgccttctgggttcaagtgattttcctgcctcagcctcctgagtagctgggattacaggcatgcactaccacgcttggctaattttttttttgtatttttagtagagatggggtttctccatgttggtcaggctggttggtcttgagctcccgacctcaggtgatctgcctgcctcggcctcccatagtgttgggattacaggcgtgagctaccgctcctgggctttttatgagagtattaaagacaccaaataggccaggtgcggtggctcacacccgtaa

SEQ ID NO: 72032 - DNA, 1037 bp, Homo sapiens
cttcatgaaaagtcttcctttattcctttatcagcaattcaagaacagatgcatgcaaaatcaacctatcatttgtttatatgctcacttactatttagtgctagactagatttccttagcgtctcgcactcattgctcatttttctcatttatcagttgcttatgatggtggggagaagccatttgactggaagttaaataaaacagtgaagaaagtaactttccagggaaaaaaaagaagctacaatttacttcagaaaaataacttttttgtaacacataaacttctgttttctacctcctgaaagaataattagatttttttcaaattagatcttttgtacttagttactgtatattatcatttgagaagaactactgaagacttgagatgagagaaccaaagctaattaaaatttcttctttttaaaattctgataatatgagaatttgcatgtctgctataacttttaaaaatttaattacagacaatctgcagaagaaggacgaatgtgaagaaatgttgaaactatttaaagaggttgctagcttacaggtaaacatattgagccatgttaaacattattacttgaccaatcagtgcatttttccctccttaaagttttctgtatggctgggcgcagtggcttacccctgtaatcccagcactttgggaggccaaggtgagtggatcacaaggtcaggagatcgagatcatcctggctaacacggtgaaaccccgtctctactaaaaatacaaaaaattagccaggcgtggtggcactcacctgtagtcccagctactcgggaggccgaggcaggagaattgcttgaacccgggaggcggaggttgcagtgagctgagatagcaccactggactccagcctgggtgacagatcgagactccatctcaaaaaaaaaaaaaaaaagttttttgcactagcctttagggactggagatactggttttccttctctctctctctctctcaacagctgtattgagatgtaatttacataccatataattcatcc

SEQ ID NO: 72033 - DNA, 1058 bp, Homo sapiens
ccaacgctttgggagaatgaggctagaggatcacttgagctcatgagtttgagactaccctaggcaacatagtgagacctcgtctctactaaaaataacaaaaattagctgggcgtggtgatgcgtgcctgcagtcccagctactttggaggctgtagcaagaagatggtgtgagactagaaggtggaggctgcaggagctgtgtttataccactgcactccagcctgggcaacagagtgaaaccctgccttaaaatgaatgaatggatggatgtaaacaactgggaactaccttgctgaggtggggaggggaggagggcaaaggtcgaaaaactacgcatcaggtactatgctgggtgatgggatcagttgtacctcaagcctcagcatcacacaatatacccaggtgagaagcccagacatgtacccctgaatctaaaataaaagttgaaattatgaaaaaaaaaactaatgaaaatgattattttaaacaatagattaaacagacttgggactttgtcttgcttacctttgctacaggagaactttgaggtctttctttcatttgaagattatagcaatagttccctggtagcagatctccgtgagcagcacattaaagctcacgaagttgcacaggcgaaacacaaacctgggagcaccccagagcccatagctgctgaggtgaggagcccaagcatggaatcaaagctgcacagacaggcactggccctgcagatgtccaaacaagagctggaggcagagctgaccttgagagccttaaaagatgggaacatcaaaacagcactgaaaaaatgcaggtgacattccagatccctgaattgcatagcttctctgaaattgcggctgggcacggtaactcatacctgtaatcccagcaatttaggaggccgaggcaggcggatcacaaggtcaggagatcaagaccatcctggctaacatggtgaaaccctgtctctactaaaaatacaaaaaattagccaggcatggtggcatgtgcctatagtcccagctactggggaggctgaggcaggatc

SEQ ID NO: 72034 - DNA, 1079 bp, Homo sapiens
tgcctgtgggactgaatcttccttccatgatacatgatctagcaagccaagctgccaccatttgcagtccaggtgacaatatttataatatacgtagttttatattctctggttcatgtcatacttgtctcccaaatgctgtctctttacaattggacatcacggtaatcagactagagatagtatctgcatttcacaaagggatgcttataattgattctctttgaggattattgtttgaaagtatttcaaaatactaacaatgtcatttctgactgttgacattactcacttttgtaggattatgaaattccttgcctcccatatctgatcttattttcaagtcaagcttgagaaaaaatttaactttttagggtagtcaaagctatatggaacctttctatctacattgtggccttccttagaattttaaatggtaattattaaaaggttgttttcattatcctaaagacatgaaatatgagtttaatgatttttctccattttgtttcagattttttactagatgctttagaactatgtaaacatactttaatggctgtagagctttccagacaatgccaaatggatgactgtggaatcctcatgaaagtaagttacttttgagttttttcccttaaatcctgggcaacgcattatgcaccttttttttttttcggacagggttttgttctgtcacccaggctggagtgcagtggcatgatcaaggcttactgcagtcttgaactgggcttaagcagtcctcccacctcagccttctgagtagctgggactataagtgtgtgccaccacatctgactaattaaaaaaaaattttttttttgcagagacagggtctcaccatcttgtctaggctggtcttcaattcctgggctcaagtgattcccccacctcagcctctcaaagtgctcggattacaggcatgagccactgcacctgggccgttttttaatcatttgcaaagtttatgaaaatactgaatccacctcttatgttttcttaccctagaccggaaaacaacgtaagggcatgaggccacttctctgttccagtcactt

SEQ ID NO: 72035 - DNA, 1087 bp, Homo sapiens
aatatctgctgtttgttttgttatcacctaaatggccaaattattataattatttctgagagtatcattgagcatcattgaagagattctagaagacaaactaactgttgataactcgcttatgaaactgggcctcagagggagttgtcttcatttctactactctgttgatatgtattaaatgctgactcttttttaatgaactgtattgaggtataactttcaaaattaaaatgcacattttaagtatatcaaccaatgtactcaccttgtcaccaacaccacagtgaagacttagggtatttttaatgcttcctctttgctccctcccagtcagtcccccacccctttctagcactataggttaaattctgatactttttggatataatgatgaattttcaccaaagttccttaatatttgaaaaaattttcagaatgttatatagaactagacctaaatatttttttcttcttttctaaaagttatttggagagactacattagttaaatcaaggcatgttgttatggaattgaaagaaaaagctgttatatttatcagggaaaatgctacaacactactgcacaaagtaagtatttgttctgggtaaaaattttgtttgttttttttttgccttttacctcagttaattgcatatgactcaatagtttatgattcagtacagtagtattttactattcaaaaacttcaagaaactgtcttatagctaatcaattatatttttattatggtaattgacatgctatagagcttttatgaaatagtagtcaatcttgtccactgtcgtatcctgattttggttacttatatttatatttatttattttttagagatgaggtttttctctgtcacccaggctggagtgcagtagtatgatcatagtttgctacagccttgaacttctgggttctagttatcctcctgcctcagcctcccaagtcactgagattataggcatgagcaactgtgccccactctgtagttatttattttacagattaaagcattccaatgatcctttcacttatttctattgcagaaatcctaattttccattaccctt

SEQ ID NO: 72036 - DNA, 1050 bp, Homo sapiens
gtataccgtttactgtttcatcattttctggcatgctctttctctatttttctatttatatataaaatcatttcatattttgtatatattttttgtatttaggatttagttacatacattatagctctttacccctaaatatttcagtgccctatagaacttgtagttgctttccttactcttcagatagtcataaaggacattaaacctaagcaaacacattagaactatgttactataacttttcatgaaacacttcttctgtagtgtctataattcaatttagtggtaaataaaccttgagacactgaattctgtttttttttctttaaaaagttttttttaagtataaattaaaattattcctctttatttgtatttctgccctttgtgaacaaagttaattctgttttgattgtgaagaatttgcttcttttgctggtttcttcctgtaggtatttaattgtcgcttggtagatcttgacctggcgttgggttactgcactctcttacctcaaaaagatgtgtttgaaaatctctggaagctcatagataaagcatggcagaattacgacaaaatcttggtatgtcctaaggaagcacaccttcaattcttgaagtattcaagattgggggggagaaatgaagttggttttgccacctgttcttaaagatttagtagaagaaatgttgagctaactcgtgatttctaccagcttctgcttgactggtgacatactgttgcctgtatatgcaagttatgagcattgttcaacccaaagaattacagttttttaatttcttaaaatctgtgtacacccttagaacctcaaatcttattttggtgtagttgaaaccctagacccatgaatcagtttgtttttgtaggataagtttaacagatagaaaatttctcttggatattgtgttaagggattttcttgcaagataactaaaatttggccttttattataaaggaaagccaggctaaatgtatagcattatacgaaaacctgaattacctaaatattacgtaagaagtaacgact

SEQ ID NO: 72037 - DNA, 1002 bp, Homo sapiens
cccacagtgctgggattataggcatgagccaaaaccctgttttctttaccaaaaatataagacattttatttgccaacagttgacttatcagaaaggtaatcagtacagaaatgctatatgttttgaagcttaattcttctgcagtaatggaactggtgttctgttgacattaacaatcaaacttttcagatgaagaggcaatggttaggatgactaagaggagtttcggacccatgtacacctcaaatctcagaatgatggctgggttgggtagtgtgaggttggaggagctatagacaaatgtttctttttgaaaaaggatactaagaaggcaagtcatgatgttgcccttactctgatacatttcagtgtagagggtttttttgctttgtttttttctttttatttctagatttcttttcaaccagttttcaggcaacattttctcaccaagaaagacctcattaaagctcttgtggagaatatagatatggacacaagcctcattttggaatattgcaggtaattctttaaacattaacggtatttttgctgttaacaaactggtaattcttttgcaagaacacagtaataacgatgattattttatgaggtccatagaccactattttcttttgctcattcccaaactgagtaaatatgaaatcagattagagtctcttatgataccaccatttaaattcaccatttagtgtttcccaaacttgtctcctgataagcactgcttagggcacttgatttcaaatgcaggtttctgggcctctctggcagttctgactcagtgggtctggaccaaggcctagaaatcgctggtctctaataggagctcaggtgattcctatgatcagaaaagttggagaatattcttctgagtaataaacttctaaatcaggttaactagggagcaaagtaatcttaaaaattaatgaaaagtatgatttagggagaatttctaatttcctattaaaaatgtttataaa

SEQ ID NO: 72038 - DNA, 1019 bp, Homo sapiens
tgatttttttttttttttttttttttttgagatggagccttgctctgttgcccaaactggagtgcagtggtgcgatcttggctcaccgcaacctccacctcccgggttcaagcaattctcctgcctcagcttcccgagtagctgggactacagccatgcgccaccatgcctggctaatttttgtatttttagtagagatggggtttcactatgttggccaggctggtctcaaactcctgacctcgtgatctgttcaccttggcctcccaaagtgctgggattacaggtgtgagccactgcacccggcctaatatctgatttttaaaaggcaataattagctttgatgacaggtagtttgtctgattttgagactggacaatgacaaggttaaatttcaacaatggaagcatgtacccaagtgttttgtcagatactttgcatggaaatgcctgcagtttgggagactggtgtgtattgaatgcttcttttagcacatttcagttggactgcgatgcagttcttcagctcttcattgaaacgctgctccacaacacaaatgccggccaaggccagggagatgcaagcatggactctgcaaagcggcggcatcccaaactcctggccaaagcccttgagatggttcctttactgacgagcacaaaagatttggtcatcagtcttagtggaatactacataaggtagacacacagtgaaatgaatcgggtcatctcagccatccctcccacccttaataattagatacattagtaacaaattggatgtataagtctatatttttatcaacttttaatttgaaatattctcttgatttctatatttttaacacagttaaatacaattttcccatttttcaaaatagaaatagcttttcttccccagatttttgaaaaccttacacattctttgaatttatatgagctagagagaaatgtataaatcaaaacaagcaatttccctataactccactccctagagatgaagatgttaatagtgtg

SEQ ID NO: 72039 - DNA, 1822 bp, Homo sapiens
cacacacacacagaaaactcctaaaggcatataagaatttagagaataggaatggaatctgatgagagggccccggtgggcttttttttttttttttttttttttaacagagtcttgctctgtcgcccagtttggagtgcagtggcgtgatcttggctcactgcaacctctgcctcagcctctcgagtagctgggactacaggcatgtgccaccatgcccagctaatttttgtattttcagtagagacagggttcttccgtgttggccagggtggtctcaaactcctgacctcaggtgatccacttgccttggcctcccaaagtgctgggattacaaatatgagccactgtgcccagccatgagtatgcatttttgtaatttttaaaaagttgctaatttgaccaaaatacattttcttgaaaagattaagatttgcctgtaaatctttatttatttatttatttatttattttaggttccttcaagatatctgctttgaaattctgcctttatttagctgagagatggctacagaatatcccatcgcaggtgtgtctgaactatcagattggcggcttctcttcttcctaattaaattgtactagcttaatttaccttctcatgctgccctggtgcctaaaatggagaaggaagaccaaggctttatgtagatgcttaggaacataactgaggaaggggggagggattgtgattgataaagatggatgcttggcttcaactgaggcttacaaagtaagattttctttttgcttggaattgtttaaaaggacgaaaaacgtgaaaaagccgaggctttgttgaagaagcttcatatccagtaccggcgatcgggcacagaagctgtgctcatagcccacaagctgaacactgaggaatatttaagagtgatcggaaagccagcacatcttattgtcagtctctacgaacatcctagcatcaatcaaagaattcagaattcatctggcacagattatcctggtgaggacaaaacaatttttttgttgtccaagaaaagctattattttgattctcagttttatgtatatatgtacgtgtacatatatattacttacatatgcttatatatgtatatacttatatgtgtatgtatgtgcatatatacacatacacatataagtattcaatataaatatttaaaacttgagtttttcttttctttattttgaatatcttagatattcatgcagcagctaaagaaatagccgaagtcaatgaaattaatttggaaaaagtctgggacatgttgttggaaaaatggctatgcccttcaacaaaacctggtgaagtaagtacttgctgcccaagagtatctgtagttgagtatgcactgatggcttcttctcaaaggctaaatatttatcccacatgatacagccttctaattaggagcgcagactcttcaaagaaggaagtttctttgtttgttttgtttttgagatggagtcttgcttgttgcccaggctggagtgtaatggcgcggtctcggctcactgcaacctctgcctcctgggtgcaagtgattctcctgcctcagcctcccgagtagctgggattacaggcgcctgctaccacacccggctgatttttgtatttttggtagagacggggtttcaccatgttggtcagactagcctcgaactcctgaccttgtgatcctcctgcctcagcctctcaaagtgctgggattacaggcgtgagccactgcacctggcctcttttgtttgttttttaaagacagagtttcgctctgtcaccctggcaagtgcaatggcacaatca

SEQ ID NO: 72040 - DNA, 1018 bp, Homo sapiens
tttgttttgtagagacagggtctctcactttgttggctaggcgggtctcaaactcctggcctcaagtgatcctcccgcctcgatttcccaaaatgctgggattacaggcataagccactgtgcctgtctggaacttttgttcattatagtaccctctgttatctgataagttttaaagagattgtttacttttttttttttttttttttttggatacagagtcttactctgtcatccagtctggagtgcagtggcgtgatctcagcaacctctgccgaggttcaagagattctccctcctcagcttcccgagtagctggggttacaggtgtgcgccactatggccagctaatttttgtatttttagtagagttggggtttcaccatgttggccaagctggtcttgaactcccgacctcaggtgatccgcccgccttggcctcccaaagtgttgggattacagacatgagccaccacgcctggcctgtggttgcttactttttgtttaaatattgttttgtagctgttttacctttcagttgatgatttcagatgctgtcttgtatgaaagaaatggcctgttcttttactcagattcatgtgattaactttttgttttgaaataatttaaaatgtacacaaaaatgcaaaaatagtaaaaaaagaattcctatatacacctttcaccgagatccatgaatttttaacattttgccatatttgcttcatctctcctctataattgatactcttacgatatttttctgaaccattggagagtaaattgcacgtggcatgcccccttaccccctgaatattttaaaggtgtatttcccaagaacaggattttctctaatccaaccataatataattatcaaaatcagaaatttaatggtgatataattgaatttatggtccattttgcagttacaccaattgtcctaataacgttttttatataagcagttttctcccccaggtccaggatcttgtctaggactatgccttgcatttgttg

SEQ ID NO: 72041 - DNA, 1048 bp, Homo sapiens
tacttatattcacctatatcgtgatgcaaaatagaaatcttaccagtacatttttcagcagttgatttttttaaagggctttcttgataaaactcaggtcagagtctatgagatgaatcagttcactaatacgtggctaggagtctgcagtggaaaacatcagagccagccaagatctagaatttctgaactcctgcgagggcgagggttcctagcacacctttagctgaaaggtgcctctcaagcagaagaaaactctttcttagctaggactttggccccagacccttttatgttctcttaccatgctaaactgggttggttcagatatgggccaccagattctttttgctcttctaacctacgactgaggcctagaaaggcacattgattttatctaatgtgctagatctgattggttatggcttgtattcttgagaagactctatctgggctcaagtcagaacgaatgtggcaatccattaatgatgcctggcacaggcatggataagggagcatggtggttcacatgccagccagctttttgtctttctagcctaaaccaaaagtaagccaagtggcctggggaggccctatgtccagcctcagccttggagagctgatagaaaagatgtggaaagacaaccccaagaaacggattccttctggtttggaacaagcaaagctgtcctaatcacccataccatgccctctttccctctggacccgcaccttggcctcatttagtcttttaagggaaaggccacctttgttcaaacaagaagtagctcctggtatgtctacctgaactaggcacgtggaaggtcttggagggaagcgatttaaagaggagagaaaaaggaaatcccaaaaggctacttaatgcaaaattcataacgtgctgctttttccactaaaagctctgccccacccctcctccagctggcctgattcatcctcccttcccggagaggggccagcctgccctgggtctagaggttgaaatgggctgctaacaaggtcctgcataccaaacacagaatttccc

SEQ ID NO: 72042 - DNA, 1509 bp, Homo sapiens
gtgctgggattacaggcgtgagccactgtgcccggccacctctttggttttcagtactgccagggcatgcctgtaaatacaagggctgcaacaacagttgggggccctccctccattctgcctgcaatttcacccaccattgcttttgcacagtcagtgcaaatatcaacacagtgtaaaggcaaataacatcttagtatcatgaaaacagctttgaccctttccctcttgaaggagtctcaggaatgccccttcaggggtccatggaccacatgttaagaaccactgttacacacagtgcgttccgtaactgtagagattgactttacattttaaaataatgacgttgtttatgttgcctatgttgaaactcatttacccaactacaatgtgcaggtgttcaactctccaaacctcttttggtttttcagacattaggtatgcatcagttaacttttgcccatagaactcgagctcttcagtgtctcttctatttggctgacaaggaaactatagaatctctctttaaaaaacccattgaagaagtgaagtaagtagaaatgtttaaattgtattaagaaataggaaacagatcattttttggagctgtaccttttaagccctgaattcagaagagcatagtagagtagctgtgtgaatacagttctgttgccctgaatatccttgacattttggcaaagggaaaatagggctttgagaacatcttgtttccatcgtttcttggagacatttagaaactgaatgttttatttatcttgttcaaattgatttctatctaatgttattatatattcagtgaatatatttggaagtccaaaatggacatttaaaacaaactggcctaatatttccatatggtagtttttattttaaatgtaaatgtggcctatgagaatgattcttagaaacgtttctgttttccagatcttatttgagatgtataacttttctggcatcatttgagactttgaatatccccatcacatatgaattattttgcagcagtcctaaagaaggaatgattaagggtctgtggaaaaaccacagccacgagtccatggtaggtacacctcactgccccattcccaattccctgcccctactcagaatcctgaaagagaaaaccaggaacagtctttttgttgttgttgttgttggggacagagttttgctctgttgcccaggctggagtacagtggtgtgatctcagctcactgcaacctccatctcccgggttcaagcctcagcctcccaagtagctgggattataggcgcccgcccaccacacctggctaatttttgtatttttagtagagatgaggtttcaccatattggccaggctggtctcgaactcctgacctcaggtgatccacccacctgggcctcccaaagtactgggattacaggcatgagccactgcacccgacccaggaacagtctgtatccctgagcaactctactgctctgagacctttctactctcctgt

SEQ ID NO: 72043 - DNA, 1219 bp, Homo sapiens
tcctatgtattctagagatttccttttttttttttttgagatggagtctcgctctgttgcccaggctggagtgcagttgtgtgatctcggctcattgcaagctccgcctgctgggttcacgctattctcctgcctcagcctcctgagtagctgggactacaggcgcatgccgccacgccctgctaatttttgtatttttaatagagacggggtttcaccgtgttagccaggatggtctcgatctcctgaccttgtgatccgcctgcctcggcctcccaaagtgctgggattacaggtgtgagccaccgcacccggccgagatttcctgttttacaggcatgtatgctatgtgtgtgcatatctacagtgtatatatgcatttttgcacacataaatgcaatcacattctaaacaaagtgttgttttcacataacagtggtctctggagattgttccatatcagcacatgtagatctatctaattgttttattgagatacaattcacatgtaaaatttatccttttaaaatacacaatgaagtagtttttggtatatgcacagagttgtacagcctcaccattatctaattccagaacattttcctcaccccaaaaagaaaattcatatccattagcaatcattccccattccccactccctccagcccccagtgaccactaatttactttctgtccatggatttgcctattctggacattttgtatcaacagaatcccacactatgtgggattttgtgtccggcttctttcactcagcatccacattgtagcatggatcagaacttcattcgtctttattgccaaataatgttccattatatggatataccacttttatttatccatttgccagttgataaagatttgagtttctatttttggtcattataaataatgctgctatgaacatttgtgtacaagttttcactgaacatgttttcatttctcctgagtatatacctagaagtgggcttgttgggtcttacagtaactctatgtttagccttttgaggtattttattatttttaatgcttgattattctccagaatatgtggtaaaatatacctgaagttacttaaccactcctctattgatggaagtttacattttctttcctcttttttttctttaaatgtatagagatggaggtcttgctatgttgcctaggctggtcttagaactcctgagctgaaaca

SEQ ID NO: 72044 - DNA, 2578 bp, Homo sapiens
ctcagctcactgcagcctccctcccgggttcaagtgactcccaagtagctgacgttacgggctcctgccaccacgcccggctaacttttgtatttttagtagagacagggttttgctatgttggccaggcaggtctcgaactcctgacctgaggcaatccgctggccttggcctcccaaagtgttgggattataggcatgagccactgcgcccagctgaacatgcatattttttatttgtcatttggcttattaattacatttttaaaagccatctgttcttgtctttgactttttcccctcttttcatcattcatacactcattccttgatgtcgttcagtgtttcagtatttaaatagatttcttttggcacttagaagagcaaaatacctgatcaacggctcttgctgttggaataaataataacaattttctattaattctgctttgatttttctctagaattttctgggttcctgtgaccctcaggttattttaaagcaattggaagagcatatgaacacgggccagctagcaggattttcacatcaagtaagaggcgatttcatctcctttttgctatgaaaatgttgatactagaaggtagtcattttcccaaaccaagagtaagctgaaaactgctatgtctagctgtttgtttatgtatagaattattttgcttttactaaaacctcagtaaattttttaagaggcagggaccctgagcgtcttgttgactgctgtactccatggaaaatttgtagccttaagtgcttttaattgaaaacagatcttcttcctcataaaaagtctcaaagtgcacaacaacaattactttatttattgactgatgctgacaggcctcctttccctttttaccccctcaaaaaggaggcgcagtcacaatgcagtgctaattgggcttccgattgtcagaaatgttttgatattgaataaaggcttgatacctgtcattctatagattagaagtctgattctaatagattagaagtctgatcttaatgatacctgtcattctatagattagaagtctgattttgaataatatcatcaataagaaggagtttgggattttggcaaagaccaaatactttcaaatgttgaagatgcatgcgatgaataccaacaatatcactgagctagtgaactatttggcaaatgacttaaggtaagttaattaaaaaaaaaaaaacttactgtggaatttccttaaaatctatctttataagctgggcacgatggctcacgactgtaatcctagcactttgggaagctgaggtgggtggatcacctgaggttgagagttcaaaaccagcctgaccaacatggagaaaccctgtctctactaaaaatacaaaattagccgggcatggtggcacatacctgtaatcccagctactagggaggataaggcaggagaatctcttcaacccgggaggcagaggttgcagtgagccgagatcgcaccattgcactccagcctgggcaacaggagcgaaactctgtctcaaaaaaaaaaaaatctatctttatgttggagcagaatgtcaactgtagagctatttggttgtaattaaaagctcaaaatattacatctctcattactgcacatatccaaaagttaatcatttaataacccaatttcttggaatatgaccttagaatctgacaattaaacaggtcatctgaacccccaaatcaagtgtctcacagccctgttctaaatcctacattacaattttatgtctagacacttgctcagaacattaatgactttatgtagcatcacttttgttaaacctggttatctaattttccagcacccacaagtttagaaacaataagcttcttgggatagagctgggggtggatatggaaactgaacgggagaaggaagaagtgggctgacactaaagaaagggaagttcaagaccgcagtacacaccagatccatccctgcatgtggtctagccatgttggcgcttgagaggtctttctttctcattaccactccatggatttccatctgcttgtttatctcttgtgatccagccataattagatattgtcatttttgagcaagtattttttgagttataattgatacatataataagctggacatacttgaagtctgcaatttagtaaattttgacatatgtatacctataaagccatcaccacaatcaagagagtgaacataattctctgaaagtttcctcatgccctctgtgaagttgattacatgaattaggtcattcttgtgatacccaaattcatcagagtcgaggggcccaggggaaaagcactcagagtacaaaacattgctccaaaaacataattctggccgggcgcagtggcttactcctgtaatcccagcactttgggaggccgaggcgggtggatcacctgaggttaggagttcaagaccagcctggccaacatgatgaaaccctgtctctactaaaaatacaaaaagttagccgagcatggtggcgcatgcctgtaatcccagctactcgggaggctaaggcaggagaatcgcttgaacccagg

SEQ ID NO: 72045 - DNA, 1054 bp, Homo sapiens
ttttttgtatgtaaaatgtgcacataatttatttttactcccattttgaacttaagtgccaggtaaaatttttactttgatcatattttggtagctttattttttatttgctgtttttcagatcggaatattttggtagctttagtaaacctaagtatcgtggcttttttcttcctttggtccagatcaggcatattagaatgagcccgcattttgttaccgcccattaataacttacagggcttacctccaggtggttgtgctcaatgccataagattactttttttttcagaaggggagagtattgattcgggagataaatttgtggcgtttaaaatctgtttctctctaatctaaaatgccaaatagtttgatatgtagatttgtatcacttcacttaagttctgtagtttatctgaccattttcaatttgaaaaactaagtgacttataaaaatcacttctgtgtttcttcccatttagatgtttcttagtggattatcgtaaatcactgaacctttttttcaagaaggacaagaattttggagtctgctattaatggaccatatttattacagtttttaaattgtacaatctctgtattatagctatttgtctaacattaccccacatgtaataaataaaacaatatgagcataattgccccataaagaactcatgtcctgaattaataagtcttttcattgccagtcacttgtgcaatttatagagactatcaacttttttgcaccatatatgaaggaaacaaagtgcaaaaagtttgctctctcccttaagaaaattgagtgcttatagcctatgtcttccatataaaaaagtaagaatatcagtctttttaatgttattctaagaaaatattggtataattttagtggcagagtttatcagtcagaaaaataaaagccactctagatatgccaagcagagaagaatttcatgccagggattggctataaagttcttcaaaagactgaaagaacagaagggaggtagaagcgggagccagacaaaagggaagaagggctttgcagcc

SEQ ID NO: 72046 - DNA, 1889 bp, Homo sapiens
atacaaaaacttagccaggcctggtggcaggcacctgtaatcccagctacttgggaggctgaggcaggagaatcacttgaacccgggaggcagaggttgcagtgagccgagatcacgccattgcactcccacccgggcaacagtgcgagaccccatctcaaaaataaaaaacaaaactaaggatgtgagaaaaactgatacatttattttaacaagatgctcagaatatagattcctattatatttttatataatgattacctgtgaaacaactctttaaatttggaaacctatgtgagtaaaggataagatctattccctgtgacctcagagggtcagtgaactaggactaaagtggaaactactgaaaggtgcctttctaccttgtcaacactctccagaacagtacaggcttccacttaatgtaaaaacattcttatgcttaattgaagaaactagtagtggagatgggattagactgtaccttttaatttctaacattaccattttgtaaaagtagtggattttgttagccagcttggtaagaaggtatgatgacattgttaatagagtccacatcataatcaacaatttacaaagactataaacaatttttacctagtatctctgatgtataaggtcctcggctaagttctgtggaggcatataaattggcagaggccctgtctgtctacatataacttaacagggaagatgatgaatgctgaaagaaagagacaagaaataggccaggcgcggtggctcacacctgtaatccaagcactttgggaggccaaggtgggtggatcagctgaggtcaggagttcaagaccagcctggccaacatggtgaaaccctgtctctactaaaaatacaaaaattagctgggcatagtggcaggcgcctgtaatcccagctactcgggaggctgaggcaggagaatcgcttaaacctgggaggcggagattgcagtgagccaagatcgtgccactgcactcagcctttgagagcaaaactccatcccagaaaaaaaagaagaaagagacaagaaataaagattaaggactaatagctgcagtgtcagtacaggaggggagagatttgtaggaaattaggggaagacttcatagaggcaaccacagccaaatggggatttgaaggaaaggttgcattcaggcaggcacagaagggctgaaggttggacttgccaggcaaaggagtggaggtaggaaagtatttaatagtgggtagtgtggagggagtttcgagtgttacagtttggttgtattgtggaattcatgaagaggggcagccggaaattatggcaacgtggtttggggccaagttctggggcacctgatttgtagataattgtaagtcattgaaagttttggagcagtgaagttacatgaagatgaatctggcagcaagataacaattgagggaggcaggcttattggccaggctataataagactttagacaaaattaatgagcatttaaatgagtggcataagtgaggaagagaggttgaaaaataaattatggtaggatgaacagtataaagcagttaatcagatttgaggacaagggagatgggagaaataaactggatgtagttttgacagacatttagtattgctggagtgcttagagaagagggaaaaccctccaatagaatacccaactgattaaagagaaaaatagaagcgatagtgacataggcatttttcttatcattccttccccctccctccctttccccttttgcaaaaagaaggatgcaaattagagaatttgctctcagctaaagtctggggtttcagagagcagctcaaattcatttaggaaacacgttttaagcatctgctctgtggcaagcattgtgc

SEQ ID NO: 72047 - DNA, 1933 bp, Homo sapiens
atgaataaaaagtggtggctgttttggtagaaccatcaaaagaaataaccaggctgggaacagtgcttcacgcctgtgatcccagcactttgggaagctaagataggtagatcgcttaagcccagaagtttgagactagcctgggcaacatggtgaaaccttgtctctacaaaaaattagctgggcatggtggtgtgcatctgtagtcccatttagttgggagactgaggtgggaggatcatttgagcccctggaggggtggaggctgcattgagccatgattgcaccactgcaccccagcctgggcaacagagtgagaccgtgtctcaaaagaaaagaaataaccagtttccttcaaactctgatgtatgggaaattgttcgtgtcttagcttaattttttgacccactgaaatggttatggtaagacctcattatatacaaaatagcatattttgatgttccatcagctgatggagacactctttagatgaaaaagtcaagatagtatcatctcaaataaccatgtgccttttaccccaaaaacactgaagagtagcatttgaaaagtggtatagaaaacttatagggaaaatgtaaaaatgaagcattttctcaaatataaaagtaaggataagccctgtgtatgtgtgtacatataggtttaacatttcaaatcttttttctttttacttcctcagtctgttcattaccaacagaggtaagttctttaatttttttttttaccttatgtatttgaagttattcttggttttaaagctaccttgagaatttttttttatttttcatttttgattatttgatagtaaagctttaaccttttatagagaactttgatttagagtaattttttggtcttatatattctttcctaaatttagaccttaaatcatacatgtgcatcttttgcacatggctgtgcagtttggatttttgcatgggacttatgaatagtcagctaataaaataagagtaaccttaatgccaaaatctatacaaatgagcagaggaaagaaagggcagtataaattatgtgtaagactttctaagtccagctctatgagcaagtcatgaaaatgaggcacttatgtgctcaaagcaagaaatagagggagaagaaataaattggtactgtgaagaggtacctaatccttcttaatatctaattttttatgggacatatcgtggttgaatacagatttcctgtggataagaagtcagatgggagtggtttgttttattctttgtattaacaagtatagggggtgatttttaattacgacatattgtttgactgaaaatgttttgttgtgactcagttctttttttttctcctagtactgtgaatatatgcctgatgttgctaaatgtagacaatggttagagaagaattttccaaatgaatttgcaaaacttactgtaggtatgaacattttttttcttgcattaaacttctgtacctgagacaaatgcatgtatggcattattctaaagataggaaagtcctcctttagtaggatattacagaattaacatttatctgttagctgtttaagttctctctgagataggataggtctgaatatcaactttcttacataaaaaagtaaatgggccgggcgcagtggctcacacctataatcctagcagtttgggaggctgaggcaggcggatcacaaggtcaggagatcaagatcatcttggctaacacagtgaaaccccatctctactaaaaatgaaaaaaaaaaaaggcgtggtggcaggcacctgtagtcccagctactcaggagggtgaggcaggagaacggcgtgaacctgggaggcagagcttgccgtgagccgagatcgtgccactgcactccagcctgggtgacagagcaagactccgtctcaaaaaaaaaaagtaagtaaat

SEQ ID NO: 72048 - DNA, 1064 bp, Homo sapiens
gatttccctgacacacaaacccctaacttggtaagtccattttggctggtagctactccatcactgtcagtggttgaataagaaccctcaagtctggttttatattcagtctacatggttgtccctgaacgggaccttcctgggataggatcatgtctgagcgggtggggagctcttctctagatgttaacaaaattagtaagtttagatgctagagcactcctgcagagcccaagtgttctatgctcctttcctgtggctaaaaatttcagccctcacatatcaaaagactgggttttctcttctgttaccatacacttactataatgactttagaactagacttgaatagaaatctagcagtgtaatccattgctttacaaatttcatgctcagctgttggtaagatgccttatttgtatatgaggttgctcaaaggtgatttctttttttttaacagtgtgagatgatgttcatgcttttgtatttcacttttatatctagaaaattcacccaaacaagaagctggaattagtgagggtcaaggaacagcaggggaagaagaggagaagaaaaaacagaagagaggtaagacctaaattcacatcttgatttgtacagtcataccgtcactgcgatagaaaatgtaagtaattaaaatggttcccaaagctaggcacaatggtgggcgcctatagtcacagcttcttagggggctgaggcaggaggatcacttaagcccaggagttcaaggctgtagtatgcaatgatcgttcctccacatagccactgcactctatcctgggcaacatagtgagacctcatcccttacaaaaagggggaggttcccaacattaataccatgtacctgttattgtaattccccatgtatatcatacaaaggggcacatactaataggatcatggttggatgtggtatgatttgggctgtgtcagtaaattggacctaggaaaacatgcttatttgccctgtttgtatgtaaaaaacagctaaaattcctgtgtcttctatttaagtagagtgaggacatttatataaaaaa

SEQ ID NO: 72049 - DNA, 1026 bp, Homo sapiens
cttatgcctctccagcctttttccctttacctggacctttccttattcttcacaactccacctagatattacttcctctaggaaactttctgtgtcctctggaagcagactaagttgtttctctgcaaagctatcataaagccttattcatgattcctattattgtatgtatcaggttgctgtaacttctttttttactcccttcactagactgagtctctggagggcaggggctatgttctgttcacttttgtatcctcggctcttagcccagtgctaggcacatagtaggtacttaataaatgtttattgaatgaatacttggatgtgtttagtaatttttgtattagagaaaaagaaacttaaaccttttgagaattaataaatttaaagacagtattctcttatgtcaaaaacaactaaagctaagctctttcttaataaataaaggtggaaggggtcaaataaaacaaaaaaagaagaccgtaccacaaaaggttactatagccaaaattcccagagcaaagaagaaatatgtgacaagagtatgtggccttgcaacttttggtgagttcaggcttaagtatatttaaaatgtgtgaactattttctctctctgtctccctctatctctctgtctctctctctctcacataccatgaaaacttcacaggtctgttttttgctaagaagataaattttgcatttctaactatagcttcaaaatcaaattttagagaaatgtcaaaatcttttgtagaggggactttttactttctggaattcctgcttgggcacattttatgtgggatgaggacggctgggtaggattctctttgaaaccagccaatgctgctcctctgtcctctgcaggcatggtggcaaaaggttgcaaaatggctcatcccctctgggaatgacaggagaggttgaggaaggtggcagaacatccttctttagagccccttagttcctggaagccttgaatgagtagtgaaactgggtgaaaatgtaaactatgatgcc

SEQ ID NO: 72050 - DNA, 1076 bp, Homo sapiens
atgtattgagcctttatttgaccttgaaagtgtaaattgcattgttaagatctctgtggtagtttgtattgttctgaaaggaatataaaacccattaacaatctgttttatgattttaaaatgcagattaaatttcaaaatggaaaaacatctttgcacaattccaattacagttcttgctctttctttttttaaaaaaatagaaattgatcttaaagaagcacaaagattttttgctcaaaaattctcctgtggtgcctcagtaacaggggaggatgaaattatcattcagggagattttacagatgacataattgatgtcattcaggaaaaatggccagaggtgagtgcatggaacacatacatcgctagagataagtttttaaagcaaattgcttccattttttcttaattgcaaccacaactcatgagatataattatttgtgttttataggtagatgatgacagcatcgaagatcttggagaagtaaagaagtgaatttgaaaatttgtctgtatttaatggcctgaactgagagttgatatggccaaagggagagaggccttttaaaatatatatatatatacacatatatatgtatatatacacatatatgtatgtatacacatatacacatgtatatatacatgtgtgtatgtatacatgtatatatatatacatacacatatatgtatacatatatacacatatatgtatacatatatacacatatgtatacatatatatatattctacagtaaaactgtagactgtcctcgtccttggcattttcactgttctgtacaaggctgcttgtttttttattgccaaagtcaaataaacgggagactgtcatgctcatgcatgaatagaatttagtcaaataaaaaattttggtcatttggtactgactttctctctctctctctctctcttttttttttttgacagagtctcgcactgttgcctgggctggaatgcagtggtgcgatctcggctcactgcaacctccgcctcccgggttcaagtgattctcctgcctcagcctcccaagtaggtgggattacaggcgcc

SEQ ID NO: 72051 - DNA, 1023 bp, Homo sapiens
tgtggggagcatttttgttgataattttactgatctaaagctgagtgattttttaaaagaatttgaatttggcttcctcaccagtaatatgtctccttgcttctttgatgtgatagttttgagatgggtgagaatctaatagatctgtggttgaatttgctgtgttgttatgaagtccaccctgtgggcacaataacataactgttggtaggagttgtttgagctattctggagattatttggtaaagtatactaaaagccttaaaaccatgtatgtgcgctgtttgaacccgtaagccacttctttgacattagaagacattagaagaaataatcagccttgcataaaacttatggatgaaagtattcatcacaatattatttataataaaaaattgcaaatgttataaatgaacaattgggaaatggttaaagaagtgatggtgcattgtgtggtagaatattatgcatatgtttaaagaatcatattttctaagattatttggaagcatgtttggtaatgtcaagtggagtaccccagatacattttagacatttatcgtcatcatctgctctgagtggaaggccgttcagagaggctagaggttcttattctggctataaattatgtgagtaaaattgtgctaaccagttaaaagtactgtacacccatgctcaatatatagtcctggaaatagcaattgaaacatgtcttctcacaagagaaaatgacagttttaatgatgtatttgatgaatttaaactttaagtcaggtgctgcaaattggaaagaagacttgtggtgttttaagttgctgtggacacttttaagaaacttagaacccatggaacccttgtttatcgccatgcaaattacaatcttgaatgagtgttttttaaaaataaagtattagaaaaatgtgtagtaaagatgtaaaattaaaaaatggaattctccattaactgtggattttactaaatagaattactggtgaagcagatttatccatcgagactatctgg

SEQ ID NO: 72052 - DNA, 1964 bp, Homo sapiens
aaatgaaataagggcgcgggtgtgcgttttgtacttgtgtttgtgccggggacccacgatgcagacgttgctgcgtttctggtttcctgttgctttttattttacaaactcttgaagtgctctcaggcttgggggatgggcggtggaggggggcatacttgtttatttgccaaaataagtcaaccaagactgaaatggctgaaaaattttactctagagataaaggaagccagaggacccctcccactcctgtctaaagcaggttggtgacatttgcgtttgtggcggctatttgcaagttccgtcccacttgtccttgcagagagctatgacttctgcggttgccttcacatctagttagcacacgcactctacaacagctttcgttttgaaatgagagagaacgcagggagaccttctaacctttgtgcttgggattgacccagaaagcgataataaatcctgaggatatcaaggctttagaaatgcgaagtgctggaacccaggtggctgcaaattaccaatttagccttgtgatcttcatcaccatcaactggttcagcccggatagcccgtcattttaaaaaaatttaaagtcaccaatacataattaattgtgccaagaacttgtagatcatagggagaaaacctgaattggcagacatatctggatgttgtcagaaactttgtttattcactgagttttttctcgtgcctttgaggacgtataaagaggtctgattgctacatggaggagatgggatgtgaaggaccaacttcattgatcttactcttaaatgataagaagtcaagggcaaccttcctgagtgtcaaagagagaatctctgatacaggaccacacattttagtggttggtttgatacacaagaaggtggattttttttttttttttttaaagacagagtctctctcgttgcccaggctggagtgcaatggcatgatctcagctcgctgcaacctccgcctcccgggttcaagtgattctcctgcctcagcctcccaagtggctgggactacaagcgtgcgccaccacacctggctaatttttgtgtttgcagtagagaaggtgtttcaccatgttggacaggctggtctcgaactcctgacctcaggcgatccacccgcctcacctcggcctcccgagatgttgggattacaggcacctctccgaaggtggattgttttgttttgttttgctctggttttttctcagaggctaagagggccactaacaatgaataactttgtaatgggtgaatgtcacaggtcttacctattctagggccccattttctggaaagttggagtttgagttcattgtctgggtttgctcgtcttcacagtgacttattgaggaatgtaagaatgaggttttgtacgtggttaatatttaattagatcgttcccagaaataatcaggtgagccgccagccaggtcccgtggtggaaaaggacctggagagctgaggttgttacttccatgtctccttcgggacagaaaatagcacatgcagtccagggacctggcttcctttgtaatacgctgcttgtcttgcattgaccacagcactgtgtgctgtggcaggagcactaggctggcttagaatttaaatattcactagcctgccagcctcgctttcctcccctgggctcctgggtcaggaggaagataattgctttcctgtgagcttttttgacaggacacaccctgtttgcaaatatctgtggggttagcgctcaggagtgtgaagagaggcgatcatgtgcctgctgggagctggtgcctgtgattgttgcatggtgtgtgtgtataatcccaggggaatgtccagaaaaccagtgtatgcttttcttccctatgactttagtccctttggttaaaaaaaaaaaaaatccttttcaaaatggaggtgacaaacttttattgtcttgttgctgttttc

SEQ ID NO: 72053 - DNA, 1016 bp, Homo sapiens
ctgaactgtgaaggccatgcagcccagggccgcctgggaggggcctgaggggctccatctccatctctggtccatgtctggcccacatctttttgttatttatgaccttggacaggtggttaacctgcagcctcaatgtcctcccttgcccacctgctccgaggttccttgtgaacattaatgaggcaacactggaacaatgctgtctgctcgggggcccagtacaaggctgagctcaataaaattgaatttattaataggttattgagacctgtctgctggccttatggcatagagtatgttcttacacacttggcgatgccagctatcctgagtgtatctgcagagcctcacctgccccctgggcccctgggtgcccctgagctttgtccccactctctgtccttaaaggtcaggcccctcctgctgccagcactgggcaggataagagcaggctcagagagttgtgagcaggtggcccctggggcgtgggtgtggactccgaggatttttcgagacccgaaaagctgcagggtctgtggaaccaggcaggagctgacctcactctgcttctgcccctctctgctgtctctgcggaccctccaactcccttctgcaaggtgtctcacggcgctgtggaactctctattattgttttgttttgtttgagatggagtttagctctgttgcccaggctggagtgcagtggcatgatcttggtcactgcagcctcccaggttcaagcgattctctgcctcagcttcctgagtaactgggattacaggcacacaccaccatgcccggctaatttttgtatttttagtgggagtttcgccatgttggccaggctggtctcaaactcctgacctcaagtgatccacctgcctcggtctcccaaagtgctgggattacaggcatgagccaccacacctggcctattatttttactttttagaggcaggttctcactctgttacccaggctgcagtgcagtggtgctatcatggctcactgca

SEQ ID NO: 72054 - DNA, 1064 bp, Homo sapiens
tggttcagtggccgctgggtgggggggagccctggttcggtggccgccaggtgtgggggggccctggttcagtggccgctgggtgggggttctctccacagcatccccagtttcccgcgggcctggaggtgacagatgaggtactggagaaggcagctgggaccgatgtcaacaacatgtgagtcactctgcatggctacatagccagttcccctcggcttccccattccttcctaccgcgtctcacgcccaggcgtccgcatggggcagtggggttgaatgagtccgtggctttgttggttgatgctcacgctcccagggacagagggtgaagttaaaagggtggggtgtacttgaaggactgtcgtcctggcagaggcacgctgtctcaccagagccatggtgtcggcggtgcccccgtccccactggagggggcgtctcaggacgagtgggtgggtccacccaccctttttcatttcttcccccacttctcttgcgtagcttccagctcactgtggagatgtttgattacatggattgtgagctgaagctttctgaatcaggtgagccgtaaagaggggatgcgggggtctgagtgtattgctaagtccccagagatgggacgagaagaaaaaagaagacatgagtgatcagaccaactgatcactatgaaatgaccctggccagccgcagtggctcacatctgtaatcccagcattttgggaggccgaggcaggcagattgcttgaggtcaggggttcaagaccagcctggccaacatggtgaaaccctgtctctactaaaaaaatataaaaattagccaggcgtggtggcgcacgcctgtattcccagctacttgggaggctgaggcaggagaatcacttgaacctgggcggcggagatcatgccgctacactccagcctgggcaacagagtgagtctccgtcttaaaaaaaaaaaaaagaaaaagaaatgcccctgcccctcctggggtccctgcacctccagggataggtaatggggcctcctggcccctccaaagcatggcaggccccagcgggta

SEQ ID NO: 72055 - DNA, 1010 bp, Homo sapiens
gatgggccctgggggcaagcgaggtttcagggtcacttggggtgtgcagagccaagctgtgaccctagtgccgtgttacttggcagaagccctgcctgttcccacatctgtaaagttaggcatttggggtgctccatcgtgagcctccttcctgctctaacattcagcgtgggtttgaggcccgtgggcatggagctatccgtcacccttgtcagtcgggcacctcgtcctgggctcccaggtggaggtctctggaagcccttgctgagctgggctgggagctcctttgccctgaccttgttgttgccgttgacctccttcatgggagcatctggtcttgacctggggcagccaccagcacatgaggctcccgtcttggaggcagggggcacactggtgtgtgggagctggcttagggccctgcttcacagttggaccaccttggacaggttgcccagctcccaagggctcacgttcttcctcctgccccttttgcacagttttccgacagctcaacacggccatcgccgtatcccagatgtcctcaggccagtgccgcctggcccccctcatccaggtcatccaggactgcagccacctctaccactacacggtcaagctcctgttcaagctacactcttgtgagtggcccagggcaacccctggcccggaaggctgtgtttatatggcttagacattcactgtcaaaaaggaaaatcgaaaaattagaggtttattcatttaaaaatggcagtaataaacccactgcccattaatagaaataacatatattttatgaaaaaaaaaaaaaaaaaacccactactttaccaagcaaaaaacttagtgagtggcttggttttcatttttacgactaaatgcctggctcggccaagacggaggccccagctgctcccaggaatctcccgccaggcaccctgggggtgcaagcgcaaaaaggcaaaaggtgtctggggtgttaggagagttttgatctaaccaaccccttgaa

SEQ ID NO: 72056 - DNA, 2232 bp, Homo sapiens
gagtttgtagcatacggaggaacaaggcagggcaggtgagcccctgagcagtgtgcagagaagtcctgttacacttgtgccaccctccaggtctccctgcggacaccctgcaaggccacagggaccggttccacgagcagtttcacaggtactgcctgggacagggacaggattgaggccggtgggggagaggctccgtggccccttcctgaacccgaacttcccaccatctctgcagcctcaggaacttcttccgcagagcctccgacatgctgtacttcaagcggctcatccagatcccccggctgcccgaggtaccacccccaagagggccccgaggccctttgaggaccccaggcacctggctgggccccacacaggctatggagatggcggaaggagggcttgcttaggggacagctgagcaggtcccacctgccgcccctgcagggaccccctaacttcctgcgggcctcagccctggctgagcacatcaagccggtggtggtgatccccgaggaggccccggaagatgaggagccggagaatctcattgagatcagcacagggccccccgcgggggagccagtggtgagccccctgcccagcccgtgtcccccagtcctccagctgcagcatgaggccaacgggagtgtcgggtggccagccctccctttgcccactgcccggcctggagggcacaggtgagtggggtcaccatgctttgctgtggcaggtggtggctgacctcttcgatcagacgtttggaccccccaatgggtctgtgaaggacgacaggtgagggctggaggagccgactgggctgggggtggttggaaacgggctcagctgagctgtgctctggacagttctgtctggaaaggccataggtggggaacatgaacccgtgaggtgcccaaatcctgagtggccactgaggaggagacaggttcctgtgctgggtctgttgactgttctggttgacttaacttgaaccccaggacctctgtccccagggacctccagattgagagcttgaagagagaggtggaaatgctccgctctgaactggagaagatcaagctggaggtgcggggtggggatgggtgggggccagggcccctcacggcccaggcagggccccacgtcacacctcctcccgcaggcccagcggtacatcgcgcagctgaagagccaggtgaatgcactggagggtgagctggaggagcagcggaagcagaagcagaaggccctggtggataatgagcagctccgccacgagctggcccagctgagggctgcccagctggagggcgagcggagccagggcctgcgtgaggaggctgagagtacgtggggccttggccacaggggtccaagggtgtgtccccagcccctgccaccccacacggggcatcactgcccctcctctcgcccccagggaaggccagtgccacggaggcgcgctacaacaagctgaaggaaaagcacagtgagctcgtccatgtgcacgcggagctgctcagaaaggtaggtgcagcccatcctccatcccagccggtggcagggcctctcggggatggcagcagagcatgagcccttcccctgcccatgcagaacgcggacacagccaagcagctgacggtgacgcagcaaagccaggaggaggtggcgcgggtgaaggagcagctggccttccaggtggagcaggtgaagcgggagtcggagttgaaggtatgtcccttgtggcacagggccctgccccggcatccccagcccactgccccagtgacacgctgtcctgtcccagctagaggagaagagcgaccagctggagaagctcaagagggagctggaggccaaggccggagagctggcccgcgcgcaggaggccctgagccacacagagcaggtgcatctggctttgatgactggaggtggggttctggggccagtcctgggtggaagtcaggtcctctttcccgtgaacaggccccacctgggtgccactcggtgatcctgggatgcagccctgacccagacccaggggctacatgggagacaggacctaccgctggtcctcagggagccctgagtctaatggaagtgatcactaacccccagggcccagtttataagcgtgggggcagggtgggtggggcctgggagctctgttcacatgcctggtgtccatgtctgtccacagagcaagtcggagctgagctcacggct

SEQ ID NO: 72057 - DNA, 1050 bp, Homo sapiens
cctgctccttcccaggaacccacccctgccctgtggacaaataggcttttgcctctggggcctgggccaccatatgtctgcaggtggcagagcactgaagggcccggggccacacacactgtggtgtggttcccactgcctcctggacgttgtcttgccgagccctcctttcctcttcctcctcctcctgggatagctggccaccgacggtggtcccagtgctagtgtctcagtgtcatcctcccccaaccttggccccacccacccgcacagacgcctccgccctggtggcagctctgacccgcttctcccacctggctgcggataccatcatcaatggcggtgccacctcgcacctggctcccaccgaccctgccgaccgtaagtgggtcctgggatggcaggttctgtccacctcactggcttgtctcccctgggggtccttatggagcctgtcggtggggggggctccactcacggtcctttctcaccccaggcctcatagacacctgcagggagtgcggggcccgggctctggagctcatggggcagctgcaggaccagcaggctctgcggcacatgcaggccagcctggtgcggacacccctgcagggcatccttcagctgggccaggtgaggcacagctgagtgtgggtttgggaggcttgggcctgcctctgacctctgcacccacctctgggttggctgaacaggtgtttgtgcgtggagcctgcagcctcaggacacagggtggggaccatgcaccctcctcgatccctgtggtccccaacctctttcccaggctgcccgtgggacggggggggacggaggctacccctgtctgactcccatcctcaccaggaactgaaacccaagagcctagatgtgcggcaggaggagctgggggccgtggtcgacaaggagatggcggccacatccgcagccattgaagatgctgtgcggaggattgaggtgagcacgggatctggggactcccctcattcctgtggagctttgggggccggaggccccaactgggctgggtacagg

SEQ ID NO: 72058 - DNA, 1842 bp, Homo sapiens
agccgtccgtggggtcagagaccctggccctgactggcccttgacccgcagggaggcagctgacaaggtggtgcttcacacgggcaagtatgaggagctcatcgtctgctcccacgagatcgcagccagcacggcccagctggtggcggcctccaaggtgagcttgcacgccgacagcagcacactgggctctgggcccagcttggcctgggctgtggctgccaagcccaggcctgctgctgccctgagctgggagacctgggcccaccctgacctctcgcccctcaggtgaaggccaacaagcacagcccccacctgagccgcctgcaggaatgttctcgcacagtcaatgagagggctgccaatgtggtggcctccaccaagtcaggccaggagcagattgaggacagaggtgagtgccagatgccaacgggggctgctggctcccgaggctgaatgggggtgggtgcccagatgttcacccccttgtcctccggccacagacaccatggatttctccggcctgtccctcatcaagctgaagaagcaggagatggagacccaggtaggcgcccatggctgccccgtgacctctgagctcatccctcgggcgaagcctggacccaggagagagctccctggggaggctgggctgggctgagcaggccgtgtggctacaggtgcgtgtcctggagctggagaagacgctggaggctgaacgcatgcggctgggggagttgcggaagcaacactacgtgctggctggggcatcaggcagccctggagaggaggtggccatccggcccagcactgccccccgaagtgtaaccaccaagaaaccacccctggcccagaagcccagcgtggcccccagacaggaccaccaggtgccgtctgcactgggatgggggagttcctggacgggggtgctgtccccagccctagaggggcacatggtgcacgtccctggggaagtcagggaccactgacaacatgcagggaggagcttgctcaagggagaggtggggccccaggtgcctggctgtgaccactgaccccccacctttaacccctgcagcttgacaaaaaggatggcatctacccagctcaactcgtgaactactaggccccccaggggtccagcagggtggctggtgacaggcctgggcctctgcaactgccctgacaggaccgagaggccttgcccctccacctggtgcccaagcctcccgccccaccgtctggatcaatgtcctcaaggcccctggcccttactgagcctgcagggtcctgggccatgtgggtggtgcttctggatgtgagtctcttatttatctgcagaaggaactttggggtgcagccaggacccggtaggcctgagcctcaactcttcagaaaatagtgtttttaatattcctcttcagaaaatagtgtttttaatattccgagctagagctcttcttcctacgtttgtagtcagcacactgggaaaccgggccagcgtggggctccctgccttctggactcctgaaggtcgtggatggatggaaggcacacagcccgtgccggctgatgggacgagggtcaggcatcctgtctgtggccttctggggcaccgattctaccaggccctccagctgcgtggtctccgcagaccaggctctgtgtgggctagaggaatgtcgcccattactcctcaggcctggccctcgggcctccgtgatgggagccccccaggaggggtcagatgctggaaggggccgctttctggggagtgaggtgagacatagcggcccgggcgctgccttcactcctggagtgagtttccatttccagctggaa

SEQ ID NO: 72059 - DNA, 1126 bp, Homo sapiens
cctaaaggggcagagactcccacaggccctggccccgctgccccccaggctgcccgaactggcacctaccgccccccttccctaccctgccccagaggccagtgggcctcctgccgttgcacctcggcgcatcccccccccaccacccccggtgcctgcgggacgcttagccaccccgtttactgcggccatgagttcgggacaggccgtgccgtacccaggattacagtgcccgcccctgcccccccgcgtgggcctccccactcagcaaggattctcttcgcagttcgtgtccccatatccgccacctctccctcagagacccccgccccggctccctccacaccagccgggtttcatcctccagtgagcgccggcgcggtccttcccgggagacttcttccacctggcgtgttgtgctctgctcacgggaaggaggctggaggtccgctctgtgccaagggctctggggccctgggccagcgtgtctgtctgattttagaactgtaggtcagtggtgagtagtaggagcccaggctttgggcatcaaggcagttgtgtgtgccgggttacagcctgacacctgtgcgttgcatcggtttgcattatccgtgtgatttctaagtatcttagcgttgatgaactcatgtttgggaagaaataggcctctcccccagtcccatttagaatcgtggtccttctgttgcagctttatttaatgagcatggttcatgatacttattttattttcgaaagacagtcctatgtgtctcacccaccggccactgcagccctggtgagggcgggtgggcgccggccggcctggaagagcgccgtggctgggccaccacctgtggctgcgttgttgctcactgaatctgttggggagaggtcaccatagtcaccgcctgacctggctgctgctcttgcttcagagccacaagcaaagtttgcactgggcccactgccgagtccagaggccggagaacggccactggtgtgggaggggagcgcacgagtgggactttgcacagcaaattgtgtccccagctcctcctctcccgcctgcctggagccggccctgaaggtttctatgaagaaataatcccccaatatttttactacg

SEQ ID NO: 72060 - DNA, 1056 bp, Homo sapiens
tctcgagcccgctggagtccaacacctccttgcttccacccggctgcaccctgactgacagactcgccctgggtgggtaagcaagacagaaacacctgtgcccccagggcttcagagttcatcgagcccagccctatcttggcaagaccctgccggccccagcctgcaacaactgcacaacattcgaccttgactcatttccttatcgcctggcgaggctcaaggctctaatgcgcagctggacgtgtcccagaagctctgtagcctcctcccagctggcccttgaacgacggcacgtggtaatccgccactggccccaggggccggcgttcacagggtggcacgcatgccctctcttggccctcgctcggacctgccctcactcaccccgctgctccctggacccctgcctggcactttccccagcacacaggccaggctgcctgctggtatacagcccgtacacctgggaggcaccactcctggccgtggcggtgtggcactcacggtccctggaggcagcgggcccacggactgcccaaagcgccccaaggattccaccaaggctggtgggctttacctcagtgtcttcctcaatcttggccccttctgcctgaagaagtgctaacagggtctccaaggaagcactgctagactgtctgtctggaaaaaaagcaagaggtatgacaaaagtgagaggtgtccaggtaaagcccttcatgatgccaaccacggcaggattgcaccttcctttccaggaagctgaatgtgaaaggcttgaaaacctacaggggaacaagtgcaccaagccagtgcccaggggccaacatcccatgtcagagcaacctgtgtcaccagctgcttctagaaccagctgttttcaaatatggggcagtgacattctcatcatgccactttgtatttcctttatgttttgagtggtaacttacatcgagtatacacatctcaagtgtgtaagtcaaatttccacgtgtttaaccgccaaccaccaccccccagatccagacacagaacctttccaccgggcgccctcac

SEQ ID NO: 72061 - DNA, 1131 bp, Homo sapiens
aagtttttttcctttgttgttcccttttgggatgattttttagagtttttgtagagtttttgtttgattttaacctaaagttatactctgggtattttcttattttttaaatcagaatattcttacatgacatgatttttaacagctatgtgatctttcatgtggatatgtcatttatataaccattcctttattggatatttaggcacttttttgctgtcataaattataatgcagttaacatctttgaaatctgtttaaaacaaatacgttaaagtgatcaacatttaactttttttttttttagtaagtcttaagtgtctaggcagtttttaggtaaaatatctgatcccctacatgaaatatgattatatagttttttaattacgaaatttcagtggagtaatctcaacagattctcttttgactaatcccttttttccctaaccacagactgaaaaaaaaaattccattattagaatagcattttctcatttaaacggaatagaagatgagtaattggagtcacgtgagagttaaattttatctgttgaaccaaattccgggtcaggtgttggaaagttcatgtcatgatgtattttaaatgtaaaaacaaaattgtcaaaagatacagtcttaataaacataaatccagggtccacctggataggcactttcttatttgcacctgtgtaaagactggtccgaagaattcttagacatgaatttccagaaattgtaaaaaggaaatagagatgagggggaaaaaacaaacaataaaacccgaagctcttcctaaacaaatgaatgctttggttgttggtcctggccagaaactattaataagaaaatcagaattttaggaattctgtcttccgtaagctggttttttttttgagatgggaggggagtagaagctattaactgacacccctcatggtcaggtggtcatgactaggtatctggacatttctgctcctacactggaatctcatacttacacaggatcaaatgtgttcactcccagatctgttcattctggttttattacaatagttctatgatttcattaaatcctggggcaactggatttttgcatgagtgcaaagagaaagttatttctacaaaaac

SEQ ID NO: 72062 - DNA, 1037 bp, Homo sapiens
ttagccaggtaatgagggagaagggctcccaggcatatgggaggaacaaaggcacttagggaagaagccgggacagagtgtgtgtgcatacaggaatattataagtattgctggagggaccagggcagggtgtagtgggggctgaggcccaaaaggcagtcagggaccagatggcctcatatgccctgttaaggagcttgggcttgatcctctaggcagggagccgttggaggatttaagccagggagtgctgcggttggtcacactcgccatttatgtagatcgttttggcagccaggggaaggatggatttgagggggatgagattagaaagctgggatatgagttaggaggctgaaagatggttgataaaaatgatcgttgggcagccgagataactgacttcaaggacatatactggacttatagcagagcctgttgagtcttgcttttgcacacagttcaaataatcacttagtcatgtggtttatctgccagtggcaaatgttaagactgtggggaaaaactagaagaaccaataacatcatcaagaaataagtgataggaggcaaaagtcataaaagccgtacaaaaattggaaagttgactgttgaagcatcgtggttaagacaggatttgggttgctaggaaactttggggcaagtatttaaccttcctaagtgtcagtttcctcctctttaaaatgggagttagtaataccatccttattgagttattctgaggattaaataagatgatgcgtataaactattttacaccatgcctggcaagaaaacccagtaagtggaagctgttactgtgaatacattttgtggccttttgattagggtagtgttttccttagatctctaattttgtggatgttaattgtattataattacattaaaaagagttccatggtaaatcaatttgggaattaaagaggggtttgtttttttgagacagggtctctgtcgcccaggctagagcatggtggtgtgaccatagttcactgcagcctccatcaaacgagcct

SEQ ID NO: 72063 - DNA, 1078 bp, Homo sapiens
ctcctgacctcaggtgatccgtccgcctcggcctcccaaagtgctgggattacaggcgtgagccaccgcgcccggcctgaaactgctctttagggaggttaatctgtcagcaaagcgtgggctggcttggcgtggcaggaccaggttggcggcggaagtggaggttaggaagaaattaggatttgagctagggctctgggagaggtattcggaccagctggcccgactccctttctcacttcccctctcctgctgacctgaagtgctttccccacctctgtcacaggcacgtggtctcttagcttctttgtatacctctcctgtggcacttgacacacattttgtaagtcacttccctgtgtcccccactggcttgggggctgcattttgtcatgtttgtctttttgtccttggcacccagcacagtgcctggcacccaggatgtgcctgggtagtgctgctgagtgagtggtgataaccgggcttcaagtggaagtgagtaggagacagggctctggtgagcggggaggggaggggcagtgggggtgcaggagggagggagtcattgaggccggattaggcagagcatgagggatgggcagggctttgtcccgcaggcagttggagtgtggttctggagctcagggtgaatgctctgcttggagacagaaattcaagccactctcctccaagtgcttgtggaaatcaaggagaatataaaagtttgaaaggccactaggagctattagtgggttgggagaaggaaagagctgccatcgaagggaggggagaaacgagagaaacaagttggatgacctaacatcctgttagagactggctggaagaggaacccagaagtagactgcactgtttgaccctcaccggtcggtcgtatgcagagtggttgtgttcttgagctgaggaatgccggccttgttgcctgtttggctttgattacagtatttgtagcagaatgttgctatggagattcatgccaggtacgcagtgggaggtgatctagaagaccgtgtgccagccactcgtaggtaatcactggcgctcagaacatgctgagaca

SEQ ID NO: 72064 - DNA, 1031 bp, Homo sapiens
aattcatctggcaggattttttttttttttttttttttttgagtaaaagtgaccttcatacctgaatacccaagagaagtattgaggcctgagcgactccacttgataagcctgcatagttcacattaaattactcagcagtagtttgcttttctgggtgtagtgcttttaaaacaaggaaacaacttgaaaaccaaaataccttagctcacctagcgaggatcactgtcaatcctgtcgtcctggtcatgtgtggtgtgcctttctcggaatgggtgtaatgtgaaccgaaatttttggtcatggtagtttcactcatctggtaatgctatgcattggcttatgttgggggtaattgtgagacacaatagaagaaaatattttatgaactgttgaccaaatggaacatttgtgatggcgtgttaaagaacattctggttttggaatcacacactccagactggacttggccgcttcccagctgtgtgattgcaggcaagtcacttcacctgcctgagtatctgttggaaaaggataatatgacagtaatacctatttcatagagtgaggatcaggtgagatgatgcctattagtacttaacacagcccatcagtagggctcaataaaaagtaattgcaataattaatcacttatattaatagttctctttttgaaagatgactgacaatcattaataccagatcatcctgaaagttactaggatcccatttcaagaatgttgagtaaattatgatttgcaattagcctaaaaaacatttaccttttcctttttttttttttttgagaaaggatcttgctctgttgcccagctggagtgcagtagtacaatctcagcgcactgcaacctctgcctcctgggttcaagtgattctcgtgccttagcctcctgcgtagcagggctcacaggtgtgcgccatcacacccagctaatttttgtatttttagtagagacggagtttcagcatgttggccaggctggttttgaactcctaacctcaggtgatctgcc

SEQ ID NO: 72065 - DNA, 1039 bp, Homo sapiens
agtcccctggggctctcccagcggccctcagccatagatggcaaggtgggcagcctgcccccccatgggaagtctcttctgtatccaggtctgctttccacctcccttcagattccttttggcacattctcctcttgaggaagtaccagtctttctgaaactaagagagggagggcagcgtcctttaaaaataccaaaaatgtttacagagttgggtgctgagctgcagggctcaggcctgaccagtcataaccaaagggtgaggcaggccttgctgactgccaccccccaggcctgttagaatagaagccttagtcccactcccaccacacccccacgccccaccacctgccttctctttgatttctaaagagggattcagcagagaccccccacccctccctggctcggtctgagtcccactgcccaccccatcacagccttcacgtctcagcccctcccgtctggtctgtccgtgtgccgtctgtttctctgggccatgtgtgagcagtgtccccatctccccatccgtccctgctgtccccgcatcattgggcctgagtgtgctctgtatacaacgtcatgtctgttacaccaattaaagaagcgggaaggcttccttctggatctctttactgcagtggcgaccgtggggcatggtgggatgggggcatggaacagtaatgctagtgacactcacagtgacgccaacacgtgagtgcggggctgactctaggcctagcctgcttctagctccttcctgggatggaactcagtttgccctcacagacctcagtgaaacgggtgctgtgagcctccctgcctcagagtggaagacacagctgggcagtgagagccagacctgccacacaggccacccagccccagcacctggctctgcactgctgcgatctgtggaatgaacatggcaggggaagccgactctctccatgcctgagtgcatggcatttcagagccagctctctgggtttggggttcagctggcatgaggtctggtccaggcaggctgacctgaaga

SEQ ID NO: 72066 - DNA, 1067 bp, Homo sapiens
tggggagaaggtaaggacacggcgggtaggggtaacatggagggactttggggagctccctgctgccctctggccggggtgcagggggtggagaggccagacacagccagcccgtgaccagcctgctgggcccaggtggatgtgcacatcatgacccagccgccctcaggcgagtggctctacctggatacgctggtgaccaacaacagtgggcgtgtctcctacaccatccctgagtcgcaccgcctgggcgtgggtgtctaccctatcaagatggtggtcaggtatatgcctgcactgggagggcgggataggcagggcgaggctctgggtggttctgatgagcacccccaccacctgccaggggagaccacacgtttgccgacagctacatcaccgtgctgcccaagggcacagagttcgtggtcttcagcatcgacggttcctttgccgctagcgtgtccatcatgggcagcgaccccaaggtgcgggccggggccgtggacgtggtgcggtgagtggcccagaggggcacaaaggggctgtagcaaggtgggtgggctcaggggctcccaccagccaggtggaggaggacagcggagcctctgtgggggacgcctggctcgggcactgggccttaaggacctcagttcagagcccagcacccccaattattagccgtgtcaccttgggcaagcgatgtcacttctcaatgtcggctttcaattcccgcatctggaaggtgaggctggtaagccagggacacagcagcaggggcatctgccgcccagtgcgggcacccaagggcctgctgcagcacgtcattgtcaaccattgtcgtcgttactgtctgagctcaatcagagatgtgctttccaatggcccaagtgggccctggctgggcaggagacagggaggcccaggagggaggaaggggtgaccatgagacgacacctcacccccaggcactggcaggacctgggctacctcatcatctacgtgacgggccggcccgacatgcagaagcagcgggtggtggcgtggctggcccagcacaacttccccca

SEQ ID NO: 72067 - DNA, 1036 bp, Homo sapiens
ctatgctgagtgcaagaagccagacacaagaccacatggtgtatggttccatttataggaaatgtccataatagacaaatctgtagagacagaaaattgattggtggtggccaggggccaaggaaggcaagactgaggacccactgctcccgggtatgaggctcccatttagggaggtgagatgttctggaattagatagtggtgatggttgcagggcactgtgaatatactaaatgccactttataaatggtgacttttcttatgtgaatgttaccactattttttgtaatggtcaggaagatgcccaaggtgtggggctgtgtggccgtcctgttgaggaacggtcagagcagagccgtacacaggggcgtccccacctcgggaagccaggcttccccagcgttcccagtcccacctgagtttccctctctcctctccagaggacctgtccgacacagaggaaatgttccccaaggacatcaccaagtggagctccaatgacctcatggacaagatcgagagcccagagccggaagacacacaaggtcagcaggtctgggggtgctgcagagcctggggagggcggttgcagggcttcagccccctcctttctgaccagcttctgcacagtgctgggcatacatgtgagttggggacccccaagctcccctcgtcacagttgcagcctctgtccggtcggccaggttgggctgcccctcagctcacagcacggcttctgtgtctttgcagatggtctgtaccgccagggtgcccctgagttcagggtggcctccagtgtggagcagctgaacatcatagaggtgggtgcccgggtgtcagagggacaggggcatggccgccaagggaggggcagggtgcagaggaatagtctgaggggttacagaggtggaactctgggcctggcagcctcacctccacgcctgcctgggtactgtctggggagaggcctgggcctccttttttgctgccctgctaggaaggcgcctgtcgccctctgtctctgaggtccccga

SEQ ID NO: 72068 - DNA, 1020 bp, Homo sapiens
ttcccgccacagcatctcagagtggaggatgcagagtattgccagggactcggatgagagctcagatgatgagttcttcgatgcgcacggtaggcaggcagcgctctgcagtccttggggccttcctgggcgaggtggggaggggtctgaaagggcttagggtgtgggtgtggactgatgcgggtgttgcctgttactattctatatccagtccctatacctgcactgtcccaggtggacagcctggtgtttggggcagtgcacagaggatgagatgaggtcatcttgttcccttgagtctggggtctcagaacccgatatcaggatgtgctgtgggcctggcagatggggactgcgctcttgaaaccccaaataaggatacaccatcagactagggctttattccgtatgtgaatttatttccatggaagcataacttcttttaattttctaattttttgtacttaccttatttcttcttgattaaattaataccacatctaatgcaggcactttagaaaatgcaataagcagaaaacatgtgaagtgcccattttcccactagtcccaaaataagcgcatgaccatacagcagatgcaccacctgtgccaggaagaggcatgcatacagcgctcgcctgcttggtgccccagccattcctctccaggaagctggaggggccagcaggtgtaggggttgggggcttgggtccctctgcaagccagtggctgagccagcccaaagttcacacagcagctcagaggctcagaaagggatgggggcgagcccataggcactcagcagacacaggcagcaccagatctcatgtcaccactgtggcttggaggggcacaggaaccacataaggtggcattttggttaactggccagctgccctcaagggaaggaacctggggagtcagtgtccaggcagaagaaaggtgcctggtttggccctgggactggaggacctggaatggtggctggggactcccgagctggcctctgcaccaggagcc

SEQ ID NO: 72069 - DNA, 1041 bp, Homo sapiens
cttgaactcctgacctcaggtgatccacccacagtctcccaaagtgctgggattacaggcatgagccaccatgcacagccagtttctttatctgtaacctaagctaggctctcagagagcatagtttcccattttacatatggggaaattgaggtccacagggccagggttggagctcagatctccgggctcctaggtggcctctttgggacccctagtaggccaagggaggctgctgccaatctcagaggtgagggcaccctggcaggcggagaggaccaggaggtgccagtgtctagattggggaggaggcagcattgggagggatctcccctctcaaccccagcctgtgctgtggctcccaggcctgagggcagagcaggtgggcaggaggggagaggttcaggccaccccgacttggagacccaaggcactacctgtgcccttcctgtcaccaagacccctactgtcagcccaatttccatcttgagagctcttgcccctcctgcagggctggtgtgaatgcccctcttccaggcagcttcctctgaccctctgggtcctgagggcactcattcttcccagccccacctgcccgtctgtgcccgctctagcctttttctaacctgcggttcctggggttcttgtcactgtggggtgatggactcaaaagtgtgaacgtacgtcagaatcaccagctgctcctttacatgtgtacagcttattgtatgtcagtcatacctcagtaacattgctaaaaagtaagttaaagtcacctgactttcctgtgcacttcctgtgccaagggctgagttgcagagggggatgaaagtccttcccgttctctgggaagatagatttcacatacgtttcagcacaggctcaagggcacagtctgcactggcctcccaagatggataggccttcaagaagactgctgtgtttttgtggaaagaataataagaagaccttagttcatcatttcccacttctgccacttgccagccagtggcagctaggaataggccttcctctctgcaa

SEQ ID NO: 72070 - DNA, 1068 bp, Homo sapiens
ctgtttgttgatcagagagcttacacatagcctctcacttgtccttttggtagctgttagcaaacaagaaaaataaaggttggaaaggagagaacctgctcaaagttgcaccgttggatcatgcctgatcagaggccacaattccagcctcaggtgtagaccgggcctttcctctgtgctatggtattcaccagcctttgcagaaagtgactgttctgttctgtcctctctgtctcccaggggtccttggtgaattttgtcatggttatttaaggaaccttgcctagaagtcccaacttgcagttccccatcgacgggaaggcttggactccaagatgattataaaggaatatcggattcctctgccaatgaccgtggaggagtaccgcatcgcccagctgtacatgatacaggtgggtcgtggggcaagggtgggtcatggggtgagggtgggtcgcgccagcgcacagacaccacatgtgggttaggtggagttgtggccttcacagtgcagtgcctgccccagaacttcctggtaagtgtgaattgtgctggacccctggcctctaggcacgatgccaggcgcacagagcacaccatgggcgcacggcatcagattgctttccggcactgtgtcccgccgcctacaacgcgaacacttgcccttgcgttcagcaccattatctccctggcccagacgttatccctatgttttcctatgtttcagtttgcctgggctgccatcagtaaataccacaaactgggggcgtagaggaacacacttcctcacagttctgggggccggaagtcccagatcaaggcctggcaagtgcggtttctggtgagggccctcttcctggcttgcacatgggcgccttctccctgtttcctaacatggcagagagtgagcaggctctggtgtcttctctttttctttttctcctctgttttttatttgtgtaaatgtataggatacaactgtaattttgttgcatgcacagattggaaaatggtgcttgtagggtatctatcactcaaataccctgtactcattaagtaatccctcat

SEQ ID NO: 72071 - DNA, 1360 bp, Homo sapiens
aggtgccactctatttcttttcgtcgtgctttcactaacatcttgcaagtgtgtgtgtgtgtgtgtgtgtgtcttcaaactatgatattagtatattggggatgcttttatggagggggcttgtggggagtcaccgttccctctgccctgtttgcttctgctggggaagggagcaagatgtgggtggcttaagagagcctggcaagaagaagaattctcacccagaatctgttgaaaggatctggttttgaagctgaatggaagatcccatagcctgagctaccctcacagtggtccagaaacatgtgaatctgagccaagtctactgatgtgtgattaatttacaaataggcgtgcagagcagaacggtgtgtacacaggagcctgctgttcctacaaagctgcatcaagatgtcactgagttgggttttattttagttccaagtattgtatctgtttagcacccagccagcttggtgccgtgtgcacgctgggcaggctgagctggtggcgtatactgcttccttagacgggagaagcctttgaggtagttccaggccccacgtgctgggcccagagcaactcctcagattcacagaaagagctcatatttcatgggtggtcatttggcagaaagagtctgcacatgatgaaagggtggcacgttgggaacactggactttatgtcgagctgcatctgcccttttctccaaccagctgcagcgtctttctcctgaccagattcacaccacgtcttctgtggactcagaggacagacttcgagacttcagaaccatcatacaaagagaaaacaccttaacttatttggagttttcaaccattttttgaccttggagtaaagtaaaatgtaccttttcttttcttttcttttcttttttttgagactgagttttgctctctcgcccaggctggagtgctgtggtgtgatctcagcccacttcagcctctgctcccggattcaagtgattctcctgcctcagcctcctgaatagctggaactacaagcgtatcccaccatgccgggctaatttttgtatttttagtagagatgggttttcactgtgttgtctaggctgatcttaaactcctgacctcaggtgatcctgtcgccttggcctcccaaagtgctgggattacaggcatgagccaccatacctcagcataaatgtatctttctgcccttcaggaggaaagggtttgctcagcaagtgaataacatgcagaaggtcaaagcaagatgtatcatcctactcttagtcaggacctttctgagtgcaacagaaatccagtttgaactcaggcaaaaaggagacctaattggaatgttcatgttcaccat

SEQ ID NO: 72072 - DNA, 1066 bp, Homo sapiens
atcagcaagggcgactttgcctccacgagtagaatcagagagcccagagcagccgagggggtccagtaggcagccactgtggagagggtgtactagtcagacacgtattttaaggtgtcctggaggagaaaggctgcatgtggctccaaaaagtcaatcaagaccccaggttgagtcccagtggggcaaactgttcagtataggaactttctctaatagcagtaccttgtagcccatcccagggggtggttaagcccctctcacaggatgggcattgcagagaggagtctgtctgtctcccagctctcagtctgtgcttgtctcagaggttcatgcccccacccccaacagctgtggggtgaggtcacggactcactccacaaaggcagtggagatgatggtggcatacatagccagacccctgctcttgctcctggctggctcatgagtttgtgggttgtggggagtacccacaatgctcagtcttcagggcatctacagtgacggcccctcaccctctgcccctgcctgcaccagcccactccgtgtgtttcccagcttggtcttctctacccctcgtcaggccctccccttgctcgatcttgacacttggcctccttcctggccaggctgtctgcctgcatccagccctggctccctgagctcctctcggatacatcactgggcacatggtggagtggccatttcaacacatggcacctgcaagagctttcatctccttcccctggcccatcgcagatgagacacactgacacctcagctgtgaaggtgacatttgtctacacacacgcacacaaacgcatacagggctggatacaacaagggacaaggcttaggcctgctgcagaccttgggtgagtctctgccccacgtctccagcagttaatgaaagacaatcttgctctgggaagcacttcctgcatctgacttctagaagtctctgctgtccaggatgacagagggtgcccctgaatgcaggaagtgctgagtgttgccagtaccagtgcccctgtggctgcctgaccaccatccattccttcccatc

SEQ ID NO: 72073 - DNA, 1042 bp, Homo sapiens
ggacttgaacatgctctgtcactctgcaaatggtaggtgtgtcttgggagaagacaggagagggacaattgccagccttaacttgctgtctactttgtgcctcactttccccaccttgttgccatagtgagaggaattttcctcatcaagtccccatcacctttctctaagcaagactatgctcaggggctggagggcaggggagaatgcaagttagaagaccttgtccctgtcccctgtctaccatcagcctgattataagatcttggagaattcctttgacctctcggagcctcagtttcctggtgtgcacagcagagttagcgatggatgccctcaggagaatgggaaggacaaatggatggtgtgtgcccagcactttgtttcatgccagcgtcctcacttttcctgtcaccctgtgcccttgtaaagcacttcacagctttctaggcgtgggcacaccattatcacagcctgtggctgtgaacaggctttgtcaagcctgtgcagacagagaatggggaatgggtaaatttaaaacactccttccgcctgacttcatttgcctgctgggcctgtgctaattgcatggctgaagtcccctttccaggactctagattcctgagatggaaaggatcgggactgggctgctctaggaccttcctaagctggtagaagagcaaaacttggtagtcatataggctcgggttttgagtcctggctgtgtgacccacagaagctgcttaatcccattgcacctcagtttcctattgtgtggaatgggagtgatggtccccccatgggcgttgtgtgagaattcaagattctgtgcttcttgcctgcctcgtcgcaggagcgtgtgaagcggatgatcgtcttgtggggctctcctccagtgtcagattgctctgtaccagaggctgtcctaggatcagggccaggccaaccgctgcttttcatgctcccaaatgtttggagagccagtgcggtgtcttagccagcagagctttctgtcaggaggtgtgatcatcgagccgtttg

SEQ ID NO: 72074 - DNA, 1050 bp, Homo sapiens
ctttttatgcattgctttacagctcagtgtctcacctgagtgagacaactgtccctgtccacttctggaaagagctgcctctgttccctcttttcctccctggtgctctgttgcatggtctggtgtattacagggattggcatgtttgtgtctgcaggggagcctctgggtgctggctttctgtccagggcttctgagggccgccagcccaaagggaagggattcatcagagactgataagcttagggtgtactgagctgtgaggccatatgtgtgtgtttgtgtgtgtgtgtgggtgggtgggtgtatgtgtaggcatgtgtgtgtctatgtgaggtgtgtgatgtgtttgcatatgcgtgtgtggtgtgctcatgtggggggtgtatatgtgagtgtgtgttgtgtgcatatggacatgtgtgtatttatatgtgcatgtgtggtatgttgtgtgtgtgaggtgtgtgtgcatgtgtgtggcatgtatatgtgcctgtgtgtgcctatggggtatgtgagagtgtgtgcagtgaatgtgagtgtggcatttgtatttgggcatctttaactttgcattctgcttctcccattttctgcttcaattcccagagcagggctcagcaaactccttaacctatgtctgcactgggatcttaaatccacttcacagacactttcccaagtctcatctgatttaacagtttgcagccaccctagaagtacttggcgttgctcccattttacagataagtagaccgagtctcggagggttgagtagcctgcctgtgaaggcagaaccagaacttggatccttggctctttcactccttcgctccctccctccctctgcctcactcattagttatacatgcaacctgctctgcaccgggcatggctgctgggctcttggcctgaagactatattcagcccttgtccttcagcgggtgctcagtatgggaggaggccaaggaggttgggtgaggagagctggggggtgctcactctccctgcactccacggccacccaccttagttgtctgagaaga

SEQ ID NO: 72075 - DNA, 1153 bp, Homo sapiens
cgccagggagacagggcatcctggcttagtcatgctggctcacacaaagagcccttctctgaaggtccctggtgttcatacatgacaagacaggccctgtgagcctctgcgctgtgctttaagcattgagtctgtctgggggcagtttgcagagggtcccaccattgtccctgtggagttattggccatcctgtatcttcaagttgcattttggagagtgggcttttttctccttgtatttttttttattgtggtaaaatatacataacataaaattttctgtgttaaccacttttatgcgtatagttcattggcataagtacatttagaatgtgtgtaaccatcacccctatccatttccagaattttttttatcatcccaaacagaaactgcacccattaactaacaactcccaacccttttcctcacccccagtagcctctgccgtactctttgtctctatggatttgcgtcttctagatgtttcataggaacagagtcttgcaatatgtggccttttgtgtctggcttcttttgctcagcatcatgtttttgaggtttgtctgtgttgtagggggtgggctttttgaagcaaaggggatgtcagcactgtgtgctgaccctataccaggtgctgccagggagcaaaagaggaagagaagcccaggtcctgcccaggagcccccatctgggtcacgcagatggcgctagctcacacctacttagttactcctcagctcctggatctacctgtttgcatctctccagacaggtgcccctcgaaatcaaggactcagttccacatgtagcactctacggtgcatgccacaactctaggttcatctcagggcctgatttctgtgcttgggcacctgacatctctcagccttgtctctcccatctgtggaatggatctggttctctattaagagccatacttggcccgattaagctggcttcccagagtcagctcagagctgacccttgatgggggaggggggtgtgtgggatggtgcttcttagattatgacttttttatttattaaaaattaattcagggactttgatgtatcagactttaaaaggagttgacaggtcacatggtctctgaaagcacagggctggtaatccatttaagaaaacattttcttc

SEQ ID NO: 72076 - DNA, 1057 bp, Homo sapiens
tgtacacatgtgggtgcacgcccaagaaatgattgtttctaaagatggcagcgcagagcaatcgtcagcaggggctgccaagcgggatctgtgcccagcacagggccatcggttctgatttgcttagctctccctgtcaccacaggggcgactgtccagcaagcttggctactgccaaaagccagggtctggagcagagataaccgactccccaggggagcagcccattcccctgggccccctcaccacgttccaagccctgaatcagcctgctgtgcaaggatggtggagtggagagtcttggatccccagcagccaccctaatgtggacgcactgccgtgctgtgagccccagtgccccgaaaaagaagtgaccaaagaaaaagtgttgtatgagggaaggataaacatgcttgcttcagtgcgccacgaagcccagaagttaatctgatcatataaatattttcacgtgtctgtggttctgcgagggtgtactgataaatagagtgaagaaaggagaggttgtgtggctgcagtcttgccctgggggtagatgtgatgtttgttcccaactatgagtcagacgtggggtcagagccaggaggtcggtcagtccaaggccttcgattcttagatgggaacctggccttccctgccctcggccccacctgggagctgcttctaggaggtggagggaccccaccccactgcctgtgcttggtttcggagaaggctgtctgggcctttgatgcatctgtgcagatggaggacggtaatttatggtcctgtgggggaggagaagagtttctccaattaccagcttcccaagttcctggctttatggccagagttggaggcagctatttgggtaacgtccccagaggactaagtccgctttcctggggcagagcagatgatggagacttccatggcattgtgggtgagcctgatgcgccggaggacaagcctggcaggaagcacaggatcacaggccttggctgggctccgcttcagcctgctgggtgaagacatggggcctttccgaggtcagccggag

SEQ ID NO: 72077 - DNA, 1045 bp, Homo sapiens
gcagggggagggattccagatgcccccgggcctgtggctgtctccttccctgttcctctctgctccttcctcacaccttcctccctctttcttccttctccatgtccttttgggttctctctcattcctcgcccccctccccatcttcccactgcctcttcctagctagaagcagattctggcattgggtgaggaacagaacgcatgcccaagacacacttttcatggaaaaggattgaagtcggtaagctggcaagaatcccaggaactcaccgtgaataaaatatggttgctgtgcagtcaccaatcatgggaagtggcttcccgcgagcccattcctcttctgtggcctcatttaaccagggccaagagctggggcatgcaagcagggcatgtgttaatattgcgtaaataaatggtgcctgggtgtgcttgctggctacagatggagattgagctgccatcacatgggagcggggctagtccctcaaaggaggggtctgtccccctgtcccaattcccaatgtattcctggtgctttagggcttcaggggacaagccacggggccactttggctccctgagcaggcgacatgtgtatggatccatcattcagccctgagtgtgggctctgagctacagggctgcagaagtgaatcaattccagcccccactctcaaggagctctcaggccatcacaggcatcagtcatgggcggtgatgatccttacgatagtgccaagccttgtggaagtggggttgggggggtctgccactggggcgtggagcccatgaagggagcctcaggtgctgacgcttggtttagatcctgtggggtgctgagttcacacgacacaggaggcagggttgcgtgtaaacaagggagagtcttcctggtagagggaaccgccttcacaatggccccgaggcaggaggagccccatgggctcctgtctgtgagagtctggctggggctgagctgcagggaggaccaggttgggggcctcgtgccctagttaaggagcttagatgtcgccttgaaacc

SEQ ID NO: 72078 - DNA, 1016 bp, Homo sapiens
tgggcctcctccctctctgtagaggagtatcccacttgtcccgccagtcaagccctggcagaacagtagcttcccaatcttgctgtgctgggtgttctccgaggaacatagggaggcagattcagagagccagacttgcctttgccctcatctccaaagggagtcctggtatgaggtttcattctttaaaaaaaaagatatatattttttttttcagcaaaatcgacagttctgggtgagcgtgaaggagggaatcagttgcctcccttatctggcaggtgcttgctgtgcccactgaatcagagatccagtgaggaaggggaactcagcccctgggatgggggtatagacacatgttagaatgcatagcacatgcacagaagggaggcacagagtgcagctagagcagagagaaggcagcagctgacatctgatggagaagatttcatacaagagggagcatttcaaatgggctttgaaggatatggaggagtttatcaggagtaaagggggaaaggcagacggaccagaatgagccttcagtactcaaagtgcatggtatctttggggagtgctgagaagtttcaggttcttgaagtacagagacaaaggctggcaggatggagattgggctgggaaggaagccggcccctgagctcagctctcaggagtggacacttgggagcccgtgggattcgggggactcactcgccaaccttgtggctgtctctgtggcatctgtttgtttgcttctaattaggaggcgcttcctcttctccatttgcatattagctgactgcagccttgaactcctgggctcaagcaatcctcctgcctatgcctctggagtagctgggactatagatgcaggccaccatgcctggctaattaaaaaaaattgttctctttttgtagagacagagtcttactatgttgcccagcctggtcttgaactcctgaactcatgtgatcctcccacagtttcccaaagtgctgggattacaggtttgagccac

SEQ ID NO: 72079 - DNA, 1032 bp, Homo sapiens
tttaaacccatgattcagttagcctggtgtggtggtatgtacctgtagtcccagctactcaggaggctgaggtgggaggattgctttaggccaggaggtcaaggctgcagtgagctatgattacaccattgcactccagcctgggcgactgagtgagacctgtctctaaataaacaaattcatgattcagtcccttggaatacaacgggcaaggaaggttggtgggggctgagatctgacagccctacaggtaactgtgtcaccaagaacaggtttcccttaaacctccaggacccatacacttaggttgatcactgtggggtgtcctctcattgcatcgagtgacttccatgtgcttctctgtgaagaaagctggtatttttcttttttagtgtgcaaggctgctctaatgacaagctttaaggtttcctgtggctagtgggattcagaatgagacctgtgaagttcccagctcagcatgggaagaatcagttgtcgtctttacactcctcagtatgagggctgcctgtgggggatgggaggaaaagatgttgcttttgctgtcttgggaggagctgaatctataggccaaaggggagggaaatccagtttgctttttctttcagttttttaacttcatcgtccccatcacagtaaatgtattgttgaggaatgacaacttggaaattacttccattgattggtgtatgggctgccccaggagaccattctcaactgccctttgctctggtgggcatgtccttgcagaaggccacttcttagtgttttcttctgaggctggacgaggatgcggagacagtaaggaagctggaggcaagctctctgcccttaagtagctcagggcagcatcttcccccacagcacatgttgttcagcactttccttcctctccccagccttctccctcctgctctgggatgcagcactctaacacaccttgctggggacttccttgcatttctgtggcaattctcaggtgtaggcagagttctgtgacaactgaggttgagt

SEQ ID NO: 72080 - DNA, 1070 bp, Homo sapiens
tcacaggggatgcgatggcttggctcgggctcagaggcctgacagggagaggcagcgggtgtgtgggggctgcgagcctgttgggccccagatgtgttctaaaggtagagccaggccaggcatggtggcccacgcctgtaatcccagcactttgggaggccaacacgggcagatcacctgaggtcgggagttcgagaccaggcttcagcctgattaacatggagataccctgtctctactaaaaatacaaagattacccagatgtggtggtgcatgcctgtagtcccagctacttgggaggctgaggcaggagaattgcttgaacccggaggttcaacccggaggcggaggttgcggttagccaagatcacgccactgcactccagcctgcgcaacaagagtgaaactccatctcaaaataaataaataaataaataaataaataaaataacaaaataaataaaggtagagcctagaggaattctgaggcattgggtgcctcttgcttaaaagaaggttcttgtggacttggagagatgcaagaagtcatctaggccaacctttacacctaacccactggaaaactgaggcctaagaaaagaagtgacttgtccaaagtcccatggcaagctggctagttgcagagccaaaatttgggcttctggaatgcaggtccagtgtttttacagctgaaacaatgaatggtcccagtgaggttgagggccaagggaagaagggctggccccagggtcccagagccaagccacagggtcctgacagcacccacagaggccaagcccagcctccgctggccagcaggagcctgagactttgtgagctgaggattcttggcactctgggccttcagcagctctctctggaccagcattttcaccttagctgggctgcagtcttgacgatgtcaggccttgggcagatcaaagtcagtgctcctgtgcattattcacttggctcatgctgagcctccatggagtgtcaggcccgaacaaataagagagtcttgctgtcaaggagctaacagttcaagggagacagacgagcaaacccag

SEQ ID NO: 72081 - DNA, 1035 bp, Homo sapiens
tctgctttcccaggtctgggttttgttctttgggctctgcttttgccacttgccagcagagagaaaaatcgctcctaacagtcttttaatggccctgcaaatgcttccaccttcactggaggtctctccactttgaacgtctctgagggtttccctgctgcctccaataatctgggcttctgaaagagaagctcagctccagagtacagtgtttgttgaagaagatggaagggagggggagtagggtcataaaataagaaatccagccagccagcctgcccaaggcatggggtccatgatgccagctcctcctcttggcctgtgggagggtgggtaatggtggagggttcagagctgttcttgggagaatacagggaggtgggcgggtgagaggatggagacccagcctcagaagggcctggagcagcatgcagggagctggagacacatctcagccacctgactttccctgagtccccactgctcagaggctgtagcacgcctggccctcatgcagggatctcgggtctacaccgtaactgtgcctgggaggtgccttccttcattttccggaggaggaagctgaagatcagctcagtgaggtgaagcagcggtagtaatcacagcggcagcaaaacactgagcacttactgtgtgccaggcatggtgctaagcacttgctttctttagctcatcgactcttcagccattctatgaattaggtaccagtatccactttcttttttagatagggaaaccaagtcccagagaggttaagcagcttgcttgagtgaggcctcatagctgggaaatggaggaccacatttcagaacctacctacctccaggactcctcttgccacccagttccgtggcctcttctaggctacatggctttccaaggggcacactgggacaaaggggagaaatggcacttggactgtgctcatttcctggcgttactgggctgattccagcctgattccggcctgatctagttgccaggttcctcccatgcaagctgtctttaaaataa

SEQ ID NO: 72082 - DNA, 1039 bp, Homo sapiens
ttactgctgagataattgtgggccaggaaagtgtgcccttccgtcccacacaaggcaggactgaaatccataggccctcatttccagcctgtccccaaatgctctgtgccatctcctggaagccctctgggattagcatgattcatatgtggttccctggggtcctcactgtgccctgtgtgtgacacattaattcacaagtactactggcctgggcgacttatcgagaccccatctctgcagaaaattttaaaaattagctgggtatggtggtgtgtacctgtagtcccagcacttgggaggccaaggcgggaggatcacttgagcccaggagtttgtggctgcagtgagctatgatcgtaccactgcactccagcttgggcaacagagcaagacctcatctcaaaaaaaaaaaaacgcaaaacaaaattcacaagtactagcctgccattcagatggtatgcaggagtgtgcatgttcatgtgtgtgtgttgttttccccgtgttcctctcccctctgtttcctctgtaggcaagaactctatgcatttttctgtgtctctgtgttcccccagtacaagtacccagcacaggactcattatgctgggttgtgggccagcctcagaaacataaatattaggagatctactaaaagaaaaaagagaaaaatatacaaataaaacaactactgtgctttcagttgatgccagaaaagcatttgataaagttcactatccatttaattttttttttttcttgagacggagtctctctgttgcccaggctggagtgcagtggcgcaatctcggctcactgcaagctccgcctcccgggttcacgccattcttctgcctcagcctcctgagtagctgagactacaggcacccgccaccatgcccagctaattttttttgtatttttagtagagatggggtttcaccgtgttagccaggatggtctcgatctcctgacctcgtgatccgcccgcctcggcctcccaaagtgctgggattacaggcgtgagccaccacgcccggc

SEQ ID NO: 72083 - DNA, 1026 bp, Homo sapiens
ttggctaacatggtaaaaccctgtctctactaaaaatacaaaaaattaggtgggcgtggtggcacgcgtctgtagtcccagctacttgggagactgaggcaggagaatagcttgaaccagaggcggaggttgcagtgagccaagatcacgcctctgcactccagcctgggcaacagagcgagactcgatctaaaaaaaaaatggataaagtagctcctggttggagatattccttatattgttgaaatctttgcctatccctcagtctctatgtttttcagagtaatgaggctggggccggatgcggtggctcacgcctgtaatctcagcacttgggaggccaaggtgggcgtatcacctgaggtcaggagttcaagattagtctggccaacatggatctggggacatagagatttgagcaaactttttcgtgtacagtgagggaggagcgtgtgtgtgtctgtgtgtgtgtgtgtgtgtgtgttcattaataattgtgatgctaagattgccttcggtagttcatctggatattttttccacattcctcatgtttctactttttcctgtattttggattctccatttgaaggcagggaaagaggaggaggttgaagggaaaagtattctagtcctttccaaacattatcatggaagatttatcaagggagatcgaaacagtctcttcttcccaccacctactatcatcccacagagtttaagaaaatactcaaattctctctcttccattggcatcagattcacagccctgcctgtggtgggaagtgactttggtgcattggcttcattcccacagtggacataattgaggctctgagtgatcaatgtatttgttcagggtcacacagccagcagacaccagagctggaactagaattggattttcctgactctacagccagcattcttctttctgctgctctgtacacaatggcaggaatgaagtaggcagatggcagggatttgccatggagccatatctggggctcttatgggacttgcctc

SEQ ID NO: 72084 - DNA, 1638 bp, Homo sapiens
cgctgaagcaaagttttgaagtggcttacttaattggtccagagcacgatttgtattaacccagcaaggaaaatagctcactaatttatatttgagtgtgaaatagcttatgcatttgctgctgggagtagcaagggatgcatttagcggattcttgccattagtatgcagctgagctcctgtcctgtactgtgatagagagtattagtttgacttcagttcccagccttgggtgactcaccagagcattgtgagttcacggtagtgactgctgaccggtgcaatttgtcgtgcactctttgaataccaagattttatagtacctgatttcacccatttttcattttacttcaattattcctccccaccacacccccactaaaagttctctttcctgaggaatgttctgtctgactttccagcaggggggataaaggaatttagaatcaaacaaataggagagccagaaggagcactggaaaaaaccgagtccaagggtttgacctttccacaaaggggaatgactttccatttccctgaaaccctgagatcacagggctgggtgtggggtgttggcagtggagcgggattaagactcaaggacacagctagtgagctggaggccggctcataaaatctgggacgtgcagctcactcaggtttgtcttggtggcctgggagctgcaggactggtgcttgcagggttcaggccagtggctcctataccatacccagcctcgtcgactctgtgttatgggcttttctggtgcttaagattcctgctccaggagacggctgctcttccctctccaggagacggctgctcttctttctccagggaagcctccaaaccagaggcatccctggcgtatcccagctgcttctcaggctggggggatcttagctatttgtgtttgagttgctggtgccaggcccagtggcatggtagtgatccagcgtctgtggattgttcttgcagaggcagtggctggaggtgcagaggggaggggcctttcccgcttacccaccttttgtctaagacaccgcagtgcatggcatacttctgcccattgtgcttcacaggactctcacaaatgttgctgtgcccattttacaggtgaggaaactgaggctcagagaagtcatggtatggccctcagtgctttcattttttgtgtctcacagatggggaccctaagactcagagatgtcatgacttaggcctcaccacacagggagttaactgctggctggactctagacctgatccctcatgttcatgcttgtgtttggtcatgttctgttacacagcctgtgctgttgttttaaaaaatccatcagtatttcctgatctagttgagtctaagcagtacaaagtacctttcaatttgggtttgtatggggtttttttttttcccttttcttttttccaagaggaaaacagaattcctcttctgtttgttctgtagcttttccttttcaaagaggccaaagggatgcatggacttagagcagattcaccaagacaggattacatgctctgggatcacatctgtctatgtgactttgaggccaaatttggacctacttgtgaagttgtccagccatgcacctgtaggctggaggttagagagcagg

SEQ ID NO: 72085 - DNA, 1028 bp, Homo sapiens
tggctgggcacagtggctcatgcctgtaatcctagcactttgggaggccgaggtgggcagataatgaggtcaagagatcgagaccatcctggccaacatggtgaaaccccatctctactaaaaatacaaaaattagctgggtttggtggtgtccatctgtaatcccagctactcaggaggctaaggcaggagaattgcttgaacccaggaggtggaggttgcagtgagccgagatcgtgcccctgcactctggcctggcgacagagtgagactctgtctcaaaacaacaacaaaaaagacaccctatttaatatgtatcattgattcattaacattaaactcctggccatcaacactgtgactcatgtctgaatgaagcttctctaacacaagagattttctctgcacatcataatcatcttgcacccaagaactagactgcacctcagcactgtgattgggggccattccaaacagcaaaatcaccaacacaaagcacacaagtgccaaaaatgtggcactgcacagaccacaaaaaggacacgtgtttccattaggagagctgagatgggaagatagaggatgtcccctcgttcaacctcagcagggaatgtgccatcaggcaactcaaattttttgccaatttgcacaaatttgaaaatgaatttgaaagcaccatgagcattgattttggggttacagataaattttagtgactagggtaattcacaaatatggaatccatggatagtgaggatctgccacctttggcatcatgtcagcccccacggtgtatccagcctagctcagggcacctcacaatgctgatggtacttaatggatgaagactggagctgcgggatgaggctgtgggcagattcttgtgtttgcttgtcttaggtgctacagaaagacaagctgtcctccctcagccctgctgtagcttcttctagaagggctgctgccagcagaatggtgcccatctctctctgctcaagtctacaggtaggagggaccctgtactttca

SEQ ID NO: 72086 - DNA, 1123 bp, Homo sapiens
tcggtagagacggggttctcaccatgttggccatcctggtcttgaacttctgaccccaaatgatctgcctgccttggcctcccatagtgttgggattacaggcgtgagccactgcgcccagccttgaggtagcatactttctgaaataaaaaagtagattatgtccgaagcagttgacctaaaaactgccttggactgacatttgttaggtggtctaagatgttctcttcacgctttgcaaaaaaatgagcttttttggagtttaaattaagcatccctctggtgtgtttggttttttagccaccaaaaatttaacaaatttgataacctgtcacgtgtaagttcagaaagcactttggtcttaattggtgacttgggggttatttggtataaatataggttgtttttctaaaaattattgccagtatcctccaaataattgccccttcaaatgtttcatctaaaggtgacagcttgtgggcagaaccatgcacaggaagtgcctgccagtgggtgttaggagatgtaggtggagtctgtgatagccaaccaaaagctatccccttctcgcccagaaaagccacgtgctttgctggacgctacttgaaatctgaactctgcacctacatatgtagtaaaattagacacttttgtcactttaatttttagattatctcaagttttcactagatttcaatgtgccacttgtgctatgagtctttaagaagctttaaaaaataaatgcacacctgtagccttttaccattcagacaggtagattatatttacctgtcatgagggaccatgtatggttgacagttgcaggtttgattaaatccactatattgcacaaattttgctggaaataatttcctgccctgccaagagctctatggtagtttgataataaactactaccccagtattcttaggaactgtgttactaagtcttttctgcctgatttgtactttatttccatagacccctcagatatgtgaggaatcaagccataaatgtgcatttgctggacattatgtaccatgtcatctctatgactacagatttcaaggataatttttacatctaacaatttcactgtaacagtgaccgataatgtgagaa

SEQ ID NO: 72087 - DNA, 1013 bp, Homo sapiens
ctgtagtcatagagatgacatggtacataatgtccagcaaatgcacatttatggcttgattcctcacatatctgaggggtctatggaaataaagtacaaatcaggcagaaaagacttagtaacacagttcctaagaatactggggtagtagtttattatcaaactaccatagagctcttggcagggcaggaaattatttccagcaaaatttgtgcaatatagtggatttaatcaaacctgcaactgtcaaccatacatggtccctcatgacaggtaaatataatctacctgtctgaatggtaaaaggctacaggtgtgcatttattttttaaagcttcttaaagactcatagcacaagtggcacattgaaatctagtgaaaacttgagataatctaaaaattaaagtgacaaaagtgtctaattttactacatatgtaggtgcagagttcagatttcaagtagcgtccagcaaagcacgtggcttttctgggcgagaaggggatagcttttggttggctatcacagactccacctacatctcctaacacccactggcaggcacttcctgtgcatggttctgcccacaagctgtcacctttagatgaaacatttgaaggggcaattatttggaggatactggcaataatttttagaaaaacaacctatatttataccaaataacccccaagtcaccaattaagaccaaagtgctttctgaacttacacgtgacaggttatcaaatttgttaaatttttggtggctaaaaaaccaaacacaccagagggatgcttaatttaaactccaaaaaagctcatttttttgcaaagcgtgaagagaacatcttagaccacctaacaaatgtcagtccaaggcagtttttaggtcaactgcttcggacataatctacttttttatttcagaaagtatgctacctcaaggctgggcgcagtggctcacgcctgtaatcccaacactatgggaggccaaggcaggcagatcatttggggtcag

SEQ ID NO: 72088 - DNA, 1045 bp, Homo sapiens
ttgtaattttagtgtttatacttgctcttttgctaaaagaaaggtcagtttggtggtgattatagaacttggtatagaattctaattaaacttttcccattgttttcacctaggaagccttggaagatcgtttggaaaggattaatcgagaactgggttcagttcgcatgacgctaaagaaattccatgttttgcgcacctctgcaaatctttgagatttgtagccattaaattttgagacatttttgtttgcactaatgtataattatgcagtcagaaaaggcaaactattttgtactgtttataagccttcaaacagtagttttacaatcatgctattcttacacttgctattttatacttcaaatggccacatattttcaagatatttttgttatgctcaggaatctcttgtatattttactatttaaaaagcattatttttaaatagtatctgtctccaatttatatcaagaataaggaaatataaacagaggaagcagcttgtttctaaacaaatagtgttatccttttacaattaactgcacatcaattttatagacttgttctacattgtaaatacaattcagtttttaaaaaataaagcttaatagcttccataatgatagactagtacatgctgaatacataaacaattacagtgtaccttggatttcagttgtgttgaggtttttaaaaaatgataatgcaattcgtatttgaaacgtgtcttagagtgaatatcagaatagtaataatggactcttggaaagctttgaaaactacatgaatataactcattttctttaaactttattgtctgtaagagaaaaaagagagattgtaattctctaattttatcttttctaaaaaagttaaacaattggagagccctctctggagggctctcagagtagctctctgcccattgttctgaattaacttgtgtcccaccctggacaataaatggacagataaaccctttgaaatacaagccaccaccccgtgagggattaagagggcagcctggttttcttagtgtgca

SEQ ID NO: 72089 - DNA, 1029 bp, Homo sapiens
ggtggaaagggtgtgagatagtcatgtttggagaactgaagcttgctggttacagaaagtcatgttgccggccgggtgcgttggcgcacacctgtaatcccagcactttgggaggctgaggtgggcggatcatgaggtcaggagatcgagaccatcctggctaacacggtgaaaccccgtctctactaaaaatacaaaaaaattagccgggcgtggtggcaggcgcctgtagtcccagctacttgggaggctgaggcaggagaatcgcttgaacctgggaggcggagcttgcagtgagccgagatcacgccaccgtactccagcctgggtgacagagcgagactccgtctcaaaaaaaaaaaaaaaaaagaaagtcatgttgccaggcggtcaggcggtttggggtgtccgcttgaggtggtgatgagtctgcccagctggtggcttttttccagcaaagctcagtggtaggagttgagacctgaagcgcggcctttgtagtcagccagtcctcagattttgctgccagtcaggtgtggtgaaaggtgagagagaaagtatcgtgagtgtggacttcagggtagatcaagaggacctagtcagactaggaggggttgataaatggaaaatggagaggccaaggatcgtaggtcacgttgctgaagcttgagggcgggaggcagaataggggcacagtctttggagtattggtttcttaaggggagtgtgttctctggttttgacaaaagccagcaagtaccctctgaggtggctggctgaggagtagagggtcacctcactggagagagtggtcaggaagttgcctagtgtgagaacaggcataggtgtggagaaaacaaggcaggctctaaagtctggggaatgactgggggttaacatgatggtgggaacctcagatgagctgggggagcaatgtctagaattgcgctgttcagtacagtcctgccaacagccactattactatttaaatcaatcatgtcaacctaaaatcagtgacagagactgac

SEQ ID NO: 72090 - DNA, 1372 bp, Homo sapiens
ttggtaggctgaggcaggtggatcatgaggtcaagagtttgagaccagccttaccaacatggtgaaaccccgtctctactaaaaatacaaaaaaattagccagatgtggtggcacgcagctgtcatcccagctactcacagggctgaggcaggagaatggtttgaacctgagaggcggaggttgcagtgagccgacatcgagccactgtactccagcctgggtgacagagcgagactctgtcttaaaaaaaaaaaagctgggtgtggtggttggtggtacgcgcctgtagtcccagctgctcgggaggctgaggtgggagaatcacttgagcctgaggggtcgaggctgtactgagccatgatcatgccactgcactttagcctgggggacagggtaaaaccctgtctcaaaaaaaaaaaaagacatttaaaaatgtgtattaatacattatgccttctgtgtaattaaatatataaaaattggtcttataattaaaaacaaattttgcaagatcgggctgggcacgtggctcacacctgtaatcccagcactttgggaggccaaggtgggcagatcacttaaggttaggagtttggccaacatggtgaaaccccgtcacttctaaaaatacaaaaattagctgggcacagtggtgggcccctgtaatcccagcaactgtggaggctgaggcaggagaattgcttgaacctggtaggcagaggttgcagtgagctgagatcacgccactgcactccagcctgggtgacagaggaaaactccatctcaagaaaaaaaaaaattggcaagatcttagcatttattaaaactgagaatgggtgagtagatgcttgttatagtattctttgtaattttccaagaatgtttgaagatttttttttttttttaagacggagtctcgctctgttgcccaggctgaagtgcagtggtgcaatctcggctcactgcaaactccgcctcctgggcttatgccattctcctgcctaagcctcctgagtagctgggactacaggtgcccgtcaccacacctggctaatttttattttgcatttttagtagagacggggtttcaccatgttagccagggtggtctcgagctcctgacctcgttatctgcccgccttggcctctcaaagtgctaggattataggcatgagccactgagcctggccctgaaatagttcttaatttaaaaactgggccgggcgcagtggctcacgcctgtaatcccagcactttgggaggccaaggtgggtggatcacgaggtcagcagatcaagaccatcctggctaataacatggtgaaaccccatccctactaaaaacacaaaaaattagccgggcgtggtggtg

SEQ ID NO: 72091 - DNA, 1041 bp, Homo sapiens
tcataagaaagtccgggttaaatgtcattacagaacttaaatgtgttagattaattactgaacattgtaaaccctcttatgcagaggcatttgctaaaatgaggaaatatcttaggatcaaattgggatccttggaatgtattttgttctttgcccagctgtgtgaccttaggcaagtcacttaccttttttggaattcatttttcttatctgtaaaaataaggacaaggggctagaacatctcaaaaggtcttttagccctaaaatttcagacattttattcctatgttaatggaaggaactatgaagatggatcttcattaggttgtatgggttttctttctagtttttttagttctttcagaattagcttggctataatctcaacattgtcttggtgatacccttacagaatacattatttttatattagatctgaattttattatgatttgggtgtaaataaagaatattaataagtaaataataactttataatgacatttattagaaaaatgattttaaattgtaatttgtgacccaagttgtaattgtcaaatgaggagctttttctagggccgggcacagtggttcacgtctgtaattccagaattttggaaagccaaggtgggaggatcgctagagtccaggagttcgagaccagtctgggcaacatggcgagagcccatctctataaaataaaataaattgtaagagaagatttttctaggtctttgttaattaatcttagtagaacataggaaattctttttttttttttttttttaaagaaaagatgtaagtaacaaattgaacatttgagagagataaaagagagagcttcgggttggggaccagggaaggcctttctttagaggaggctcataagcagaggagtcacctgtgcatagaattgctggagcaggaggtgtggggtgagggatgggagggtgggcagggtggggtgtctgggaggtggtccatgcagagaaattgccttggtaagtcctcaggtaggaaagagcttagcatatttgaaga

SEQ ID NO: 72092 - DNA, 1047 bp, Homo sapiens
atttcattgacttccttggaagatcctgtgatattgtctaagtatgtatttcagtgaatggcttgtaatgttaatagattttctgtgatatctgattgaaaatgatctttattgaacttcagtattgcataaagtcttagagatttagcatttttaagatggagcatataaaaactttttcacttgattgttaactttttgtgtattaatctatatattttgtagtatgcaaaggaaatatgctatatttttgcccatgagaatcattgtgttcttggtttctcttgtgggatggagactgaagatagctttcctaatatatattttttattctcactgaataaggattaggcagaatctgaaggaaaagcatgctcgacacatagcagatcttcgagcttattatgaatcagaaataaatagtttgaaacagaagctggaggcaaaagaaatctctggagttgaagattggaagataaccaatcaaattcttgtagacaggtaaaatttataatttagctgtgaagttttctccaccttggatgtattattttcacagaagtataatgtgagaaaacactttgaaaatactttggatctgaaattttaacagtcatgtttgcctaagtatttttgaagctaaacccccctcttataatacactaataactgacgtggagccatttgtttcacatgggcaaaatactgaaacagttgagcgaattttgtatatgcagagtaatgtcattgatgggaggagcagtactatggactttctaataagtctatggcttatgtcctgtggcagttcttcacctttttaataggcccattccaaaaaaacccacaaagatatgcaggggagaatggccttatattcaggatagcttcatacctattttagaatcacttagaaaatctgatgctttcactactagtattagtagtagagtccttgcaacatactttaccattaaacgggacttgatcaggcatggtggctcacgtctgtaacccagcactttgggaggctgtggcaggcagatc

SEQ ID NO: 72093 - DNA, 1020 bp, Homo sapiens
gtttcaccgtgttggccaagctggtcttgagctcctgaccttgtgatctgcccacctcggcctcccaaagtgctgggattacaggcgtgagccactgtgcctggccaccagcctcaattttgtttataaactaaagataaagtatcacattatctttagaataatatctcatcatattttgaaacatgatattcttgtaacagtcataaaaatatgatgtttaatatactttcttacccaaatctataactttttatttccagcatatacaggaggagataaaaaatttagtcaaattacagactagtagtgcttccttagcttcctgtgaaggaaattcttcaaacaaacaagtatcttcggaaagtcaaatgggttttttttctctaagcagtgagagaaatgaatctgttatccattatcctgaatccacagaacctgaaatacagcaagaaatgtccacgtcacaaccagactgcaatgtggatagttgctcagtaagcagtggatatggcaccttttgtatctcagaattaaatctgtacaaatctaaagaccctaaggagttcatggagcacatagatgttcccaaaggacagtatgtagcacctgcggtgccggctgagtcacttgtagatggtgtgaaaaatgagaatttttatatacagactcctgaagagtgtcatgtgtctttaaaggaagatgtatccatttctcctggtgaatttgaacataattttcttggtgaaaataaggtttctgaagtatacagtgggaaaacaaataggtaagtagaatttctatcatttgaagggagtttattacatttagaatctagtgttccttttaatgcactataatagaatgagatgtatttgaacatttatcagttcattgcctgtagaaaattgaaataaacaaagcacactatattctaatgacactgactttcttcccatctgtaatgttataagactactaaactcttaaggtcggaagctttgccagaaaatagaaaag

SEQ ID NO: 72094 - DNA, 1123 bp, Homo sapiens
aacaagatttgactgtcatttggggcagtggggaaagaatccccactgcacaatgaagggctgttctgaaagttgggggaaataatcctctggaatagctgagatcagagaagctggaaattaatcttattgtttagcacagactttttctattttctgccgatcctttggagtgttctctcacttctggagaaggtcttcttgttgtgttcttaaaaagagtacagtgcggtctttttactggccgtttccttttgtggagcaacttgtgatcagattttgaacaaatgaggtgccattagaaggattaaatgtcagtggttttgtactgctctgctaaatcttgaactgctgaattattcaacactttgatagaatgaagaaaaccatttgaattatttatgtttcaacagaagtagtccccaccttagtacaaatggggtatcctctttctcagggaagaccagaccatctgtaattcaaggtacagttgaagtcctaacttctttaatgcaagagctacaaaacagtggaaagactgattcggaactttggaaaaactgtgaggtatctaattttgttttatttttggaattttaaaataattatgttaaaacatacctctactaaactctaaattattagaaatttatgtcctgaagagcatgacacttttaagttaatgctaaagtggtcaagtatattaatttgggaatgatattgaatgaatgggaaaaaggtgatcaaaagtattttttaacaatatattactgattagacatactaatttgtatattaaatatgaactaaaacattgtcttggttcagagacctgagaatcccaaaattattaaaattgttactaattgtaatgttgtcagtaacttatatggaattgtcatcattttgaaaaacctaaatccactttgaaatattttcaatgttctaattataaattgaagcttctatttagtaccttaccatattcagctgtgatacattgcattatattgttttcagatcagtggttctttctttggttcataggttaaattgtgatataaaaatgtaacagttaaaagaatacttacatggccgagcacagtggctcacgcctgtaatc

SEQ ID NO: 72095 - DNA, 1046 bp, Homo sapiens
atcaccactatctaattccagaattttttatcaccccaaaaagaaactccataccagctgcactcactcacattctctccttccccagctcctggcagccatttgtctatgaatttgcccattcaagatatttcatatcaatgaaatcatatagtctgtggtcttttgtgactggctttttttacttagcatagtatcttcagtgttcatgtatgttgtagcatgtgtctttttatggctgaatcctatcctgttctatgaatatgcttcattcgtttatccatttatccattgatggacatttgggtggtttctacattttgattattatgaatactgttgctatccttaatggagatctgtatgaaagcagttaaggtttccaaagttatgtaaaaacagttgctagctttggtggctttttatagtagtatttttttcccccattcattttcagactctcttggaagtttaggatatttcacagttctgaatgttagccactgaaaatgccagtagatgatgaagcctctgaagatgacacggattcatttttctcaaacagcccaagaacctttattttccaataagagaatataacaatttctgtacactatggaagagtttgacttggtgaaaaccttacacaaaacttcatcttctgtaggatctgatgaaaattctcttcattctcttggactgaacttaaatactgataggtaagaatgggatttaaaaaaaatgtaccaaatcagaataaccttatttgcatacgtttatcaacttatccaaatagtgtcatagttactgatttgaattattattattttttaacctatcatcaagaatgttcagggaggctgggcgcggtggctcatgcctgtaatcccagcaccttggtaggctgaggcgggtggatcacctgaggccaggagttggagaccagcctggctaacatggtgaagcctcgtctctactaaaaatacaaaaattagccaggtgtggtggcacgcgcctgtagtcccagctactcaggaggctgaggc

SEQ ID NO: 72096 - DNA, 1071 bp, Homo sapiens
tgaacctacagtctcaaagattgagaaaagattttgcagttaattaggatttgcattttaagtagttaggaactgcccaggttttttttgttttttaagcattgatttaaaagatgcacggaaagttatcttacagcaaactgtagtttgcctccaagacaccattgtctccctttaatcttctcttttgtatacatttgttacccatggtgttctttgttccttttcataagctaataccactgtagggattttgttttgaacgcatattgacagcacgctttacttagtagccggttcccatttgccatacaatgtaggttctgcttaatgtaacttcttttttgcttaagcatttgcatgactattagtgcttcaaagtcaatttttaaaaatgcacaagttataaatacagaagaaagagcaacccaccaaacctaacaaggacccccgaacactttcatactaagactgtaagtagatctcagttctgcgtttattgtaagttgataaaaacatctggaagaaaatgactaaaactgtttgcatctttgtatgtatttattacttgatgtaataaagcttattttcattaacaatttgtattaaaatgtgggttccttgaattcttacgtgctgttttatttttttgagacagggtcttgttttgccacccaggctggagtgcagtaatataatcttggctcaccgcagcctcaacctcctgggctcaagcaatcctcccatctcagcctccctagtggctggaactacaggtgtgtgccactatgcctgaataatttttaaaagactttttgtattgaatgaatgggtgtgtgatggaaaaaaaattttttttgcagagatgaggtctcactatgttgcctaggctggatcctgggctcaagtgatccttccaccttagcctctcaaagtactgggattataggtgtgagctaccacgcctggtgtaaagaagtgctattttaaataatctctcatgaaagtgtttgaaatgcttgttccccggtgccgtgaagaaatagcacttgaacataaatttaatttact

SEQ ID NO: 72097 - DNA, 1004 bp, Homo sapiens
tttgagaggctaaggtggaaggatcacttgagcccaggatccagcctaggcaacatagtgagacctcatctctgcaaaaaaaattttttttccatcacacacccattcattcaatacaaaaagtcttttaaaaattattcaggcatagtggcacacacctgtagttccagccactagggaggctgagatgggaggattgcttgagcccaggaggttgaggctgcggtgagccaagattatattactgcactccagcctgggtggcaaaacaagaccctgtctcaaaaaaataaaacagcacgtaagaattcaaggaacccacattttaatacaaattgttaatgaaaataagctttattacatcaagtaataaatacatacaaagatgcaaacagttttagtcattttcttccagatgtttttatcaacttacaataaacgcagaactgagatctacttacagtcttagtatgaaagtgttcgggggtccttgttaggtttggtgggttgctctttcttctgtatttataacttgtgcatttttaaaaattgactttgaagcactaatagtcatgcaaatgcttaagcaaaaaagaagttacattaagcagaacctacattgtatggcaaatgggaaccggctactaagtaaagcgtgctgtcaatatgcgttcaaaacaaaatccctacagtggtattagcttatgaaaaggaacaaagaacaccatgggtaacaaatgtatacaaaagagaagattaaagggagacaatggtgtcttggaggcaaactacagtttgctgtaagataactttccgtgcatcttttaaatcaatgcttaaaaaacaaaaaaaacctgggcagttcctaactacttaaaatgcaaatcctaattaactgcaaaatcttttctcaatctttgagactgtaggttcagagccaagtgaaccatgggaggaaaaacgaaactgtaaccattttgaaaacaagggtttcatctgaacag

SEQ ID NO: 72098 - DNA, 4005 bp, Homo sapiens
agtggcacggtgctctgcccagttcaggatccaagtccacgtttgcagttccagcccaagctggagcataaccctgggctgcagtggcagcatccagggctggcctgagactcaggagacagctcggaacggtccccgttctcggagagaggggcaggtgccggggtagctggctccctgctttggtctcctctatgctgtgtgccctggggccaccccttcaggtccatttctctaaatcgaggggcctggagccagggttctccagtgctcctcccggctcccccagcttgaggccctgaacttccttcctcctctgcccctcccctcacccacaccaagcgagcagctggtgggtttggccagcctggcaccagctgtctgtccccgaggccaagtctgcggcgcccactgtgtgtgtgagagagagaccgtgtggctctgggggcggcaggcgggcagctgccgaggaggactaggtaaattctccatggttaccgctgtttgtcattctgcaggatatcctttacccgctaatggccactgggacgccattgcggggccgcgtgctcctagccacggactcccctgccagatccaggaggctgcgttctgggctgggccctgcttggtcactgactgcagctctggacaggccccaatgttgcatcccatatgtggggcctcaaccctcctgtcttgggatacagagcccttggggcatagactgctaagagtctggtcccctctttggggagggggagacaggcacagaggggttgaggggctttatctggggcacacagaggccatggtgttctctagatttctgatttgatgtccagcgtgcctgtctccagccagggttgggtctcaaatactccaaggccttcctgtcttccctgtcattgagcacagcagagatttgagcgcatagaagcaaaaaggcttggaagctcagcctggtttcgaccagcctatgtggcgctgtggtgtgatgtggcctctaggttctcagcctctggggaccaggacacagggagaggggatgggcagagttcaggccaggagtggcaataattttatctttgggagcagccctgctgcttggaaggttctggttggatgggatggagctctgtgaggaccagcggctgctgcagagctggggatggtcaggtgccttgtagctacatttcattatccatcttatatgctggtcaaaccggaggtggagagcagggttctccatcctgctacagttggtggtgtgggtcctgggcaagggctgttgcaggacccggagtccttgccttggtacaactggctgagctgactcctggcctctctctccccaccccacagctgggagtgtccactcgccttccaccagcatggcaacgtcttcacagtaccgccagctgctcagtgactacgggccaccgtccctaggctacacccaggtatgtcaatgggggtgatggcatggtgggagggccagggggagacatgcttcccaccatcagaggagagaagttggtggaagagacgaaggagcagaaaggatgggacggagctttctcagcccaaggccctggctgcgctcctgctcagaacacatcagagtggagggcactggggactgtgcttcgcggggacgtgtgaggtggaggggacaggagagcaccaggaaggggcagcagcccaagctgtgctgaggctcccaccccacgcgttcctccagtgggcctcctcactcctctttcttgggcaagtgaggcctgaccttgatgctggctctccaagctgggacagaagatagggtcagttcccacttgctctccacgggcgcgggcccagcagagaggaggtggccctgtcttgagagcccagctgccttttgtcgagggccagtatttgagagtgtggcctgggcgaggccgctccctggttccaccactttccagactgtgaccccccacttggtaactgcccaagacccgggctcctcatcagcccaagggtgatcctagtacccccagcccaggctggcgaacagcaggaatggggccgccaccatctcagctgcaccctacatctccaagggatgagccgccccggggaaggtcccagcgggaagatgctctccctggctgggccccagcaccagtgttctgaggtcgctatggagcctgttcctcgccaagtgggcggctccccggccatgccccaccaggctgccctgccccaggaggagaagcaggtgtgggcctgtgagcgggaccggctgaagaagcggtggctgtgggaggccaggcagaggggcagccgggagttggcagtgccacgttctggccatgcgacggcggcgccaggacaggcgggaggcccgtgaggcctggaggcagtgccgtggggaggcagagcagccggagcaggacgaggacaggacagagcgcgaggccaggggacagaggcggtggtggaggaggggggaggcaaggacctcgcccagggagctggcgtgtctatgggaggaggtggccaaggggaggtagcctgggcttgtgggcttgcgggcttgtgggcttgccggaagcccagcctcgctgatccgggtgcttgctgtggggctcccagtggtggtgggaggaaaggttttctgggggttgggccctgttggtgggaggatgagagaagggaatgcattccaggctctggctgggccatggcggatcgctgtggtcctggtggcccaggtgtggcctcttgtctccccactggcttggaggcttggcacctgggatgtgccctcccatccatctgcatcctgggaaatgctgtttggactcttttgtgccaaaatgagctgtttcccctgttttgttcattggagataataaagttgcttcctggagacgactgggtggcctccctgagtgtgtgaggataggagggtgaggaccatctccctaacttgtagttgtcccctagaatgggacgtgccttggcccagctgaggtggctgccccagaagtctgaggctgggctgcgttccctatcctgaccggcccggggccctctccacccacctgcctgtggccttggggtcaggctgctgaacccttttttttttttttcccccgagatggagtctcgctctgttgcccaggctggagtgcagtggagtgatcttggctcactgcaacttccacctcctgggtccaagcagttctcctgcctcagcctcctgagtaactgggactacaggcacgcaccaccacgcccggctgattttgctgaacccatttctttctgattctagggaactgggaacagccaggtgccccaaagcaaatacgcggagctgctggccatcattgaagagctggggaaggagatcagacccacgtacgcagggagcaagagtgccatggagaggctgaagcgcggtaagcccggccccgctgccctgtcggtgaccacagtgctagacctttaactctggaaagacttttggggaaaatgtgggaaggtgggctagggatgaggctcactcatgggagctcctgtcttgttacagagttgccgtctgtggtggaggcctcaggcaggcgatgggtctggtagcgaggggcctggggggctggatgtcttcagaggggtcttctgggaagggcagcccaggcagggagcccttcttaccctgtgtgctgccagggggtctgctggctttcaagggtgtgttcgaagtgccccctgcccccgaccctgcctggtctgctcctgtgggccgacactggtcctagggaagccaagctcagggttcatcggtgcctgcactgccctctgctgtcacctctttggagggagacccaaggaagtgtgtgggtctgtgctagggtctggggagggaggctgagagcactttgttctttaatggttggagagggagggcaggcaggagatgacagagcacaagggactcgtgttaaggtgtgactg

SEQ ID NO: 72099 - DNA, 1004 bp, Homo sapiens
atcgcgccactgcactccagcctggaggacagccagactccatctcaaaaaaaaaaaaaaaaaaagaatggctgcttgtagtggctcatgcctgtaatcccaacactttgggaggccaaggcgggtggatcacttgaggccaggagtttgagaccagcctggccaacatggcaaaaccctgcttctacaaaaataaaattagctgggcatggtgccacgtgcctgtagtcccagctacttgggaggctgaggggcaggaggattgcctgagctggggaggtggaggctgcagtgagccatgattgctccactgcactccaatctgggtgacagagtaagacccagtcttagagggtaaaagatgaaagcaaactttggatcgtgcctccgccagcccccttgtgtttttctgttagaattccaggctgctttgaccttccttcccttggggttttgctctccctcagtcttgtttttgcttcaccttgggttggcctgggccctgttgacatttgagccaagtcattctttgcagtggaggtatcctgggcactgtcggatgttgaacagcatcactggcctccacccacagatgccaggagcacacatcatccccacatttttaacaacccaaaatctctccagacgttggcaaatgtctcctggggggcaaaatcaatcctggttgagaatcactgctctaggcaaattagtcatagaggagaaagctggttgtgtgtgtgtgtgtatacatgtgcatgtgtgctttttacatatgaacaaagggcaccacccccgagatacagaagatacaaatgttaactggctgggcgtttggagtatgtacaatacaatttccataagtatgaatatttatcagctagtcatttgagagcatgatgtaaagaagccatctgtggaggcctttatgagagagaagaggctaaaagaaatgtgccgaatgcttatttttagagtccgattctcagtaagttggctccatc

SEQ ID NO: 72100 - DNA, 2426 bp, Homo sapiens
acctacaaatgatgagtaatttacttgcaatgaacacaggtagcctgctgctgtttataacctgttgaggatatttatagcaggcaggaggcaggcctagtgtgttattgacaggtgactttagagaatgtacattggccgggtgcggtggctcacgcctgtaatcccagcactttgggaggccgaggcgggcggatcatgaggtcaggagattgagaccatctcctggctaacacggtgaaaccccgtctctactaaaaatacaaaaaaaaaaaaaacttagccaggcgtggtggcgggtgcctgtagtcccagctactcaggaggctgaggcaggagaatggcatgaacctgggaggcagagcttgcagtgagcccagatcgcgccactgcactccagcctgggcaacagaccgagactccgtctcgaaaaaaaaaaaagagagagaatgtacattaaggaacaattgtcctccaaaagagagccaagcaactgctctggagcctcctaggctgactctgctggagggtgagacaagcagattcccattgcagcactggtccctggggtaccctgaacggctgtgctctccacccttgtatcggtgagtggatcttgtctacatcagccgtaagcctagaagcagagcgggatcgaggcgtttttaataattcgagttgggaagacccggatggttcatcaaaatgatggtgttgagcacccgggaggcagacattgggtatttgttcacaattttgcacctgtaagaaaatgttcctttataactttcaaggattgccgtgagcgtctttggggccttttcattcatgtacaagtttcattcattactattcaacttggtagacttggtgaaaaatgtaaaagcattctgtatttggatcagtcttgggaactaaatttgtcgtgaattggggcctgtcacagattgcctccagtgtgcatcctccacgcagaccctccttgctcagtctccctctggcgcccatggggaagccgtgctgtggttggcagtgcggccatctgggctgccgcaacgtggcagggcaccgtccagcaagactgccccttagtgcagggctaagcaaggaaaagaagaagcccaaaaaggcgggttctttttgatacttgtaattcaggcgtcctccagagtgaaggccactctgcaggcccctggtgagaacctgtctggcttttccactgcgggcccctaaccagtaccctgcccttgtggcccatttgtgcctgggcagatgtttctggccagcagacactgaaggcctttttgctgtgacagtatttatggcactgaagaggataaagaagcttgagccctctttctgactcccactttatggggcagagagagctttttttctacatagcacattgcagtctcaccgctatcagaaaaatatcctgttcatggtttatactgaatttgcaaactactgatatgatttttcaataaccacttgtatcttccatcatccatgagaggtgggaagaggtacactgtatctctgcaataaaactttggccaggttctacctcctctgagcaaaggatacttttctatgtaggtgtagatggttctcctttactaatctgacatggtgcatctggagacaacatctgatgggatccaaagacaacttgaaacaaaggtggatgtcagctcttggtgtgttttcatttggttctcttttttaaatctcccttttgttatcgctcctgttgtagcgtgtccatcagtgtgtgaagggtgcgccctgttccaatgatactgcattgctgcatccagcctttcgtgggagcacggtaccaagcgtccggaattgattatcccaatcatttttgatatgtaactgaaaaatttggtctcatgcaataaaaatgtactggctgcattttagcaaggtttatttactcttgcaagtaaaaacgatcaaccgtgaagcgtaacaaattctgtatttagtttttttttctgttgtggtggtttttgttttgttttttgtttttgtaagattctaaataaattaaatacgagtcacgggttgtgctttctttgcgcgctgtcttcgcagatctcatgaacatcttcatagtgtctttataaaatgtaagtgctgtcaccgtgcctttgcagatggcacaggcactgagtcagggagccagccagggtggggcggtgcccagcccaggtgcagtgtgtgggcccggagtgggctgctgtcttggactgctgcggaaggcggtgggagggagaaagggctgggatgcgagtgggaatctgagcagcgtttagtgcatggcttgtctgggagtttctctgtgattatttcaaatacttgggagaaggatgttcaaattttagcttgaaatgcgtaagggtattcgatca

SEQ ID NO: 72101 - DNA, 5272 bp, Homo sapiens
atatatatgcatgcaatttatctggaacattgagccttcaatcctacatgcaggacttaaagttcccttaaccagcacccagagagtatcctttccagtttgctagtatctgctcttctaagttaacctgtttcggttagcatttgaatttgcaacttctgttctgtagtcttttggtgcattaaaagataatacatagaataatagatattcttaacctcctgttaaaaagagaataatagatattcttgacttcctattcctccaacaagatagcattacactaaacacatgcatatgcttgggtatttgtgggaaatgctgtggaagaatcagactacatctcaatggccatttcatttattaggtagtcgtttaatttttgtgtgaacttcttgtccattacgcttaatattatgcctcatttggaatctgctgtgaagctgtacagtgtggtttcttctggacacaacttgataaattcttgttactaattacaggtttgatcattccggcaaattgtgtgtctcctcttgtaaatctcctatcaacttcagaccagtctcaacagcttgcggtccaacagaaacagctatggcaacagcatcaccctcagagcatcaccaacttgagcaacgcatgaagaacagacaggtttcaacatggatggatctgaaatgctgttgaagcatatcatttgcataaaaatcagggacagtttccaaagaattatatatttttttcagttgtgctctctagttagtttttttgggagtaaggacaaacctggaatagatagcaaaactgaaaatcagcagtgctgatggtggtacatatgtctttcctttagcttctcccctgataattcccatctgcttttacttcgggtgagcagagggggatgtgtgtgtgcgtgtgtgtcagtctgtttgtgagtgtgttaaaggctacagaccacagttggtttaaaatgcttggaacttcccaaactggctttactttatgtttatacagtgctcagggttaacgcagtacatccatgccattgctgtgggaggtatccccggatgcatgtgttttgagtctataaatatagaaaatatatattggtttctttttccaacttaataggtttattaaagcatgaaatgaaaggttgcatatcatgcattcaggttattttctaatttttgttctgacagtgcatgtctttggaagcatgctgaaacaagattaacacaggagtcgagtaacagagagaaacatttgttagatgtacagcattggttattgcatttttatagtgtttatacctgggtattgcttcaaaccctgcagacccctccttccccttctccctgccctgggtttctggtcaaggtaatgaatacatacatttttctgtgataaaactcttaaaagttaattttaatgtattaatagtattcctaatgtgtgctgcagaaatggctatgagcctcttaaatttacatttgcaacttaaaggtagttttagaaggaagtacaaattggctttcatcttgcaaacaatcgttttttacttcattatcttaatttgctttgtcactcataaaaaggaaaccatacctgagttgtagacaatgaggaaacacttgaggcttctgctgtgtgttcttttgttattgttgttattgttgttactcagtaacttgaatattgtttaatgtgttgtaagacgtagagtttatctcaagctgttaaaaatggtaatgtacaaatgtgaatagacacttatctatataatatgggtaagttttgtttcgcctataatagatgtttataaaaacaagtgaggggacagttggtctttttatcttttctttctttttctttcttttctttttttctttttttttttttttttttttttttttgcttccacaggttgcactattgaaaaatcgagattgtataaacctggtaaaaagctgcaagatgccaaaatcttgtagatgtcaaataaaaagttattatactaacaagaagtggactcttgtttaggccctcactggtgaccttcagaagtagtctgtgacggggactcagcagaatttgtgtgttgtctcagcattccaggtagccttatagtttggcttaaaacttatccctaaaatgtaagatggcattgagggaaagggtataatgatagtacttctgaatgttttttaagttgaattgtttgtaaacttcttgcagaattgggtgagatgtgtgttaaaactgacaaacctggctgaaagcttagggcgttcatcctcttgtgtctcctttagcctgagtttggttatgtcaagcttaccgtaagttttcttaggatttatttattcttggtgcctaaaagaataaattgaaagtactttctgttctttggcacattttgcccagcggatgcaacttctatcctcagtccagttcatatatctcaggcagtgatccattttgtatcagccagtttcccttgttagggccgctagacccggctggcagccaagagcagcactctccccaccttcagcagaacttctcagctcatgtgtgtgtttttaaaagcagtaggcagcttccatcagcaatggaagtgtcccccactccagtggtggaggtgcagtcgctggacctgaggaagtggggaagcattacaaaccctcctgcagtaagaatggcagagttgggaaggatcttctctcgcaggctgttggcccaactcctcttttctgtgtatgagggcatcttagttttttatggcgttttcaaagcagcatatgaggattcttagcatgcagctaagtgacaacccccatggcctatgatgtaatgtttgctctggactagccatcttgataaataggagtgtatgtatcttaggttctttgtagaacagctatttttttttctcattaaaaaggcctctgaaagccctctcaaaatggacctcacaaaggcaaccagtgtgaatggatgggagctggggtgctgcatgcccaggctggtcatggtgtgtgcagcacccagagagttgcacccaccccttcttcaggtggacatccgacctttacactgtggtcttgcaaaaatcagcgagttagtttggccgccctgtgaagcttcagcattcaaggtcctcttctgttaaaacccaactcgtagccgggcgtggtggctcactcctataatcccagcacttcgggaggccaaggcaggtgcatcacttgaggccaggagttcgagaccagcctggtccacatggcaaaaccccatctgtaccaaaaaatacaaaaaatttgccgctgacttctgtaaaataggtccattcattgcaggatctaaatgccacacctgaattcagaggccttgtttaattaaccccatgtccactttgcctctgcaatgcctttttctttttagcaatatggctctgagcacaaagatttggttggaaatcatgttcgtgttttcagagtttacagcgtcaattgtactgaaaaccacttccagagtctaaagcagctcagatgttatctctgggggaattagtgttcccctcatttagcaacctccataccacaaggtctctgtctgtagttactgggattatccagatacactatcaatgatacaaattcataggagtattaatgcatttctttaaacacaacttgattaagaagcaaatatgttaagcagttttctttttctgctgctaaattacagttagacacttcagtatcttctctttacatgtgtatataaattagtaagaacctgcatccaaagcaatgtagtgtgtgtatgtatctatatatatttattctaactcagcacttcagaagcctttttgagttacaacaatattttagtttgcctcatctgtagaggtaaaatttctatattaccaagctccagaggaatatgatattttacaggcacaattttctggctgtagtccctggggcattcatttgctggcctccatgggatgctgttagaacaattgttagccggcaagagaagaaaggctaccaggacagcatttataattgtagaatgggagccttcttccctctcccctccactttcattttagcatgagataaaaaaatagattggaaatgattgttgcatctcacttcatggaagtaggggcagaagttccctctggatccttttcttgacaagcagtcaagaggaaggtccccatacacatgtacctgtgtgatacttggtagtttctaagaatggtgctacataagcgttgctgttaggctgggatcctattaatgaacgtttgattagttcaggcctcccaatggcaaaggcagacaccgtggagatggacatttactgactccccttctgtgtggcttcggtctccctggctaacaccacacctgtgcgtactgcgctcggcccactttgctgcagaaacgtagcaagcgtttcatgtcagggctacagctgagagcaaaaactgcaaaaaaaaaaaaaaatgtctcattgaatgccagttgtctgatacaaatgcagtgtcttttaagtgacagaaacacacctaaatacctgcaactcaagctcgctagcattttttttttgagtacttgagataaaatccaaaacccaccctctaattttgtgctgtatttatatatatgtacataaatgtatatatagagaaatgttgagttcttctggattctgaatgtaaataattcttgtaaattgggactctgcccacctgtttctcccttttccctcttcccttcagctctatttattcttttcttgactttcccatatggggcatcttatgacttttttttttttttttttttaagaaaagtatggaaaacttttcatttagaaaagtatttgttcctgtattttagaattcagttttgcatctttgctgtagaattcctgttttgtgttaatgttttttactatgtcttattgtgttgtgtgcaatgcattgtactggggggatgcacttgagtgccatttctgatactgtcattgtatgactgctgatgctcgtttatgttgttctttggaagctatagtgagcctgatgttttcacattttaaaaaatgcttcctgagacttctttaagctcctctaacttcttcagtgcatttgggatcaaacttagctcttagatcagcaaacctgacttgcttctacttttgcaatttttcaggccttaccatatttcttatctctgtcttcccacct

SEQ ID NO: 72102 - DNA, 1066 bp, Homo sapiens
tcccggccctttgggaagccaagggtggatcacctgaggtcaggagtttaagaccagcctgcccaacatggcaaaacaccgtctctactaaaaatacaaaacaacaacaacaacaaaaaaaagtcccagttactcgggaggctgaggcaggagaatcacttgaccctgggaggcagaggttgcaatgagccgagatcgcaccactgcgctccagtctgggcaacaagagcaaaactccatctcaacaaaaaaaaaagaaaagaaaagaaatttgagttgaccttgtaaatcttttagaaacgtgtctgtgtgcatatatagacactcatatgtatttctttcccatttttcttaggcgcggcaattgcaaaaaagcaagcttggggctagtttgtgaaataggtcttcgttgccgtacatattatgtattatgtggttcagtgctgagtgtctggacaaaagttgagggtgttctagcatctgtcagtggcacaaacgtgaagatgcagatcgtgcggctaagaacggaagatgggcaacggattgtaggtgagtctaatttttgttttggtttgagttgcaggaaaaaatcggatccgacttttttctcattgctaatatcttagctttattccacatgcatctaacatctcttccagtagtgggtatgggacccgttttatatttcttacaaggttgaacagaagttaagccttcaaacagacattgttggttctggttgaagttatgatgtggtcatctctttgatgctgctctcagctgctcttgctctccttctctactcttggtggctgtgcaggctccctggtgtgtagacagttcagcctcttgcccaggagttctccattgagctaacttaagactctggaattcaaaagccactgtgcacagagaatggcttggtgtcctgcagggagcaagggtagactaggccagctattctcaccgtgtgctcaactacaggtgtccaggaagcagggcagcaactggactctgtttgcttatcttggtttcgcttacagcagccttcctctaccacggattg

SEQ ID NO: 72103 - DNA, 1015 bp, Homo sapiens
tttgaaacagcttatctcttcagtaaaggaagcttccagtgctaatcacaaaagttagaatgtttaaagcccttctcactacctcttagttttattgtgaggatgcctctatgtttatattttgcaatgatttatagaaaatgttaagcgaccacttttcctaacatttactattaggttttattttattaatattaccttatattattatttgtagccattctgatttgaaaacaattatagttaagtagttatttgaaaaatgtattacataagaggaaccagcatgacagagcttttcaaatggcgttcagattcagttaatagcaagggttaggctttttgtgtagagattattttaaattggctacctctagaattacagaccagactaggtaaccagtttatttaaagcaatactgttttcaatgaaattcttctcatttttacaggtcgtctcagatgatgccctgatgcactggttagatcagtataattcatctgcagatacttgtactcatgcttattggttagtattttcgtgtttcctaccaaattttccaaaatttaattgagatttaaatacaccttcactctttatcagtatgtcctcatgaattaactaacagattaagtattgtcaggcgtggtgtgttccatcaggaatatttactggacagttgtagactagaaactgtttagtttatgtacctccttactcttcactgatgctttcttatttccagccaactgttgtctggcagcatgaccttaacagttatccttcatattagaacttgctttttcacggctgggtgtggtggctcacgcctgtaatcccagcactttgggaggctgaggtgggcggatcacctgaggtcaggagttcaagaccatcctggccaacatggtgaaaccccatctctactaaaaatacaaaacaattagccggtgtgatggcaggcacctgtaatcccagctacttgggaggctgaggcaggagaatcgcttgaac

SEQ ID NO: 72104 - DNA, 1225 bp, Homo sapiens
ctgcagtggtgctaattgctagagagagaaatgggcagattacagccttgttgtgaggacagtgtaagagttaagaaggaagacttttagaagagaaagtgggacttgaactaagcctagatgaataaaaaatttttaattatcatttgcatgaaaacgtttatcttttgtcattacagattataacaacataggaaaattcttaaatagaattttaggcatggaggtgcatcagcagaatgcgttatttcagtattttgcggacacacttactgcagttgttcaaaatgccaaaaaaaatggaagatatgatatgggaatcttaggtaagtagggaaaatttcccccccacaatgtccccagggaaaatgtggagtggagaaattctttaaacgtgtgtacctgataaaaatgttctttttacatttacatgtttctttttcttgttcaagatcttggttctggagatgaaaaagtgcggaaaagtgatgttaaaaagtttctgactccaggatattcaacctctggccacgtagaattatacacagtaagtttagaaaatgttgtgaagtatcgtcttcccatgagatgcatttacagaaatgagtttaaatttcgttgtttctcttacagattagtgtagagaggggaatgtcatgggaggaagctaccaagatttgggctgagctgacaggaccagacgatggcttttacttgtcattgcaagtacgacttttcctttaaattctattcagatatataatactttttaatggccagcattgtaattgtctcttcactttgtacctgtttcccagttgtgtttagctttgtctattttggtaatttatcattgtaattgtgtgtttgtccatttgtgttatgtttttacttaatgcattttaaaggatgttattaggtgtgggtttagaattgttacattttcttctttttttttctttctgagacagagtttcgctctttgttgcccaggctggagtgcaatggcacgatctcagctcacctcatcctctgcctcccgagtagctgagattacaagcatgtgccactaggcctggctgacatgtatttttagtagagacggggtttcttcactttggtcaggctgttctcaaactcccgacctcaggtgacctgcctgcctcggccttccaaagtgctgggattagaggcgtgagccactgtgcccagcctaattttttta

SEQ ID NO: 72105 - DNA, 1050 bp, Homo sapiens
cactttgggaggccgagccgggtggatctccggaggttaggagtttgagaccagcctggccaacatggcgaaaccccgactctactaaaaatatgaaacttagcctgtagtcccagctactcaggagactgaggcaggagaattgcttgaacccgtgaggcagaggttgcagtgagctgagatcgcgcactgcgctccagcctgggtgacagagtgagactccgtctcaaaaaaaaagaaaagaatcttaacatgtataatgaagagagttaatacagtccccttaaccctccttccattctcaccttcttaggtcacagatgacagagtgaacaagggcagttctctccacattttctccatgtttatataaatatcaaggtgtttttttaaaatggcatgatactacttacaacatacttttctcacttagtggtacattgtagacatcccttgtaatttatgagtcagaattgatcctgttcttacagatgttcgacaaggactgataggcgttggcctgataaatgtagaagatcgctcgggaattcttactctcgataaaggtactactattagctttgtgtgggcatataactgttgctatagtattaaagtccattatgatatatgcttttgagctgaaggggaagcttcatgttcttaaaacattctgggtggttttggctgctgtggggtatgtgtaaaagatccatgcatagagaagcagttttcagcactggctgctgatatgatcagctctcaagcttttaaaaattactgaagtctgctgggcacggtggctcacgcctgtaatcccagcaccttgggaggctgaggtgggtagatcacaaggtcaggagtttgcaaccagcctggccaatatgatgaaaccccatctctactaaaaatacaaaaattagccgggcctggtggcgggtgcctgtagtcccagctactcgggaggctaaggcaagagaattacttgaacccgcgaggcagaggttgcagtgagccgagattgcaccactgcactccaacttcggcgac

SEQ ID NO: 72106 - DNA, 1026 bp, Homo sapiens
tatctcgaaatctcagatcttgcatttaaggagtgttatatatatactttatagtatatgatgcattgtggattcattttttgcttgtttacaagttgtaaaaaatatatatgtggtgggaatttgtggggttccaagaacagggttcctcaaggagtgtccttataaaacttaaggatgtattaggtccatatcagagaagctgctacttctatatgtgtttccaacctcagtagcttcaccaaaggcccatagctcctccctccatcttcatgttcttgtgaccaatgatttgaaaaacaattttgggaaaatccagagtaattgtgcatcagtaacatgtggttaagcaaaattggggtagcaatgctaatacttctgtcattgagcagttttatgtgtgttatggtaattttacattatctgtaatttttattgtttagtggtttcccaataccagtttagtgttaaatgctaggaatacatctcagaatattctctgtccagcgaacacaatcaatgatctttaaaacaaaatttcgttgcaggacgtactcatagatcaaaccaagttactgctcctgagtatgtctttctgatatctgaactggcaggagaacaaagatttgcatctattgttgctaaaagacttgagagtttggtgagttttggagttgtgtggctgtgtgtaaatgatgatctattgtacctgttttctggtaaaaggttacctgtgccttgattgaaatttttgtttttaacagggggcacttacacatggtgatagaagggcaacagaatctagagatctgagcaggttcaactttgataataaggtacatttcaattttcagtatctctgaaaacttgtgatagtgtatggtgtctttcgggaacacaaaaggaaagtagttactgtctaaaacaaaactgcctctcctatgcatttgctttaaaatcatggcttcctataagacagaatttcacatgtatgttagatcgcatgttaagtatcagtacagcaat

SEQ ID NO: 72107 - DNA, 1062 bp, Homo sapiens
tctctcatggacacatttgggtaggtggagcagggcttgtatgccctcttgaagtccaggcatcttccgtgttgttcattaaattatgtgggcctccatttccaagttacctttgtattccaagatacctgttccagactcttgtcagtacctctacattttacctaacagagaggagacaaggggatgagaagggcatgtcgcctacttttaaggacatttcctgtgcatcatacattttacctacaccttgctggctggagaatgttcacacttagccgtaagggagactgggaaataaaactggaagtcttcattattgagaaagaaggagagaataggcagtctgctgaaggacttcatttaaggcactggcctgcttgttcttatgcaaaagtgactttatttttcttatatttgacacagaatattgctatcatctcagaagctgccagctcgggtatttcattacaagcagataggagagctaaaaatcaaaggcgaagagttcatatgactttagaattaccttggagcgctgatagagcaattcaacagttcggtaagttcctacaaactggatttcacttaatggatagctaggaatcattggggtaaatttgcgcataccaaaacctaggtttaggccgggcacagaggctcacgcctgtaattccaacatttcgggaggccactgtgggaggataacttgagtccgggagtttgagaccagcctggtcaacgcagtgagaccctttctccaccaaaagaaaagaaaaacagctgagagcagtggctcgtgcctgtaatcccagcactttgggaggctgaggtgggtgcatcacttgaggtaatagtttgagaccagcctggtcaacatggtgaaacccagcctctactaaaaatacaaaaattaactgggtgtgttggcacacacctgtaatcccagctacttagggtgctgagacgggagaattgcttgaacctgggaggcgcaggctgcagtgagctgagatcacgctattgcactccagcctgggcaacatagggagattccatctc

SEQ ID NO: 72108 - DNA, 1797 bp, Homo sapiens
gattgcgccattgcactccagcctgggctacaacagcgaaacattgtctcaaaaaaataaaatttcaaaggttgtttcctttgaagattctgtacttgttttaacaaatgatttgacatgtatctttccttaacactcagatccctggttaattagaaaagaccacaagaaaaacaaagagaaaaaaaagaagaaaagtatagatccagattctattcaaagtgccttattagcatcaggtcttggatcaaaacgacctagtttttcatctacaccagttatctcacctgctcctaacagtacaccaggtatccatacagaaacttcctttttgaaatactgttttaaacaaaaatatttaaactttgtactaacttttagcaaatgttctttatctagctaacagtaacaccaacagtaacagtagccttataacaagtcaggatgctgtggaaagggctcagcagatgaagaaagacctgcttgataagctagaaaaattagctgaagacctcccccctaataccctggatgaacttatcgatgaacttggtggccctgagaacgttgctgaggtaaataggcctgtatctcttggtgacatttttgccatttgaacccctgtaaaatgagttgtattttgactgtcttcacataataatctaaatttcttagatcatagaattcttgttctactttagttgccatcctacatccaatgaactgctgcctgcagtatctgagtgtctgtcccaagccactggtcctagttactgcacttatcacgcatcttttgtgatcgtggccatgtgtcaaggtttttccagggactctgttgcagtgttctgtatccttcagtgtgtggtgcagcacagcctgtgctcttatctcccaagtgtcttcaaggaaagaggcactgagtccatccaccgcagtcagataccttcattgtaatgacattgtttggcttctcagatgactggccgcaagggacgggttgtgagcaatgatgatggaagcatatcttatgagtcaagatctgaacttgatgtgcctgtggaaatactaaacatcacagaaaaacaacgatttatggatggagataaggtatgttttactgagatgcttctcagtgaaaagaacaatgcctgtatatttagattaagctttagaagagtctttttccttttaatataagtcatgtccattgagtattgtcattctgtattttttagtaattgtacatactgaatattgtacgtgtttttattattttatcattgaatatagtaagtattggctgggtgcagtggctcaggcctgtaattccagcactttgggaggccaaggtgggcagatcacttgagctctggagtttgagaccagcctgggcagcatggtgaaaccccgtctctactgaaaatacaaaaatttagctgggtgtggtagtgcatgcctgtagtcccagctgctcagaaggcagaggtgggaggatagcttaaccctgggctatgcaggttgcagtgagccgagatcgcaccactacactccagcctgtgcaacagagctattacacaaatttttttagtaattgcctttactcactgaatattttgcatgtttttattattttatcattgaatataataagtattgtgtgtaatgcatagaatcagatatggctcttgagtgctttggaggcttttgaaatatttaatcatgatataaaaatactgtgttttctccaggcgtggtggctcacgcctgtaatcccagcactttgggaggccgagatgg

SEQ ID NO: 72109 - DNA, 1084 bp, Homo sapiens
gccactgcactccagcctgggcaacagtgaggccctgtctccaaaaataaaaaggttttataaattgattttctattgattttctaagtattccatgtctataaacctgtaattattaggcctcttctcaaatctgatacacagtcaaattgtgactatgccagaggttctgcttttactctgttgtcctgaatatgttttgaaacttgtgcacttgaaggcagtcttgacttagtacttttgtatccaatttcttcttcagaataaatgtttataaccttattttttatgggagtccaaaaggttagtgctggtttgtgaattctgtttgttttttgacttaacctaaatacttttcctctgcacttttcatttgaattaattcatgaactaaatgtgatgtactggatcttaagaaacattgaatttgggctgactctcttgtttgtggcggagggtaggtgaagaaataactcgagaagccaaaaaagcacgaaaagtaggtggccttactggtagcagttctgacgacagtggaagtgaatctgatgcctctgataatgaagaaagtgactatgagagctctaaaaacatgagttctggagatgatgacgatttcaacccatttttagatgagtctaatgaggatgatgaaaatggtaagttcagtatattaaatatacacgaaagcatataatatttcagtatatttgaaaatgggatatgaaaccttttcttctgtacagtacaaatgatcacacagattataatctttgcttggtggaaagctccaggcttatctaccttctggaagtttgagcctcatatatgtgagaagataacctcaattttgtgcagttatttttaacttgaaaacatggatttgtaccccatggtgtatggatgaaccaatgtaggtggtgataagttatcagttaacaatataaaaaatttcatccaggcgcggtggctcatgcctgtaatcccagcaatttgggaggctaaggtgggtggatcacctgaggctgggagttcgagatcagcctgaccaacgtggaaaaaccccatctctactaaaaataca

SEQ ID NO: 72110 - DNA, 1060 bp, Homo sapiens
ctagccaggcgtggtggcgggcacctgtaatcccagctactggagaggctgaggcaggagaattgcttgaacccaggcggcggaggttgcagtgagctgagatggcaccattgcactccagcctgggtgacagagagactcggtctcaaaaaaaaaaaaaaaaagaaaaaagcaagacatacacctgctaatctatatttttctgtacataattgcctagaactaccgtgtccagaatggcagccgcttgtcacatgtggctattgagcagttgaaatgactggtccatattgagatgttattatatgtgtactgagccaggtttcaaagactccttaagagaaaataacataaaacatatgtgttgacatggtatattgagttaaaatgtattattaaaattagttccaccagttttatttattttttacttttttaatttaagctaccagaaaatacaataattgtgtatgtggtttggcttgcattcttattatttagttggacagctttgggctagaaaattaaaatttatttgagctcgtttatcagtattttgtaaaactgaacaaagtatatttcaatatatttaataatactttacatataattattttgtcaactgaagcagtaattgtcactgtttctctcctacagaggtgtgttgcagtcactcattgaaaaacattttcctgctccagacaggaaaaaactttatagtttactaggaatcgatttgacagctccaagtaacaacagttcgccaagagatagtccttgtaaagaaaataaaataaagaagcggaaaggtgagcactttaaaaaagaaaaaataggccaggtgcggtggctcacacctgtaatcccagcactttgggaggctgaggtgggcagatcacgaggtcaggagatcgagaccatcctggctaacacggtgaaaccccatctctactgaaaatacaaaaaattagccgggcatcgtggtgggcacctatagtcccagctactcgggaggctgaggcaggagaatgtcgtgaacccaggaggcagagcttgcagt

SEQ ID NO: 72111 - DNA, 1029 bp, Homo sapiens
gtgatacattccttaactcattccatttagatagtgtttgatgagtgtcataaagccaaaaacttatgtcctgttggttcttcaaagccaaccaagacaggcttagcagttttagagcttcagaacaaattgccaaaagccagagttgtttatgctagtgcaactggtgagtatttatttatttaaaaatatatattgtaggttattttttcaactataatatatttcatttgtgggattttcaggtgcttctgaaccacgcaacatggcctatatgaaccgtcttggcatatggggtgagggtactccatttagagaattcagtgattttattcaagcagtagaacggaggtaatgcagtttacggtatatactcttctcagtagcaatctaagaagtgtgttattcctaaagcccattctctgtatgttaaaattctactgtattggtaattactgtatgttttaattttattcagaggagttggtgccatggaaatagttgctatggatatgaagcttagaggaatgtacattgctcgacaactgagctttactggagtgaccttcaaaattgaggaagttcttctttctcagagctacgttaaaatgtataacaaagctgtcaagctggtgaggaatttttcttaattcctagtgtttatttaatgtatctgataatgtttctgttagttttggcgattgcgatgcctcctgcccatgggaatgtatttctactataaaacaacagatgaagccaggcacggtgtctcatgcctcagcactttgggaggctgaggcgagcaggtcacctgaggtcaagagttcaagaccagcctggcctacatgttgaaacctcatctctactaaaaatacgaaaaaaaattagctgggcatggtggtgtgcgcctgtagtgccagctacttggggaggctgaggcaggagaatcgcttgaacccaggaggcggaggttgctgtgagccaagatggtgccagtgcactccagcttgggtaacagagggatactcc

SEQ ID NO: 72112 - DNA, 1003 bp, Homo sapiens
ggcgggcggatcacgaggtcaggagatcgagatcatcctggctaacatggtgaaacccgtttctactaaaaatagaaaaaattagccaggcgtggtggcgggcgcctgtagtcccacctactcaggaggctgaggaaggagaatggtgtgaacccgggaggcagagattgcagtgagccaagatcgcgccactgcactccaacctgggcgacagagcgagactccgtctcaaaaaaaaatccaaaactctatgaaatttatgtaaaaataaagtcacaaaatacatatacaaaacaaaaaacataacatattcctactcctaaaacagtgtatgaaagattgatcaccaaaatatctgaaggattatattaattaccagccttttgtttttcagcaacatgaaactttcctacctaatggagatcgtgctggcttcttaataggtgatggtgccggtgtaggaaaaggaaggacgatagcaggaatcatctatgaaaattatttgttgagtagaaaacgagcattgtggtaagtgtttaaaaactggctgtgggccaggcgcagcggatcacgaggttaggagatcgagaccatcctggctaacacagtgaaactccgtctctactaaaagtacaaaaaatcagccggtcgtcatggtgggttcctgtagtcccagctactcaggaggctgaggcaggagaatggcgtgaaccctggaggcatagcttgcagtgagccgacattgttcctctgcactccagcctgggtgacagagtgcgactccgtctcaatggaaggttttgttagtaattactttagcatgtggggatgggatccgccttccccatctagacaggatctttgtcacccaggctggagtgctgtggcatattcatggctcactgcagcctctacctcaggggctcaagcagttctgcctcagcctcttgagtagctgggactacaggcatgcactaccatgcttggctaattttttgtagat

SEQ ID NO: 72113 - DNA, 1029 bp, Homo sapiens
caaaaataaataaataaaaataaattagttataggcagattgacattctttggtttttgaaatatgtaaacttctgggttttttatttttatttttttagacaaagtcttgttctgtcacccaggctgaagtgcagtggtgcaatctcggctcatttcaacctccacctcccaggttcaagcaattctctgcctcagtctcccgagtagctgggattacaggtgcccgccaccacgcccagcttgtttctgtatttttagtagagatgcggtttcacaatcttggccaggctggtcttgaactcctgaccttgtaattcacccgccttggtgtcccaaaaatgctgggattacaggtgtgagccaccgcagcagccttaaacttctggatttttaaataatgggaaaataagttcagaattttcttctaaatgtaatttgactttttcctcctcagctgatgtaagcaatggtacagtaaagaaagagtcttctaataaagaaggagctagaatgtggataaacgacatgaagatgaggagtttttccccaaccatggtgagtttcaaataactgtgtctttatttttgtgtagtatgagagtgtactcaactaaaagtgttctatatggaacaaccctcagaaagctgtttttgggttgggaagaagctatacaggcgtgggaactaatggatatgcttaaacctcgctggagtaatatagatactaaccagggtggttaaaacttgcagattgatggagtgtggcactaacatgcagtactgatatcttactgttaaaaatctcatctgagcagaaaaaaagacaatgtggggttaacgaaaagtatttgataactgtgttcattttaggaccgaacttgaatagaaagctcataatgcattgacagatcatataatgatctggttatgagtgattcttttttttttttttttttttttttgagacagagtcttactcttatcgcccaggctggagtgcagtggtgctatcttggctcactgtaacc

SEQ ID NO: 72114 - DNA, 1221 bp, Homo sapiens
aatcaaatcagaaatgaagtactaatatttaggcaaggctgggcacagtggctcacgcctgtagtcccagcactttgggaggctgaggtgggagaatggcatgagcccaggagtttgagaccaacctgagcaacatagggagactcttatctctaaaaaaaatttgccgggcatggtggtgtgcacctgtagtcccagctacttcagaggttgaggtacaagaatcacttgagcccagttgggcaaggctgcagtgagctatgatcgcacttcagcctgcatgacagaatgagactgcttcaaagaaaaaaaaaaagcaataataaaagtgcattttagatttttagttgtccttccaggtttgtggatataagcttcattagagaatgaagcatttttcagtggtgtgttttttgttttctatctagcagcagcctccatctactacaacatttgtgctgaatcaaataaatcatcttccacccttgggatctacaattgtaatgactaaaacaccacctgtaacaaccaacaggcaaaccatcactttaactaagtttatccagactactgcaagcacacgcccgtcagtctcagcaccaacagtacgaaatgccatgacctctgcaccttcaaaagaccaagttcagcttaaagatctactgaaaaataatagtcttaatgaactgatgaaactaaagccacctgctaatattgctcagccagtagcaacagcagctagtaagtctgttttcaatagtatcaactttctctctctggtaagctatgtcagcatgtttttttaaacgatttgcttgggtttttaaagaactggccataaaagggtgttatatgcattattttgcgtacttacagtctttaacacaattcaagggaagcaaaagtttagatgccttgggtaggttgtttagctttgaaatgtgatttctaggatcatcaggtagctacgttagcaacatgaaatcttaccagttttatatattataggtagtcagttaacatttttcttaatcctttacaaatcctttacaaatagctgtttacttgtgactcatctgtggatcttgtttgaaagcagaatctgattctcagtagagcccacaattctacatttcttttttctttttttgagacggattttcagtctgtcacccagactggagtgcagtggtgcgatctctgctcactgcagcttccgtc

SEQ ID NO: 72115 - DNA, 1091 bp, Homo sapiens
aggtgatccacctggctttgcttcctggcgtgctgggattacaggcatctggcctccagccatagtttttaaagtgtgtcaaattctttcatacctctatgttttgaatgcatagtcgagaggatccttgtccacctgatgattccctgatgctctgctgcattgtcatctttataacatctctgcttccacaaagttcattatttccttctctgttcccgtagccttttgtagatgcatacttgtgctatgatttatgtacttctctatcctttctattttagagtgagcttgggatccaagactatttctcttttatcctctttgtctgagacatggcaggttcttcattaatactgaatgaatgggtctaatagagattgttggattgtttatatttagaggggagttaatatttgtcactttttgttttttatgttaatatttaatatttccctttaaagatggtggagccagggcaagatttactgcttgctgctttgagtgagagtggaattagtccgaatgacctctttgatattgatggtggagatgcagggcttgcaactccaatgcctaccccgtcagttcagcaggtaagagttttccaaagcctctctttcttagtgatttccgcttacagtatttttttttaagatagtctcactctgtggcccaggctggggtgcagtggtgcagtcatggcttactgaagcctcaacctcccaggctcaaaccatccttctgcctcagccccccaagtagctgggactataggcacgtgccaccacatcccgctaattttttgtcttttttgtagagacagggtttgccatgttgcccaggctggtcttgaactcctgagctcaagcgattgccaacctcggcctcccagagtgttgggattacaggtgcgagccaagcttggcccaattttaaatatacatgtgaagccttaattttaaatacatgtgttaatttttttttttttctgagacggagtcttgctctgtcacccaggctggagtgcagtggcgcaatctcagctcactgcaacctctgcctcctgggttcacaattctcttgcctca

SEQ ID NO: 72116 - DNA, 1019 bp, Homo sapiens
tatttttattattttttattttattgttaagaaacagggtctcagctgggcatggtggcttatgcctgcaatcccagcactttgggaggcccaggcgggcggatcacgaggtcagtagatcgagaccatcctggccaacatgatgaaaccctgtctctactaaaaatacaaaaattagctgggtgtggtggcacgggcctgtagtttcagccacctgggaggctgaggcaggagaattgcttgaacttgggaggtggagggtgcagtgagctgagatcgcgccactgcactccagcctgggcgacagagcaagactctgcctcaaaaaaaaagaaaaagaaacagggtctccctttgttgcccaggctggtttcaaacttctggactgaagtgatcctccttccttagcctcccaaaatgctgggattataggtgtgagtcaccgcacccagctttcaaatgtatttatgataaaaattgaactcttttttttgtccattgtttgagagagagaccttccgtggttagtaacttgggtttgtcagactgctccatggtaaatgtcatctgaggtctatgaattcctttgtagacacactaacacagttctcttgtacctaacagtatttagcatttatatggtgctttgtgacttaaaagtgaaaatgtttttcctcctatgaacaggtcttatttgtaaaatgaggaggagattggctaatacaagtttttaagggctctctcagtttgagcaccaaaattctgtgagtctataatagtttctgaatagaaatataattacatactaagggttttgcctaatggagttagagaatgggatagatgttctctctctgtcccctttccctccttcaccctgcaaaaaaagaacaaatagagaatttgtgcccgtttggctgagaaatgatccctagtattccatttatgtataagatatatattaggattaaaatctctttcattagtagcttgtaaaagacagtgtcttttacagacgt

SEQ ID NO: 72117 - DNA, 1038 bp, Homo sapiens
gcttactttgagagcgtttggcataacgagcatccagagttccccaaagcagtggataccggtggtttcccagaagtggtttggggtcggtttaaccgctgaggagatttggatgttcctaaacccttctgattgtttctttcctgaccctggcatccagctcctccccttcccacccctgctttgtgcttctgtttggttaatgtttgcggaccactaacttgatcctcgcacagagaagctctttttatgtgcgtgctcggtttactgtgggaggcttttgttttggggagtcgctggttgagaaacgtgggaaaagaacgggccagaaaatgagagacaaataaagcaacgtttttatccattgaattgcgcagccaattgtaagtgcacccggaagtttgtactgaacacgtgttgagggaaggttataaactggtcccctttgacctttgaaagttggctattatcattttatgttgagttaaatgtttcatatattctagacagccagaattagggatggaatatggtttctaaagagtcatccagaagggtgcagagaactgtcatccggagtgccctagcaggaattgacttaacactttcagataattctgcgagctgacagtacagagggattctattttccaccatattttctagcaatcagaattgattttcataagcgtagggaaagctatcatcgttgcacagaagatagcagaatttcctactggtgacttgagtgggacattaattttgcaagcaagggaacattttctctcatcttttaaagaagttgtttccaaaatttttccgatgggagacgactttactttttttctctggcttctgctttttatcttccattccaacttattccatataattgcgtttggaatatttatgctatttttaaatttttgagacagggtcccactctgttgctcaagctgaagtgcagtgacgtggtcatagctcactgcagcttgaactcctgggctcaagcgatcgtcccacttcagcctccggagt

SEQ ID NO: 72118 - DNA, 1048 bp, Homo sapiens
ccctcagcaccaagtggttaatcaggttccccggggcgtgtttctgtgctgagtccctgcggctcctgccagggcagtgaactcctaaagatagcctagctcttcacatgcccaggtccttttgacctccctgttgcgggtaggctgtcttcttcctatatagaccttgggttgcagccgactctcctgctggccagctgtccccttagtgatttagagaccagcgcgtttaggaaacgtttcactggacctgggattctaaacctgccagtgctctcctgagacaatgggggctggcatcccctggtagcccagtttttgaaaaacggtgttgtctgattttcatcttttgtattcctcctcctcgtgaatgctctaggatcttcttcttcaagcctctttcagaatatgcttttgtctttttaggagaacgtatttaccgggcagtcaaagatctattcctacatgagcccgaacaaatgctctggaatgcgtttcccccttcaggaagagaactcagttacacatcacgaagtcaaatgccaggggaaaccattagccggaatctacaggaaacgagaaggtaagcttttgaaatggcctcgttctgatcccagctggtcgggttgcagaagcctctgtcctctgcaagaatgcacatatgtatttatccaaccttttcagtctcagattcgagaggtttgagccatgttctgtcttgctgctgaaagaatggcttgtcccagggtgtgtgccctgttggtttgacaggttttccctgctttcacaagagttagcatatccttcaagcttgattgtcttgcttagttgcaaaaataacatacctgacccacaattagagaggctcacaagtgctgaaagtgcagaagtcatgaattcaggttgtacagaccaggcaattgcagacctaactaatgtgttcatgtagggaactgacttccttcccttttatgagctggccttgaccccatttctttttctttttttgagacggatttccgctctcgtccctcaggctgaagtgcaa

SEQ ID NO: 72119 - DNA, 1044 bp, Homo sapiens
tttgtcaccttactcctgtcccctaatgctgtcccagccttcaggaatggagcttttgatctgagtctgcaacctgattcctgaaagctattgatcaagcaccctgccagcgtctccgtctctggtgcctctccctcacaggctctctatctcccacgtcaagatgcaaaagcctaaaacctctgcccagtgtcttggtcaaaaaatcgagctggagctaggcactccccctgtcatagcccatagcggacacggggcttaacaggccaagggcactcctgcctgacaaacccaggatcctgtcttctcaaagcttgtcttagaatgcagctggtcgtctggaaattgagagacagtacagaataaacccgtctttcccccacctccgcctgcagagaaaagaaatgctgggaacgcagtacggagcgccatgaagtccgaggaacagaagatcaaagacgccaggaaaggtcccctggtaccttttccaaaccaaaaatctgaagcagcagaacctccaaaaactccaccctcatcttgtgattccaccaatgcagccatcgccaagcaagccctgaaaaagcccatcaagggcaaacaggccccccgaaaaaagtaagtgccccattcagtcctcttcctaacgtggagcagtttggttcctctgatgccagggaagcctgctcaggtgcccatgggggttcagtggccacctctcagcctctctcatgtcaaagactcagatgccccgagtcatcagcagggatgccactgtttgtcagtttctggatctggcatgggtccagagttcaagagcctctccttcctcccctccttacccaccccagcataagcagcctttgttttttaaatttattttttttgtttgtcttttttggtgattggtgttttgtgtttttttttttttttttttgagacagagtctcttgttgcccaggctggagtgcaatagtgcgatctcggctcactgcaaacaccacctcctgggttcaagcgattcccctgcctcagcctcctgagtaa

SEQ ID NO: 72120 - DNA, 1071 bp, Homo sapiens
ctagagagacaaatcgcctaggaagactgatcaatcacagcaaatgtgggaactgccaaaccaaactgcacgacatcgacggcgtacctcacctcatcctcatcgcctcccgagacatcgcggctggggaggagctcctgtatgactatggggaccgcagcaaggcttccattgaagcccacccgtggctgaagcattaaccggtgggccccgtgccctccccgccccactttcccttcttcaaaggacaaagtgccctcaaagggaattgaattttttttttacacacttaatcttagcggattacttcagatgtttttaaaaagtatattaagatgccttttcactgtagtatttaaatatctgttacaggtttccaaggtggacttgaacagatggccttatattaccaaaacttttatattctagttgtttttgtactttttttgcatacaagccgaacgtttgtgcttcccgtgcatgcagtcaaagactcagcacaggttttagaggaaatagtcaaacatgaactaggaagccaggtgagtctcctttctccagtggaagagccgggaccttccccctgcacccccgacatccagggacggggtgtgaggaagacgctgcctcccaatggcctggacgggatgtttccaagctcttgttcccctaacgtctcaacaggcgctcactgaagtgtatgaatattttttaaaaaggtttttgcagtaagctagtcttcccctctgctttctcgaaagcttactgagccccgggccccaagcacgggccgggcatagatttcctcttccacaagctgccgcttttctgggcaccttgaagcatcagggcgtgaaatcaaactagatgtgggcagggagagggttgcttacctgccctgctggggcagggtttcctgaaactgggttaattctttatagaaatgtgaacactgaatttattttaaaaaataataataaaaatttaaaaaaattaaaaataaaaaaaaccacagaaaacaactttacatgtatataggtcttgaagtgagtgaagtggctgctttttttt

SEQ ID NO: 72121 - DNA, 1075 bp, Homo sapiens
gtgtgaacccgggaggaggagcctgcagtgagccgagatcgcgccactgcactccagcctgggcgacagagcgagactccgtctcaaaaaaaaaaaaaaagtaatacatggtgggtcagggatggagagaagcgaatgaatgaggtgtgggggaggtagaggctgtcactgagtggtcagaggaagggaggcctctgtgaagaggtgacatttgggctgaggcctgaaaaatgaagcgcgccagccacagggagatgagaaggaagggactgatgggcaaggaagaggcctcaaggtgggaatgacctcggggggaatcaaggaatagaaagcaggcaccggggagggcgaagggcgtgagtggagagtggagaggatgaggctggggaggaggccggggggccactaagacctcagtttcatcctcagcagaagtggtggatgatttcaacataggagtaaggcgggctcacctgccggtctcacttgcccacccaggcatgtcagagcgggagcgacaggtgatgaagaagctgaaggaggtggtggacaaacaacgcgacgagatccgcgccaaggacagggagctgggcctgaaaaatgaggacgttgaggctgtgagtgacacacccctgacctgcgtccaccctcccagccagtaggtgccagccagagaccagaccctccactcagcaggccccttctctccctcactctcattcttggggctccgtggggtgtggatcctgctcatggcttggcgggcccagcctggaaacttcaagtcttcactggcagagcaggaggaaacgtggcactgcccggtgagcaggctcctcccgcctcctgggaaggtcccgaggcctgggcagactttgctctgaccccaaggcctcctccagccccaccacttcatgcctctctgtgagcagacttagcagggtccagcgtgctccaggaacccatacagtgtctctgtgtaaatcagaaaaaaatgcccctttctgaaggcatgttacttccatttgttgggaaattttcataatgtattaattctagcaagacacccttccat

SEQ ID NO: 72122 - DNA, 1030 bp, Homo sapiens
ggcgcaggcggaaggggcggagcttaggcggcggtggctgagaaggcagcggggcggcggcggcggcggcggcggcggctgtggaggccgcagtccgggtcctggcttcggcctcagccccaccatggtgacgcttgctgaactgctggtgcttctggccgctctcctggccacggtctcgggctatttcgttagcatcgacgcccatgctgaagagtgcttctttgagcgggtcacctcgggcaccaagatgggcctcatcttcgaggtggcggagggcggcttcctggacatcgacgtggaggtgcgggctagctgcccgcagctgaggcttggtcgcgtggccactcggggattggtggcacctgggaccggcgcggggcctgtgtggggagtgggcttggaagtcgctgtccgagtcctggagaagcccaggccgccaccccccgccccgccccggccacggcgacctcctaacggccccttttcccgcgacttgcctgggttccgggatcccttgggggctccttcggcatgcttggttgctttgggttttctccttgaacgacgggttcctgttggaacctctcgctgagctttgtgaatcaggcgccgcgtgtcagtccgggccccaaaggcgcttctcagtcacagttagctggtggcgggtctctatccagttagcacctgccttctttcgtgttacggattaatgctggaacgtggcacggaaacttttccaaaaaattgattaaaatcgattgaggattaaaaacctattgagtgctaggcatactttcgcgttgtgtttatttttcatagaagcaaccttaaggttctactctttacgcctccagctacctcgtttagtctcttctgccaaggagagatggggagttgggtcatgcgttttaggagtaagcagtgcagtgaagtatcaggagaagacaggagtttaagaaaccagcagtccctaaatctccactcatgttttgtaaaccaaaagaatgatgtgttgctagtttttatt

SEQ ID NO: 72123 - DNA, 4506 bp, Homo sapiens
acgatctcgactcactgcaacctctgcctcccgggttcaagcgattttcctgcctcagcctcctgagtagctgggaatacaggcgtgcgccaccatgcccggctaatttcgtgtttttagtagagacggagttttaccatgttggccaggctggtcttgaactcctgacctcaagtgatctgcctgccttggcctcccaaagtgctgtgattacaggcgtgagccaccatgcccagccatattcttggtgaatttcttactgccattagacattacttataaagtctatgacttaatcttttgtgacattttatgcatttctctcttgcctccagattacaggaccagataacaaaggaatttacaaaggagacagagaatccagtgggaaatacacatttgctgctcacatggatggaacatacaaattttgttttagtaaccggatgtccaccatgactccaaaaatagtgatgttcaccattgatattggggaggctccaaaaggacaagatatggaaacagaaggtgagatgaacattcagaagatttacatcacattccaagagctaattttagttctatacatttttacctgtctgagtggagtacttattttttttaaatttcttaaccaaaacctttttgtgaaatacgctttttattttttgcaagtctcctaattaataaaaaagtttcttgaggctagtgtttgtttttttgttgttcttttttcttttatttatttattttaagattgtgtctcgctctttcgcccaggctggagttcagtagcgtgatcttggcttactgcaatctccgcctcctgggttcaagcgattctcccaagtagcgtcaggcgtatgccaccatgcccggctaatttttgtatttttggtagagacggggtttcaccatgttggccagggtggtctcaaactcctgacttcaggtgatccacctgcctcggccttctgaagtgctgggatttttttgttctttacatttgtcccttctaacagattttcttagtcattttgtgctcttgtgagcatgtaggttccatgtgtcttcagttattttttctgtttatttgctaatcctggcatatactttatttgctcatttgtatacatgactagtttagctaaactttttgttggttctttttgtgttaagatatcttaacttttctttaggtggtggagatacctgggatggtatgtggattgctttttgacagcatcctttttgcatctttttgtttgctaatgtctaatttctgctttcttttttctaacctcagtttgttggcatgagagtgtttttttctcttaaaaaacccctacaactaattggattgatattttttttggtggttttttatttcgttgacaggaggtataggttaggttattttaaactaatagcactgaaaacacagttgacattttagtagtaacatctttgttctttaagatgaatgctaaagagtggaaattcaatgataaggggacagaagtcccaattaaacatagctcatagcaaatggtgcctttgactttgtagaaagtcattttgtagacttcttaacctgaagcttagttggatatgaaatgcagttctaggagccatatgttgatatgaagacaagagttcttttagccatatgttgcagttagagtgttcattgctcaggttaccagtaataaaccctgattggttcttggtggttctggataaattgcttaccgggagccagcacatttggtggtgtttttttttgttttttttttccccacagtgcatgccagagtttttgaagctagtcattgtttcacacatttcatagtatactattagcgtggtaacatttctcccagatattcagtatcagtagagtgttaacatcataaagaagctgagttgtttggttggattttgaaatctatagaatttagagagtcctactacttagtaattcctgcactcatttttcagggccacttatagggtaggacttgactaattttcagggagaatgaggagttctgaaaggcttttttggtttattttctggagtttgatcctacttaaatagtttgaaaatgttggttgatgaatgtgaatattgaacttcttagataattttttaacatatatccaaaattcttgcttttgcttgttaatgtcagtgaatggcagctgtcaaatcaagccttcctctaaagcagtggttctcaagtgaggatgcccaggggatatttggcaatatctggaggtattttttattcggaagactgggggtaggtgctacaggcatctaggactggaggccatggaggctgctaaataccctatagtgcatcagatagcgccccacagcatagaaaagcatttggtccaaaatggagacaatgccactgctgagaaaccctgctctatcagttccatgtggtgcatggggcttccaaagggaaatttcgagtgagggacggtttgacattccaattcaactgccttcaatggtagaggcccttggtttctcctaagaaacttggggttgtctgcgagaatctggaatcccagaagagacccagtcttgggcagggatgaagagatccccctttcccaggaaggtttcctggtgctgtttctctcctgcctgtctgttcattctcataacgtggcactacctagaagcacatgcttactcttcagaacagtgccttgtgtgtatttttggttcaagagggatgcctggttgaaaacttgtgccgctaagggcttgtctctctacttacattgcctgctgttccccactatagtgaaactattactttgtcaaagaagaatgtttgagttggtgtggattttcctaagagcgttttaatgtttttctctgctcagctttatagagattaagagtctgttttggtgctgctcctgcttcttaattaatattagagttacatgactcttagactttatttgtaggattacattttaaaaatacaggtatttattttgtgctcttagtcccctctcctcagtgttttactacttttgctgtagttaatagtcagtatagtgaacttcacataacaacattccattagaagaaatttcctggggttgttttcctttccttagtaagcattatatagtatgtttcctaccctgaaagaggtttctctactgggaagggacttttaaaaatgctttgagaattaaattgacatgattcatatcagtagtccaaattgatgtttgaaccatttcaaaagtagcttcttttgcaggccttctctgaggattttgaaaagttattttatattattttatattttatatttattttataagtgtttttcaaaaagagattgccccagcctaggcaacatagcgagaccccgtctctaaaaaataaaaataaaatggtagtcaggcatagtgacgcacccctcaggaggctgaggcaggggattgcttgagcccaggaattttaggttacagtgagctataattgcaccactgtacttgagcctgggtgatagagtgagatcctgtcttgaaaaaaaaaaaagatggctgggtgcagtggctcacgcatgtaattccagcattttgggaggctcaagcaggtggatcacctgaggtcaggagttcaagaccagcctgaccaacatggtgaaaccccgtctctactaaaaatacaaaaattagctgggtgtggcagcgtgtgcctgtaatcccagctactctggaggctgaggcaggagaatcgcttcagcctgggaggcagaggttgcagtgagctgagattgagcaccactgcactccagcctgggcaacagagcgagactctgtctcaaaaaaaaaaaaaaaaagacattgacaaatgtgttttgttttcaaatccttctatagctcaccagaacaagctagaagaaatgatcaatgagctagcagtggcgatgacagctgtaaagcacgaacaggaatacatggaagtccgggagagaatacacagagccagtaagtgaatgccgtcactttgcagcagtgtctgatggtgaaggttgttttactcaacagcttgctcgtattttcctcatttggaaactttgcaaattttatgtgaaagcattgactttaaaagtgtacctacacgagatattttttgagcatacacatgtgtggagctttgtagtttattattgggacattcattgtaaactagaaaatgctattaagatttagtacaagtttttaagagtttagttttctggccgggcatggtggctcacgcctgtaatcccagcactttgggaggctgaggcaggcggatcacctgaggttgggagttcgagaccagcctggccaacatggtgaaacctcgtctctacaaaaaataaaaaaattagctgggtgtggtggcgtgcacctatagtcccagctactcgggaggctgaggcatgagaatcacttgaaccgggaggcaga

SEQ ID NO: 72124 - DNA, 1059 bp, Homo sapiens
gatgactgctgattccagtgccacagatgaacccacaaggacatagctgttccctaacttggtggatggctccagtttgcttttaacgaaaatcacaacttcaggagacatctgaaaagaatgatgtctctgaaagctgtcctttcagatgagggagaaatgaaggatttcacacttcagaatattttactaaaaacattccagtcttggccgggtgcggtggctcctgcctataatcccagcactttgggaggctgaggcaggaggatcacttgagcccaggagttcaagaccagcctgggaacacagcgagaccctctcattaaaaacaacaaaacaaaacaattccagtcttggagtagtctaacagaagaaaatgtaaaattatttgagtgtaaataatagatgtcagtatttatcatgatgggtcacatatagacatatgtacatattatatatatatatatatatatatatatatatatatatatatatatataagctcttttttctgaggctattttatagttatttttaaacataaagatacagaagtcttcttgacttctgattttcaaaaccattcctcagtatcttcaggcatttgacctcctgaatgtgcttggccctgggcttcagttatcctttgatgtcctgcaggggtggctaatgtgctggggtttttctgtgttaatagtcacagtattgttttattggtgaatagctgaaaaacagagggattaagtcatattccgggaaagagaattatagtttttatgcctcctgttgaataaatggtgtcctgattgcctgggtcttaagtgtgtaaatgtagctggacagtgttttcccctagatggcctggtcagcttgcagtattgatgcaacaccacatcagcgtctttcatagagtttatttgaaaagatgctgaatttattcccaagtataattttaaaaagctgtttaggacccaaacatatttaaacatctcttacacatacagaatttcagtttacaaatattccagaaggcattttcttaagcagtgaaccatgcag

SEQ ID NO: 72125 - DNA, 1037 bp, Homo sapiens
aatgcagtagtgtgatcataacttactgcaacctcaaattcctgggctcacgtgatactcctgcctcagcttcctgggcagctggaactacaggcaagcaccaccacgcccagctaatttttctaattttttgtagagacagggtttcactatgttgcccaggctggtcttgaactcaaggcctcaagtgatcctcccaccctggcctctcaaattgctaggattacaggtataaggcatcacacctgaccaaattacattgtcttcatttatgtagatcaatctaaaaaagatttgactgaaactggactgcccattgctatgacttacgggaaatgggcaacaactcaataccatgatgaagtcctgaagtgaagcaggattagaaggaaccataatcaacactgctgtggtgtcctaggtcagcaagacacctccaagtcttgagcagggaactggggagaactgatgctcttaccttgttaataattcctccgttttcaacaactccttcagcaccaactatgacaagatctgctttctccatgatgtagctaaggggaaaaaaagcttttcatgctttattttcttggctctaacgagtagcatcatcatctgcaaagatcaatattccatttctatcaaggtaagttcctcccataactacctgttttttttaaagcgcacttaacacgcgatagacccctggcattgttaccaggggtgttttctggtcatgaccctacaatgagacatacacttcacactgccgcccggcgcatgcacacgtacatatgtgtgtaagtgaagcaagaatgtcctgacacagcagtcttccttccaagtgtggtatcctctactttcttttctacttcagcacaaaccaaacaaaattttaaaatctgatgagatctgaagttggacaaaagtgttatgcagttttaaaaatctttctttttttttttgagaccagatctcactctgttgcccaggctagagtgcagtggcatgatctcagcccaaacctctacctctta

SEQ ID NO: 72126 - DNA, 1046 bp, Homo sapiens
aggcatgcaccaccacgcctggcaaaatttttttttttttttttgagacggagtctcgctctgtcacccgggctggagtgcagtggtgccatcttggctcactgcaggctccgcttcccaggttcatgccattctcctgcctcagcctccaggtagctgggactacaggcgcccgccaccatgcctagctaattttttgtatttttagtagagacggggtttcactttgttagccagaatggtctcgatctcctgacctcgtgatccgcccatgtcggcctcccaaagtgctgggattgcaggcgtgagccaccgggcccggccaaatttttttatttttagtagagacagggtttcaccatgttggccacagtggtcttaaactcctagcctcaggtgatccgtccgcctcgccctcccaaagtgctgagattacaggcgtgagccaccatgttcggccaggaaagtcttctaatgactcttagaaatgtagaaagtgagagatgcatgtttgcctgcataaagtagtaatacagctccaagctcagcttctgccttcatttcagacctttcaatctggagagagctcttacgttgtcatgaaaaggatccctttcataagtgaaacagactttgaatcgagagtgactatgttatattgtgttaaccatgatgcgtaaatttcagtagcagttcagctttataagtgtttattaggcctccaccttgtgccagattctgtacagatgctacagggaatattccagaataaattctggtattagtattatttattgtgatcccctaattcagcaccctaaatgtaagcatctgggtatagcatgaaatcttgtataagcaaaataataatgcagcctttaatctgaagggcttgcctagagacacatgtctttaaggcaacctccagtgtcttcccattgttcttaaaataacatccaaacaaccttagcctcacccataccaccttgcagacctcatctgccgctgctacttaatgtctttccatgcctcagcctcccaaagtg

SEQ ID NO: 72127 - DNA, 1050 bp, Homo sapiens
tgggtgtatgtccgtgtgtgtattttgtatatgtgtgtgttttgggtgtatgtgtatttggggtgtgtgtatttggggtatgggtgtattttgggtgtgtattttggagtgtgtgtatttttgggtgtgtgtgtgtattttgggggtgcatgtgtgtattttgggtgggtaggtgtgtgtattttgggggcgtgtgtgtattttgggtatatgtgcgtatgtgtttattttgtgtatgtgtgtgtttgtgttttgggtgtgcatgtatatacctgcccatgtaggtgctctccagaatgagttcatcaaaccgttacgtggagcgggatttcgggggaaatgttactgtcatctttatactttaggtatcatttaacaatgataaatgggaagacaaactggaataatgttggttgtggttcgcagtatattgtgtgacattggtgtgagaggactggcatgtgcctgggtggaattaacatgactgtgatttttaggtgattaaggctgcagaagacagtgcgttgcagtatatgaacttcatgaatgtcatctttgcagcacagaaacaggtgaactgagagcctgccgtttaaagtatttgtttcataacgaaggagtcaatttcattttttgaatgctctactctgaggtattctgactacgtaggcttatgaatgggcaaggaatccagaatctgtattatgttctagtcttttctctattttgggtcctggaccacttgagaatctgatgcattcccaaaacaatatgcactcaaccacagttttgcatagagtttcatggtattcaggtaacctttagcccatccttggaccccatgccaagaatccctggtttgacagtttgctgtataaaccttgcatcagtttctttatcttgttgctgtggcgaagctgtaaaaattcagtatttttactttgcaaagagctgaaatgttcagatgaagtataatacattttcttctttggtgtgtttatgaagaaagaaaacctccttaaaatttcagttttaatgtaaaatgctgct

SEQ ID NO: 72128 - DNA, 1082 bp, Homo sapiens
aggttggagtaagccgagattgtgccactgcactccagcctgggcgacagagcaagactctgtcaaaatataaaaataaaaataaaataataataatctgcagtgtcatatcctcctctgattttgtaggcccaaggcattgctcatgagaacctcattcctctggaaaccctaggtaagtgcgagtttggcagcaagccgcctgtgtcttgcaggcttgtgacatcacgggaggactgtacctgaaggtgcctcagatgccttctcttctgcagtatttgctggtaaggagacagcagcggcgaccctgatgcctggagggaaggatgacctctgtgtcctgggaaaggaatggaagcaagatggctggtgctagtactcaggagaagggaataaatggaggccttggagttccaaggcctagaagggtgggcttcatgttatttttttcccatgttttaaataaaagtttcttttgtttgtttgttttacagtgggtgtttcttcccgatcaagatcagagatctcagttaatcctcccacccccagttcatgttgactacagggctgcttgcttctgtcatcgaaatctcattgaaattggttatgtctgttctgtgtgtttgtcaagtaagttaatgtacctagtttttcttttttttctatgttggggggcaggaaaacagtttctcagctgtgttgtttttcagccaccctattgtttctttttttttttaatttacagtattctgcaatttcagccccatttgtactacgtgcgagtaagtatctttgagattgtgtgggtggctaatacttcacagctctagaacattaaaaaatgttttcctctctgtaatttcaggacagcctttaaaatttctctgcctccagtgctgaaagccaagaaaaagaaactgaaagtgtctgcctgaggataaaatattttccccatcttttagagctgttaatagaaattatatagcagattctttgttgggaagactgaaaaaaataaagataggtataggataatttttaatatggtgaccttacagaaaatatttcccaaacatcctttt

SEQ ID NO: 72129 - DNA, 1084 bp, Homo sapiens
ttgtttgtcgagtggaagctgtctccccaacaagtaataataaacatttgtttgtccatttacttgtttattgtttgtctccaccaaggactgtcaacctctgagagtaagtaccttaacgcagtccttggcagtcattggcatcgataggcatttgttgaatgaacagacaagcttttcttgactgcccgctatgttcaggcactgtttttggtgctggagactcggtggtgagcaaggcagacacagtccctgtgttcctggagcttccagtgtgggaggagacagattaaacacactctgattatgagctgtgataagtgctaagaaggcaaagaacagggtgtggaagggagaccgtgaagcaagtacttactgactgaattgaaatccactcaggcgaacattttatttcctggccaccactttcatctcctgactgtttcccttaatcttcctaaggtgtccttaatttcaaaagggatcagccctacccgagatctgatatccattgatatcagatatctaataccagatcagccccataaggcagttgcaaagtcatggagagactcctgagtgacaggcgagggtgcaggtaagatgcagggcggttcctggttcctggagccacttctgcagttgtacccattcacctgatggatgctgcgctgagctgtgaatagcacccaaaacattcaggcaacagctgcaggtgcagcaggctcctacatttgtaacaggtagatgttttccttccggttagtactcaagccaagacacttatcacacttcagtcttacaggtttgagcaaacgtactaatcactatgaaggttccagtttcaataagcgccactacctccagtcatagagtgtacctgggatccttttcaactgaatgtcagtgaaaggagaagaaagtgctgttcatctttttccagaaggaagtaaaactaaggttgctgcgatgagctcttgtgtggtgctaggttttcagtgtgtcttcagcctgagtttcctactgactttgtggtgaccagatgggatcactgttagtaacccttgcaagggaaaggggggca

SEQ ID NO: 72130 - DNA, 1049 bp, Homo sapiens
ttaaggaaatcaatggttctcagattgaaagcatcaaaagaaaagcctgaatattgtttccttcttaaacttagagccacctttcaagttaagacaggaactttcttgagtgtcacctgttgaaggaagttaaagattctgttttgtcttgtttggtttggttttagatttggaacttggccacaaatcgcctcacttttctaaactctttcaaaatgaaaatgtccgtgattttaggaatcattcatatgacttttggagtcattctgggaatatttaaccacttgtaagtacagatttttttttaagcaatatttataaaccaaacttggcatttcttcaattttgcttcttgttggtgactgtatttattgggtaaggggcagccaatatgatgttgtatttacatgattctgttgaagttatttagattttctgtggtttcagcaattcattcagcaaatatgtatttatcgagcgcatagtagtgccaagtgctgttctaggcactaggagttcagcagtgaggagggcagaaaaaagttgttgccccagtggagcttccattcaagtgagggagacatgtgacatgtgcattcatgtcgatttccagaaggggtgcttgccatattccttttttattttacaaataaaaaatctttttgtttttactttattagagctagtatatgaagagtaagagatggtgtcatttttctctaactagacctgttcattctgatctctaaacataatttgtataatttgatgctgtagcttgaagtcactataacaggagtcttgaaaaacttgtaacaatgtaagacacagcattttggagccagattcactaatattgtgtagccttactttaaggaaggaaatgtttctgaataagggaactaaggaagaaagtttgagtgagatttgaccgcaaaaactgtagtagttttggccgacctcacgtctcttcctcgtagatgtatctggacactcagatgtatctggattcatcatatgagaaatgatgttattctgaaattcgcttt

SEQ ID NO: 72131 - DNA, 2025 bp, Homo sapiens
gtgtcagagtttctgttcacactgggaaagccagcacggggttgggggtgcggggcagtgtttagctaagtaaaaatatatgtgccaagaacatattttggaatgaagcaatttcagcacaggaatttttttttttaacttataaatgttgttttaaggaatgtgatttcataatcttccattaatacatggctttttttttttttagggtagaatttcagaacaaattctacgttggtgcaggcaccaaatttgttcctttctcattcagtctactttcatcaaagttcaataacgacgacagtgtggcatgatcatattgctgtaaccaacaagctttcagatttatggagaatgaccatgttatagactttcacttatgtcagatttatgataggaaaaattccatcttcattactgccttatgacatagccaaataattctgtaagatatacctcttcctcatatgttaaatattttgtaaagtttaccaatttgagatataaaaatttcttttggttttttatgatgagcaaatataagttaatgccaaacgttatgttaaagttattttttcaaatacaggatttggggagagaagccaattttgcatggctagttgaaaatggtattagatacttatttcctttaaactttatttaaaacaaacaacagagttaatctgtcacctgaagttgccagataatattttccaacagctgaagtagggatagttttttaaaaaatttaatgatgggtaatcaaaacattcacatttattctgctggatttaaaaatatgtactttttttttttttttgagatgaagtcttgctgtgtcacgtaggctggagtgcaatggcacgatcgtgtctcattgcaacttccgcctcctggattcaggtgattctcctgtctcagcctcccgagtaactgggattacaggcatgcgccaccgtgaccagctaatttttttgtatttttgtagagatggggtttcaccatgttggccaggctggtctcgaacttctgacctcaagtgatccacctgcctcggcctccctaagtgctgggattacaggcgtgagccaccatgcctggccaaaatatgcaaatattttttatcctgtgctacctagaattacaagtagaggattgtttttacaattttgtcttgttttagtaattggggacaatgggataaaatgacatacaacaaatggttatcccacttgtatatttttttaaagactcttatcctgttacccttacataaaaccagttatgataattgtatgtttggaagataaattgtatgctgagccttaaaacccagtgtgactgtagaagatataatgcggacatgatttgaatttagtgacagcttggctgatgtcactgaaccagaagggtttatactgagtgaaggaaaggtaaaaagtagtattttgtatatttttgtaacaaaatataaatgaagatattttaccatgaagagattgcacttatccttgagaacagtctaaatataaatgaagatattttaccatgaagagattgcacttatccttgagaacagtctaatgatactttttttactttcagactgtttctagctaaagttctgataaaagtattgagttaatttaaactttcaaacactgtttagatcagttgaaaactaattcttaatagccattgttttataatctttagtttaaattcatctgtttgacatttggttttttgtgaacttgagtcagtcctattgaacattttgacctatattcttgcaaattatgttaatttttcatattttagtttgattttagacaattattttcaaaaagaaacctgactttttttcaccttcttgacattgtgagtgatacacgttaaaaggctatttgcccgcatcctcctctatcctgtttcgaggtagagagcttggcacttctgttacaagctgagagtctggaggtgctgagtttaacgtggctgtgcagctgatttcaaggcatgagc

SEQ ID NO: 72132 - DNA, 1034 bp, Homo sapiens
tctaaacatcagaattttaattcaatagacatggataattctttttacatttgagtttcaaaacagtactttgaatgtagcaggcattccataaatgccatctgagcagacagagggatttgcggccagttgaatcctaagtgtttgctgaggtctgatactctgcaattgcctgttttaagttcagcatctttaaggttcagagacattcttttatgcagtaggccagagaactaagagccggaaagggcctctgagatgccccgatctccccacctcggggaggggaggggtctttccagagcccccacagccctgccttctgcatggcccccacagcctagacagggcccccaccagacaggtccgcctgccccataggcctcaccactcggcctcagtctaatgagttcttcacctgcttcctcggcttattcttgtaggagacgggacttctaaaagcagtgaattaaagaaaagatgtgaagagctggaagcccaactgaaagtgaaagagaacgaaaatgctgagttgttgaaagaactggagcagaaaaacgcgatgatcacagtgctggagaacaccatcaaggagcgagagaagaagtacctggaggagctgaaggccaagagtcacaagctgaccctgctgtctagcgagctggagcagcgggccagcaccatcgcctacctgacctcccagctgcacgccgccaagaagaagctcatgagctccagcgggacctcagatgccagcccgtcagggagccccgtgctggccagctacaagccagcgccccccaaagacaagctacccgaaacgcctcgccgccgcatgaaaaagagcctctcagcccccttgcacccggaatttgaagaggtctacagattcggggcagagagcaggaaactccttttgcgggaaccagtggatgctatgcccgaccccaccccatttctgctggctagggagtccgccgaggtccacctcatcaaagagaggcccctcgtcatcccccccatcgcctccgacc

SEQ ID NO: 72133 - DNA, 1086 bp, Homo sapiens
ttgatggcctaattagccatggaccattttttagcctcgtgaagtactatagatggtttcaaagggagaagcaggctttcctgtccctcagggctccttgctctgcctgcctctctagttgcctcccccagtggctcttctccagtgaaaatggaggatagaggtcccagaaaatgcttctatttgcttttatccttccctctttggaagtaattggaatttctttgctagctcatttccgtacttagataatattcaggaaatgccctagttggctaagtaaataatcttgaggtatatttatagaagtattgaccaatgtttacataaaaataatatagctaacattcattgagcactactctatgccaggcccgtcctggttgcttttagcacttaaagccaccccatgagttagacatcacaatgacttaggtgacaagatagggttcagatacagccccaagtacggtctgatatctcaagagtttgtccactccagtctcttttgtcccattgtgttaagcagatcttctttgggccttagtttcttaatcttgaaacaaaggggtgttggatgcctgatgttgaagatttcttctaccctcaatgttttctgactccatgaatctacttagaaaaccacctcactgctaggaatcattttatcctcctgttacatttaatcactgcaattgctgcctttgttctctggccagccttcattttcttgatggcaacgcttaagctatagtacaccagagcggtacagaaagtgcccacagaaaagcccccagaggtccttgtgcacaaacgtggagacactgtgccctgttaagggccaggcagtgctgccaggtcagggcctttcaaaagtgcacagagagggcagcagggctcccgttgttcatggtaggagagaaccaaatgtgaatgggtcataacttattcatgactagaatctaaaagagcttgttataactcattcacagctaccacctgagtgctagtgtgctattttttttagattctaaaattattaccctgtttccacaggctttgtgttcaactaaaagataacgtttg

SEQ ID NO: 72134 - DNA, 1043 bp, Homo sapiens
ctcaaactcctggcctaaagcagtcctcccaaagtgttgggattacaggtgtgagccactgtgcccagcccctagtggttttacataccttaaaaaataaggcatataaattagttgactgtgaataaacatattagcaaactgaacactagacaatactcgcactataatatttaagcttatttccttagagttgtaagttgtacatgtatttttctgtggcagcagcagattcagattagcttttatgtccttcagggaaaagggattgttactaaatttgcaggctgcatcagagttttaatattgagatttaatattttaatcatttgaataatgattgaatgatgtgatgggtaacattttaagatgtatgagatacgattaggggctttttatgtatttttctttctttcagatatatatgagtgcctgtagtgtggccagcaaaatcaacttattttgttctcttgaagcttatgatttgtgagggggattggaatttaaacacaatcacaactacacgtatgatcacaaactggtatctgctgtgaaagttaagaagcacctgctatgagggagtataaaaaaggggagaccaaattttagagtggagagaaggggcctaggaaagacttttctgtataaataagatttaagctgagatttgaagagtgcgtaggtgttagtgtggaggaaagtgggggataattttccaggcagaggaacagcatgtgggaaggcctcaaagtggggaaaaagctttgcccattccaggaactgaaagaatgaatgtggatagactatggaggtgaaggggaagagtggctaggccaggggccagatcaagtagggtcatgtagggcaggttaaagtggttgtattttatcccgagtgaaatgggaaaccatgatatgggttgggatttacgaagaggagtgacataatcagatttgtatctttaaacagccactctagtcgttgcatgcaagatgtgggggcgtgttgggggtggagagtagaagtggggagaccaggttggc

SEQ ID NO: 72135 - DNA, 1043 bp, Homo sapiens; identical to SEQ ID NO: 72134

SEQ ID NO: 72136 - DNA, 1043 bp, Homo sapiens; identical to SEQ ID NO: 72134

SEQ ID NO: 72137 - DNA, 1187 bp, Homo sapiens
aggcatgagccaccatgtctagcctattagttttttatatagagaggtagatttgtatgtactgacatagcctgtatggatgtctagaatatactgttgagccaaaaaagcaagcttaatctcattttttgtaagatacaaaacaaaataatgaagggtgagtgtgtgtatatatatatattctgaataagaattagaaaaagactagaatacctgaaaacatttaattctgattacttcatgggaaaagcctaggggagactggtttttcatatcacatgtgtttgcattgcttcagttttttttacaatgggcatttacttttgtaaggaagatgttacaatttctcaccaatttcatgaaggtctagatttagacaaaaatatacagtgcctagtacctaaaaggatgtggtaaaaatgacacactcttatgttacattggccatatgtgtcaagagtcttaaaattatttacatttcttgatggtctaggaaccatcaaaagaatatttttaaatacagagaaaagctttctgcacaaaatatgtatattgtagaattatatttatgggcacagtttgcagaatggttatgatacatcccctatatcatatatttagtggcaaataacattgccattaaaaacgtttatgaagaaaatatattaaaatgcttatgatagtgttaagtggaaggaaatcaggatacacaattgtatacctgatatgatgaaaacgccccaaaaaaagtcccagcagccttccagtaaaacctatgaatggcaaaaatatgtagaagaaattagatggaaatcttaagaattgtggaattcggtaggatgtcgggtgatttaaataatcttttttgtatttgccaagattacatgtacctgtattacatgtatgatggaacatttgatttaacaaagtatatctgggacatgatagctacatggcaaatagacatgagcacttttttttttggttaaagccaatgaataaatttggaatttacactgaaaatgattgggacccattgaaaacttgtgagtagggtaagaacaatccattttgcattttagaaggttacattagagtagataatggattagagggaagcaagactggaggcttttgtagaattccagggaagatgatggtggcttgagttaagttgagacaatgca

SEQ ID NO: 72138 - DNA, 1187 bp, Homo sapiens; identical to SEQ ID NO: 72137

SEQ ID NO: 72139 - DNA, 1187 bp, Homo sapiens; identical to SEQ ID NO: 72137

SEQ ID NO: 72140 - DNA, 2294 bp, Homo sapiens
tacaatttaattttgaagatgtagcagaagcattcaaaatgtaattttaaaaatataattcgtattgctttttaacgctaaaacatttctacacctttattctgattctgaaatacacagtgtctcttgtgtcacttgatacattataagaaattcagtaaagctattctagaactcatttatttttcatacccctgaaagttcataaaataatcataggttatttccatatcttattttgcagtgtgttctatgatattgtgacagagcttgtgaggaagcctttatagccagagcagacccctgtcccaaagatgatgaactctgccacttaggttaacaatacaacagttcatagaaataattggaaccatttttcttctgcagagtaaatcctgtatgtccctctggctttcaaaatatcacttttggatgtgtagttcaaatatgtttaggattgagcctgatgggggtttaagaatatttcattgattcaaagtactcggtgttggctagaaaacatgtcaagtttctcagttaaccgatgttcaataaattacttttaatactataactttacattgtgataggactaggaccttgtggtaagcctccagactcacagttagaatcagagaacctgcacaaagcgggttgcatgcattttcatgatgcttggcaactagaggtagtaacccattgtgacattgatttcaagtcctaactccttagtgtgaagagccgaggtttctgagcaggtgtttgagtgccctctggaggccttgtgaacagttgaaatgtggactcctagcaaagctttctttcacagccagagttgagaaccagtgggcgagatggttgaaactggtgtggatgttaggagcagaggagaggggagatggaactcatgggaatgaactagtgtttacaagagcttgcccggccaactgataatactgggtttatgcagtgagtgtagaacacagaggccgtagggtcacagaaggagccaagggagtgtggccagtaatgtccagtgggataaagaacaaaaagtgcccttggattggccaagagaaggccgacaatgagagaggaacctcggtggtgtggtgttggattgaggcatgagtgggaagtgaagcaatagaaatctggaaaaatcagtctttaagaggtctggatggggaaatggagggtggggccagggagacagggtagctagagaaggcctgggattaaatgctgtttttccttaaggttgggggagacttctgcattgtgtttaaatgctgaagggaagaaacaagcacagaaagaaaacagttgaaaggggtgtgggggccggggaggaggagagagttggtttcaaagttctttgcctgggagatctgttgagggaagaagttgccttttatagggactttgagtttgtcaaagtagtgattttcagtttatcgtgggatgatggggaaataattctagtaggcagttggagatacaggtaagaagaaaagactgtgttaagaaactgtggcatcatcatcatggaaatggtcatcattccagccaagcaggtagttgagctaaaaaatggagacaggacatactgtatggaggactcctatatttaggcataggcatgtgagatggcagacacaatcagcaaggccagaggaaaagtgagaatgtgcagggaactgggagccgaggagaccgtagactaggattcagggtgaggcaggaggaacggccccaagatttgactctgagagcagttttgtagtgggggtgggggtacagaatggtgtgtgggaggtgcacacagaaggtattatagatgctgtggaggagctcagtagtgaaagtgagaagagtgaattggtcttagtcgggggatggctccagagaacacatgtcacttatctgtgcatatgaaattagagctgtaatcaacaatgactctagaaaggattatttttgcttttttgtttttaacaccatcatctcagaatataagatctaagtttcatgtaacttttgtgccacttcctactcttctcagattgagaatctgaccagaaggaagaaaatgtctaggtctattcatgacatttgagggagttcttgcaggagagagtaaatgtgactgatttttgatttactattctgacacacgtcaaatgttaaatcctttaaatctatgagaccatttgctatcataaatgacattttaaaaaacttcttggtaaaactaatagtatggctaatagaagttatttggcttcacttat

SEQ ID NO: 72141 - DNA, 1104 bp, Homo sapiens
ttgtttgtggcactgaggcacctcctgggaaaacttcatcttaagggggagttgaaggaagtgttttagttagggattttttgttgcaaagaacagagtttcattcagaccactttctgtacaaggggctatattggaggatgcatgtggatcagacccatgaggaactcaggctgtccagagacaagccacagtcttcccatggacagtgaggtctctcacggcatcactcatttctttgtgtctttctcctcttgctgccatctggcttgtttttccctcctctgtatgtcttttctaaccttttagctcctccttgcttatagattctacttcctcatgagtttggtttgctgtgatttgatgacctccgcagtcattttgcggatcataacctctcagcttcatctctcacagctgataacctcattctctcagtattgcttagattcctgagagagagggaatctgattttgttttgcttttattgttgttccaagccacatcatatgtcagagttaagctcttgggtcagatgtctgcacttggtctcagaagtggtcatgtggccgatggctgcctgggcctacccttaaagctgaagcagttcccattagtaggatttgtaggctagcaggcaccatgattggcatgtatagttcagtaagggaggaaaaaacctggcccaatatcaagaccacttgaaattcctccaaatgtattcctgccctttaaaatattatcctgctaacagctttcattctaagttgaacctttattcccacagagaaactaaaatagctaaatgtgttgaaagcattttcacttttccattttcttcctgttttattcagtctctgacagtgcagggccactcagcatagtctacaggactctatttctaatgttagtgatttctgctgaaaatgatatagcaacttcagatagctattagcaagatggatcattctaaccacatgcctttcacataatcctttcccccaaagctctggggagctgtagaggcatactgtaatccagcactgtccccagattgacaacagctagaaaaacatgtaaatgtcccatccacatgtagatac

SEQ ID NO: 72142 - DNA, 1124 bp, Homo sapiens
agttccttaatatatcataactcccaggggaaagtgaagttccccaaacttaaagctagatcttgagatctatacctaaacttctctgaacaattatagaatatagcagaggcggggaggtagtagatggaataaataaaataatgataatgatagctttgttgagcccttgaaatttgccaggcagtgttttaagtacttctcatggattaattgatttaatccttaaattaccttatcagatcagctgcctttattatctccattaactcattcttaacctcctaggtgaaggttacacagcaggtatgcagtagggccaggacatgaactcacccagtctgactccagtttgtgcttcttcagtaccctgagagactggaaaatccgtgaaaaaacactattgattgtttattccctggcattttagccagtctgagtcagttatcttatacctatgaaccttaaactcattttggatctggttcccatcacgaggctaattgtgataatgggatacctatatcttggagggaagttgtgcagagtgcctggattttcctttctgtggtttctcagatttgctcatcccttctttggacctccatgccttgaatcccatatatttatataaatcccagatgtaaataggtctgtcctatcttctgagctgggaccccacgtttatagtagctagttcatgaaaacattttgtgatcctaaattctctataaataaacccatttttctctttgcatttctcccatccagcaggatcctaaggcctttgtagtccttcagccactgtgggccctgcctctgcctgttcttctggaatgtcttgggggttttgatcctgtcactgtggtaagttttccccttgtttcaccatttgtcctagatggagaatcccccttgagtattttaagccaaagctgtctctagaattttttctgagcatgtgccctttgggctcagtgaggaagcagctctccgtgcacgctcttcctgacctctcgcctttatctggcattggattccccagatcttggaccaccttccttactctaaagatgtcagaaacatttttgtccaactctttttgttccctgggatcttcattt

SEQ ID NO: 72143 - DNA, 1500 bp, Homo sapiens
atgatatctacaaattctctccttcagacctgcaaatccaagagacacatctttggaagataagagagcttcttcaagaccaaaaaaggtttgtgttactgctgtcacatttatataaaattaattttggaatcaatagcagttttccagataaaagcattttcaatttatttatttatgtttctattacaggagacggcatgatacccatgtagggaattccccaaagcagggcttgccatacctggaccccgaggagcctgcttgctggaaaggctttcctgtctgatgtgcaggaggcagaatgccaaactgactcttcaaggggcaactgcaggggctcgagaccagccagcagtatctcatccttcgatacaggggatatactgtacagtcctttttctagaagtgagacatacaagattactctacaagaggaagattccaggggctcaaaaacgcaaaggtttgcactttgagagccccttggaatgttgacaactcaggatctaaaacaaagttctgtgttaatgagttacagaattcacgtggaagtcaatgtcactttataatcgataataatactgagtgaggaacactatgcaggaagaaaccttccgtagaaagacaggcagggaaaagcttaggctgaccttaaacttacctaatagagcaagcctgagatagactgccaaaatggccaaataagagactctatgaaataacagtcttgtaactgtagtaatcataaggaaattttctccttgaaatcacgataccaaataggaaaaatgatctacaagtgccccatgtgtagggaatttttctctgagagagcagatctttttatgcatcagaaaattcacacagctgagaagccccataaatgtgacaagtgtgataagggtttctttcatatatcagaacttcatattcattggagagaccatacaggagagaaggtctataaatgtgatgattgtggtaaggattttagcactacaacaaaacttaatagacataagaaaatccacacagtggagaagccctataaatgttacgagtgtggcaaagccttcaattggagctcccatcttcaaattcatatgagagttcatacaggtgagaaaccgtatgtctgtagtgagtgtggaaggggctttagtaatagttcaaacctttgcatgcatcagagagtccacaccggagagaagccctttaaatgtgaagagtgtgggaaggccttcaggcacacctccagcctctgcatgcatcaaagagtccacacaggagagaaaccctataaatgttatgagtgtgggaaggcgttcagtcagagttcgagcctctgcatccaccagagagtccacactggagagaaaccctatagatgttgtggatgtgggaaggccttcagtcagagttcgagcctgtgcatccaccagagagtccacacaggagagaaacctttcaaatgtgatgagtgcggaaaggccttca

SEQ ID NO: 72144 - DNA, 1039 bp, Homo sapiens
tctttattaatccatcattcttttcttcattcaacaaatatgtattgaacacctcctatatgccaggcactgtgctaggtgctgggaataccactgatgagacagacaaggtccctactcttgtggagtttacttctggtggaggagacagatgataagtaaacaaataaataatgtagtttgagatagtgattaagtgctatgaagaaaataaactagggtgatgattttagtggtggggtggggtgggggtggggtgacattagctagtggtcagggaggcctttccgcggtgggatgttgagctgaggccggaggagaagtagcagtcgctggcagagcacacaggctgctctgggggatgagctggtgcgtttaaggaacaggccagcactggcattcgcaagcagtggggaaggggagagatgccgaggtggtcagtatcctgactttcagaggcctttttttgtttgttttaatttttgctagattgatattaaaaactcatgtggaggaactcaaggaatgtttagaagaccaaaagtccccaatgacaggaacaaaagcaaccaatttttaactttctcttctcattcctgttttcattgatttcccacatgtagtccttttgctcaggaagtctttggggaaattaaggatctttgaagctctgaaataggtgatcaggttagtggtgtctgtcagctgtctaagaggttggaaaatgaactactcaagatagtcacgaaaatactgaaagtttgatttttctttccatatttgaattaattttttctgtttgactggaaggggtttttgtataactaaaacctcagcgcataaaggagatttaaaaggagcacatgatttagtgggtgggccatgaaactagagatgggatttgggggtgaatttgtcaatatctggattttaatccagacatctctgctaacaagcctttggtaagtcacttcagatacttttcctcctttttacaaagagagggctggcttagttatttgccaaagccccttccagg

SEQ ID NO: 72145 - DNA, 1027 bp, Homo sapiens
cctggatcctgcctagccttagcatggtcctggggccacgctcaaactggaagcccagcttcatgcttagggttccagcccctggggctggggtcgctgcaggacagcccagggggctattgcaaacagcagacagtttagccacctccccctgcccagcagaaactatctccaccctccaggctcatggctggccatctggtcaaccctggcttcccagctggggcgggcagcagggaggaggggttcacgttactgctctccctccctctttggagggcccatggcaggacctcaccctgcccctgtggccccaccgtagcgtcggtgctgtcttcactgcccaacgcagccccttcccatcttgtccccctgcaggtggcggcgggaaggccaaggtctctggcagacccagcagccgaaaagccaagtccccggccccgggcctggcatctggggaccggccaccctctgtctcctcagtgcactcggagggagactgcaaccgccggacgccgctcaccaaccgcgtgtgggaggacaggccctcgtccgcaggtgggcaccaggtggggacagggctgggctcgctgagcccccaacactgggctgtgaatgctgccggggcactgaatgctgagcgcctgctgcatgcagagctcagactcgggcctgttctgtggaaacgctgtccaggggcctgggcagctgagcctggctcacgaaccatcaggatgcttctgccaggggcacaggcagaggaaaagggtgtggttggggccggccagatcacatgggcctggtggaccatccaggggagcctggacttcctttgatgggtagtgaggaggcgtggagggctttcggaagggaaatgctcatctaacatagggtcagaaggcccctgggagaatagaccagagggacggtgaataggctactgctatagtccaggcaaaagacagcggcagggtgtgaacagggacggaagtagaacaggtgaagagaggcagacggttctgagacc

SEQ ID NO: 72146 - DNA, 1032 bp, Homo sapiens
ttatgatttggccacgtacaggaaaagcgtgtggggccctggtttagagtggagggagggtgcgccccctcagtagggagacctctgaccacatctggggccctttctccatccaggtctccagagccaaacaagacgtcggtcttgggtggtggtgaggacggtattgaacctgtgtccccaccggagggcatgacggagccagggcactcccggagtgctgtgtacccgctgctgtaccgggatggggaacagacggagcccaggtacttctgtgggcacatgcgctgcccccgggatgctctggtatcccttgcccatccttggccccagtccaccgtggtgccatgtggagagtgacaagggcacagggctcagctgggtgacctcaagcctgccaagcaggtttcaccaacttgggggtgtgatacatgcccaccctccctggggagacctcagtggtagctttccatgctttgggctgggatctcagctggaccaggcccccgttgacagcccctgttgaacctctaagaaataatgagctaggtgtgctgggccagaccgggggcgatgggtgaggtgggacctgagaaggaagctgggcccgctgcccctggggaagggcatgatcggaacccaatttcagtccttggggctctcttgagagggtcaggctggagcaagtggtcagaggcagcccaccacgcagccaggcgtctcccaagacacccctagccccaggacgggtgaaccgcagaggagatttcaggagccgtgatcttctaccaggcaggggatgcaggcgtgggggcgggtgaagcttgcttccaaatgtctaaggcatctcaggtggtgagttccccatcatcaaaggcatgcaagctcggcaccaagtgagctgatgtgaggtgtttgatcctcacagcaggatgggctccaagtctccaggcaacaccagccagccgccagccttcttcagcaagctgaccgagagcaactccgccatggtcaagtccaagaagcaagaga

SEQ ID NO: 72147 - DNA, 1027 bp, Homo sapiens
caggggatgtggatttatcccagggcaatggggactcatcgagggtggtggaggaagagggcagctcccatgactgcctgaccgccttctctcctcccccaggtccacctccacctcctcacccgttcgcccggctgccacattcccacctgccacccactgcccactgggcggcaccctcgatggggtctaccctaccctcatggagcccgtcttgctgcccaaggaggccccccgggtcgcccggccagagcggccccgagcagacaccggccatgccttcctcgccaagcccccagcccgctccgggctggagcccgcctcctcccccagcaagggctcggagccccggcccctagtgcctcctgtctctggccacgccaccatcgcccgcacccctgcgaagaacctcgcacctcaccacgccagcccggacccgccggcgccacctgcctcggcctcggacccgcaccgggaaaagactcaaagtaaacccttttccatccaggaactggaactccgttctctgggtaagaccaccctgacagcggccaccttcatagacgcgattatcatgcgtcaaattgctcacgataaaggggcgcgagaaggaggtgcgctggccaacggctcccctcgcgatggtaagacttccggcccgcacccaccccgtctcgtggtccaaagatattttcagatctctgctttttactttggcccccgttttttttgttgttggttttggtattttgttttgaagcccatccgtcctcgccggtttgcacgcgctgacgactactccggccgcgcctgcccctctggtttgggggcgctcatcatttgcacatcattttaccatggttttttttttttggatttttgcttttttttctttaatgaatggatctgtgattctgacttcgactgcgcccccatctccctctttgcgcctgtgtccagggagcagggatggggctgcgggagggctcgggcctacgcccccacctgccggctgcctggatgctgt

SEQ ID NO: 72148 - DNA, 1067 bp, Homo sapiens
ggcctgagatgggaaccagtgagggcagctgcaggagatgccccggctcgggcttgggagcagaagaggaggtggtaccgagagaacctgagcattcagaaaagggttccatggctggtgctgggagccgaggagggagtgcctgccaccagctctgctggctccaggagtgtgtgccgtgctctccaggagggtgatctggccggtgggcagcctggcctctctcctccctgtggctacagccctggcccaacacctcccgcaggcatcatcgacctgtcccaagtgccacacctgcctgtgctcgtgcccccgacaccaggcaccccagccaccgccatggaccgccttgcctacctccccaccgcgccccagcccttcagcagccgccacagcagctccccactctccccaggtagcgccactgcccagtctggggtggggaccccggcatccatgggaggcggctgggggatgggcgggcagaagccctgctctctttcccaccccagaagacaaagccaggctcttcttcggccctggggctgagtctctggcctttgggtttcctaggaggtccaacacacttgacaaaaccaaccaccacgtcctcgtccgagcgggagcgagaccgggatcgagagcgggaccgggatcgggagcgggaaaagtccatcctcacgtccaccacgacggtggagcacgcacccatctggagacctggtagggcatcagagcccccaccccccgctccgggactccttgtgggccgcaagaggcctccccctgctgatgccactgactgtcaccaggtacagagcagagcagcggcagcagcggcgggggtgggggcagcagcagccgccccgcctcccactcccatgcccaccagcactcgcccatctcccctcggacccaggatgccctccagcagagacccagtgtgcttcacaacacaggcatgaagggtatcatcaccgctgtggagcccagcacgcccacggtcctgaggtgggccaggttggcatgggggagggggcgggcaggtggatgggtggtcagtagga

SEQ ID NO: 72149 - DNA, 1034 bp, Homo sapiens
agatcgtgccattgcactccagcctgggcaacaagagtgaaactcttatctcaaaaaaaaaaaaaaatgaaagaaaattttcttctgagcgtgtttcactctgtaattctcatttgtttgctagtttatcacctgtctctcgcattgaatgtcagcttgtgagggctgggatttctgtttcgttcactggggtgaccccagttctcacaacaatgcttgccacgtagtagaggctgcatcaatattttttaattgattgagtgagtgaatggatgaaagaatgaattttttaaaaactataacacaaaagcaaatgagtcagtgagcaaaaagtgaactaaggcaatgaagaaatgaaggagtgaatgaagagacctggtccttgggatcccgaggtccctatcctcaaacaactccccgtaaatgccagccccagaggcccgatgcatccaccttgcccgtccacaggcagcctttcgtccagcaaggcatcccaggaccgaaagctgacgtcgacgcctcgtgagatcgccaagtccccgcacagcaccgtgcccgagcaccacccacaccccatctcgccctatgagcacctgcttcggggcgtgagtggcgtggacctgtatcgcagccacatccccctggccttcgaccccacctccataccccgcggcatccctctggacgcaggtgattgccctggggctcccagaaccctgcagtggtgctgaacagggccacggacctcatcagtgttcgctcagggactccttaggcatcaactgtcaggttcccctggatggcgaaactgaggcctcgggattggaagacccaacagtgtaatcatgagcttaggttggagcagaatttctcttagtagtttgcaggacatgtggggttaaacatttcagtggttttcttttccggcaggacttatcagtgcctttagcaatgcaaaggtatagaatgaggacttgagtatatgcatttttcaaatagacatgatctgaaagtcttttttaaaagttgccggg

SEQ ID NO: 72150 - DNA, 1319 bp, Homo sapiens
cttctccgccctgtgagatgggaactattgttctcccgttctgcagatgggaaaactgaggcccaagaggtaacctgagtttcccgtggcacgcagccagtgcggggcagagccggggttagagctcagatgagaacatggagacccccaggacgaaggcctttgcccacggccaccctcaggctggctccatctgtcgggggtgctgaccaccaggaggtcctggggttgggaattaaccaggttatgccagcagggtcagtctgggagaaaggcggccaggcgagggcagcagctgtgggtaggggcctggtcaggggctttgtctcaggggtggggctctaggcagcagcccaggtgtgtaggagcctcggggctgttttggcatcaggcgacagagcggcctcatccggagggtcagggccatgcatctcttctggaggccccgccagaccctgctcatcccctcttccttctcgccctgcacagccactgtcaacaacagctcagacaccgagagcatcccctctcctcacactgaggccgccaaggacacagggcagaatgggcccaagcccccagccaccctgggcgccgacgggccacccccagggccacccaccccaccaccggaggacatcccggcccccactgagcccaccccggcctctgaagccaccggagcccctacgcccccaccagcacccccatcgccctctgcacctcctcctgtggtccccaaggaggagaaggaggaggagaccgcagcagcgcccccagtggaggagggggaggagcagaagccccccgcggctgaggagctggcagtggacacagggaaggccgaggagcccgtcaagagcgagtgcacggaggaagccgaggaggggccggccaagggcaaggacgcggaggccgctgaggccacggccgagggggcgctcaaggcagagaagaaggagggcgggagcggcagggccaccacagccaagagctcgggcgccccccaggacagcgactccagtgctacctgcagtgcagacgaggtggatgaggccgagggcggcgacaagaaccggtgagtgggcgccaggcagccctaaccttggcttttgtctgcagacactgagcagcgactacctacttagacagccgcacccagtctggctctgcctgctttgggggagcccgaggtgtggttagggaggcagacttggagtagagtccaggaatgagagatgcaggccaggaaggggcggaggtgtggccgggaggacctccccaggaggtgacatccaagctgagacccggacagagga

SEQ ID NO: 72151 - DNA, 1104 bp, Homo sapiens
gagctgggcacacagtaggtgttctgtaaaggttcagggaatgaaacgcgagcttcccaggctggcctgttcccccagggacaggtgagacttgcatagcaaggaaaagcttcctgtgttcattcactccacgtgtgccgatgaagctgacagggtgtccccaggaggcgtggtcactcgctctgactaggagactcctgggcaatgtcaggcaggttctctcgtgctcaggaaggatgtcagggtggctgaggggccagcctgtacccagagtgtatctggggctcaatggaagaataaagcccccggtaaaaataaaccctggcacgcttggctgccgaggtggggtgtgagggggacggtcaccctcattgctacatggccgggatcactgccctttgcacctgcggcgaggccccaggcatggggagtccccgagctgacagcccaggccccagtcctgatctgctgcttccctgtgccccaggagaaggagaggaacgcgcggaggaagaagaagaaagcgccggcggcggccagcgaggaggctgcattcccgcccgtggtggaggatgaggagatggaggcgtcgggcgtgagcggaaatgaggaggagatggtggaggaggctgaaggtgagggctggcgcggcttggaggtggctggcagctgtgggtccgagctctgagggagggcatagcgggaactgatcccggcagcctcctctcccctgagtcatctgggtcctccttagaaggggcctcgactccctggaaggtgcgggcctgacttgccagaaactcaccagtaatgggcacaaggatgaaggccataacaatactgagaataatcagcttctctgggagccccaagcctcgctcagctcttctgatgcccatgagtccagtcttatgcttgggtgaccagacgtccaggccagccctgtgggtgcctgctgtctttcaccccatccgatgtcacagtttagaaaaaaatttactttggaaaagtttttttttgtttttttttttttcagacggagtcttgctctgtcgcccaggctggagtgcagtgacgtgatcacggcccagtgtaacctctgcc

SEQ ID NO: 72152 - DNA, 1637 bp, Homo sapiens
gctgggctccgagagggtcctcggtcagatgaggtcccggcccacctgaagcttgtgtcccactgtcgccacgtcaccaggtgacccctttcccaacagagtgcaggcagaggcagtcatggtcaaggcccttgactgcttcagtgtccccttctataaaatggggtgatcgcaggtgccccgacttcagcggcttgtgtggaggttggccccgaccaacggcacgtgggactgcccagcacagctccagcccagcataaaggctcagggagtcaggtgccacggtgggtactggctggggaggggcgtctgaaatgtggccttcccacggggttcagagccgtgcggtgacaccgtcaaggcctggtctactccctccctggctcaaaggagagaaaagggcagaaggcaaagtgcctcctctcccggctcctgccaataacctggcatcttcttttcagcctccatggagctgaatgagagttctcgctggacagaagaagaaatggaaacagccaagaaaggtgaggggtgtgtggcggctttaagccttgttggtttgcatccagggcgcctgaagctcacgtgctggggagggtgttgacacatttggccttgagccaggggctgtggtgaggcctctggtgaggttctggttctgggctgttctcaggtttgtcaccctggagcctcagttttaccttccagaaaatgggtctgtgcagctgcgctgtcaggcttgtctttgtgacttgagggcgcagctcagagagacacagcttgtgctgtgcatgtagtcagcgagtggcttctgggtgacctctgtggccagcacctctgggccttggggacagagcagtggcagcacacctgggtatctcgggacagtcagagcttgccggcggccatctcggtagagtcctggggtcagggagacctgcagggcgttcatccagcccttagagccccaaaggtcctatcctgggctcaagtgtgctggggctttggaaacctgtctcaggtttgagcaccccaatctgggtgacgggttctggagtggatggggacacccaggccgttggggacagtcgtgggagtggctcacacggcagggagccagcaggcattggtgctggcagcagaagccatcccgagcagatggccttgtgatgtgcagcaccgtgggggctggggtccagtgcctcctaagccggatcccctctcagctgtgctgtctcctggccaagatctttacttcccagcacagtgacctgcctctgggcctcggtttgcccgtctgttgagtgggagggtcgtctaggttggctgtgcggaatcagataaccctgtgtgagggcccatggtgggctgagtgggagcgaatctcctccctccctcggccgtgcctggcctggggcaggggctgtcggagctggcgcatcactggcagcactgctgaggccggggcagcacctggctcccacggcacgctcactctcggttatctaagaggtggggcctgctcctgtccccgcccatgtccctgtttgtgggcaaggagccaggaagcagaggccaaggagtgccacgggttccggagctggtgtgtggggctgggagcaggcccaggcccccac

SEQ ID NO: 72153 - DNA, 1016 bp, Homo sapiens
tgaggattctctcatttcaacctcccagccctcagctgaggcacaggcatgctgaatacccccattgtcaaggcgaaggagtcggcacagagaggttaagaccctcatccaagctcacacagccactgtgtggaaagggcaggaattgaagccagcacttctgacaccaatgcttcctgcccctcaccccgactccgcctccccaggcccctagggcggcaagaccccaggccgtgcctctccccatctcatgccagtggggcctggcttcccggttgtttatgacctcttctgggtggactccacgggttttcctcctcctcccccagctcaggctgagcccaggtgcagagattcacctgttcacggttttcttccctccccactcccctctgccctcccccggggtctgacagcagcagcaacaacagcagcagcagcagcagcagcagcagcagcagcagcccatgccccgcagcagccaggaggagaaagatgagaaggagaaggaaaaggaggcggagaaggaggaggagaagccggaggtggagaacgacaaggaagacctcctcaagtaaggcagcctgctgtcccctgcagggcccggccgctgacccaacccgggtggcacacggttctgggggaccctttgtagagacgggtggggtgcccaccaattgcctgtgagcaggggggagggctttctgctcgtttgcccctgacagccccccttccggaagcccacccatcgccctactcctcctccctggctcccccctctcctccgccctcgctttctttctccaaccctctggagactttagagactgatagctcatttgagctccactcctgagctaataaatccaggcaatgactttggaactctctgcctccctgcttcctcccgctctttcctcctgaggcgccaggaagggggaaagggggatcagaggccctcctggaaggactaggtgtgcaggcggctgctgtcacctttagaatcatcgatggca

SEQ ID NO: 72154 - DNA, 1032 bp, Homo sapiens
tgacacggggatgcaggcccgggcataggcttttggaatgctagcccctccacacccacccccatgagaccccacaggcctgagctttggcaagggagggccgagcccccacctcccggaacctggcccctgagatcggccgtgagcggcttttgagcctggaggctgggttgaggcccgagcatcctctcttgggctccgagccccatcaccaccaccctgaggtgaatcacggactgtggggcggtgcggggaacagctcaagcgctggcacagtggtttatagtccatgattcattgatggaagggccgcgttatcctagtgaattgcaaaaccagagcccaggaatgctggggcctgactgcagaccgttggggagcgaggatgtgaggctggctaggccaggtggcagggcccggcccctggtagccaatatggccttcccgcagcgatgggggttcatgtggccaagggggcctctctttctgcagagatgggacactgagacgggaacagcccgtcctgggctccagtcatccggcctgggtccaagaaggaagcccagggaggccgaggctccgcccccgactgctgccgtccactctccactgttccccatctctgtccctctgggtctgctctgcccaagcccctggctctgaatctcctgcatttttctaggtttctctctctctctctctctctgtgtgtgtatgcgcgcacacgggtggctacgtctgtttctcttcccatgtcttcctccctctttctatttctctgtgtctttatctctgtgtccacgtctcgtctgtttctctgcatgtgctttcccgtctctctctctttcccccatctaagtcttttaactctgtctctagctctctctctctctctccccttctctctctcccccatctctcctcttcctcctcccccgccccctcccctcctcaccctgtccctgggtctctcctctcacccttcctcctccaggtctctgctcctcccccacctttctccctttctctctc

SEQ ID NO: 72155 - DNA, 1031 bp, Homo sapiens
tgatccgccaggtaggacaggcctctcctgtggtctgtgcaggagccctgcgagggcaggcggcagaggggctcatgatgaggctccatgtcagtggggagtcggatgctggatgcggggaccccaggtgagccaggctggatctgtgctgtggagacaccctctgatatggggtgggtgggagtcctggggtggggggggctcagtaccccccgccaccacctgtgtctcttcccctgccatgtgtccctcagctcctggggacagcagctggccactgtctctttctctctcagtgcctccgccgttaccatatatgtctttggggagttgctgagggctcttcctcatctccctctctcccgccttgtctctcctccccatctctgtctcccgctctgcgtctcttgcgctctctcagcacccccactcccagtgcacagcccctctctcctgggttgctgtggaggctgctgtgggtggccgcagagaggctgtggtgcttgtggtcctggcgcggtgcccgtggctccaggccacatctctgctgaagacaggcacgagtggcctctctcatgtcaccaggacagaggccgctcgcaggggccttcctgcctcgtgtccccaagcttgctcgccccacagaccccccaggaggtgcccatcggatgcacagtatatgcatgttcatccgggggcatttattcagtgcctactgtatgccagggttgtcagactctaccttcagatgcgaatccgaccttaatccttccgaaaatagggtaaagggatcagccgcgcctggcccatctcaacaccccagactgccctgattccacgctgcagaggtggacacagggtaggacttccgaggtgtcggggagtgggcacgaccgcccctcccagggtcaacagcgcccacgtgcctcctgtgggtttcctgagttggggggtgcatggcccaggaccaaggacatgggtgcccctcctttcgccatttgtcaaggtgggattgaaatggaggctgtggt

SEQ ID NO: 72156 - DNA, 1025 bp, Homo sapiens
aaggtgagtcgctgcccgccccataccccttcggtctccacctccgtgggcaactgcgtggactcagggtggaggccctccctccttgcccacaaggccctggcctgcctggccccttgctccagctgccatgctcccctcctccctccctcccttccttccatctgggagatagatcagtgcaggccccgccctggcctcctgggcccatggaggaggagcctcaggttgctgagcacctgggaatcccgagaaccccagggagagctgcacggccaggcttcctggagccccgtgtgcccgacgggtctcctgccagctcctcaaaggccacgtggagcgtccttgcaaactgggggtggattctggaagcactacgtgcctggcatcccagtgaagttttcgtaggcaggagtggcgtgcctcaaagggactggagggaccagcttttctaggtccctctgagggtcactgactgctttctgacacctctaatgccaaaccagacgtgtggcctgcaagtccccatcttctttggacaaacctttgtgtggacctgaggcctaaagcccactttgtgtcaagcccaggcccggagcagctccaggtggccggtagacacaaagtgtccccagagaatggtaaagccgttgttttgcacccacaaggctggttggactgtgcctggagaggctgcaggtgggagaaggtggctggatgaggctgcatgttggacgtggcccctgggccttcccccagcatcttggggtcagaggagaaaggctgccgtccgtgtgtcttaagcagcattcccctgaatcacgtttctcagagatggggacctgcccaccccagcttggtggacaccctgctcgggcttcctggttgtaggagggaggccaggaggatgaggcacttattttaaaggacagctgttcccagcgcctgcccctcatgagctgataaccgtagaaggagagagaccgagcagagtggggaaaaatctctccatgcctgaaaaacca

SEQ ID NO: 72157 - DNA, 1358 bp, Homo sapiens
agtggccagccaggctctgatgtgcttctctctctccctttgcagccgctgtacaaccagccctccgacacccggcagtatcatgagaacatcaaaatgtgagtgctcgcgggcagccgtgcagacacacagaggcagggtgggcgagcaggctctcagcagcctgcatgggatgtgggacgtgggctctctgttcccatcaggggctcccggccagggccaggtgctcccggaggggacaggagacagtcctaggtggcacctggggtgggggtggggagcagagagagtgtccccctgaggttttgggagacaggctgggtttgggagggtgggcgagggagctgctggtgcacaggtgggtctggagagacggaggtcagaggtcccaggctgtacatctgcatcctgttcgagcaggagggagctgttgcgggcagaaggcagccggctcagggagatggggagtggccccagagcaggcgggggcctggtgttttgggctctggcataagcatgtttgggaatcacctggtgtctgcacagagaggtccctctggcacagcccactatggggcagatcagagcactcatccaggccctgaggctttggaggtggccaatgtgatgtattctaatgatgggggccttttcccagaccggtgctaggagggaagaaaatgtcaattaagtgccactgccattgggtgaggcggtgctggaggctggtagcattgtatcttcaagcggggtacaaggcattggaggtgtggcagctggaagggggctggctttttcttgggatgcattaacgggagcatagactgttgggccgaggagggcatgttatctcatgttagtgcccaggaacccaaaaggtaaaaggggctgcagatcttgccccttgaggaacatatggccacgtggtgggctggtaggttggaggtgagactcttcaggatcatagctgttgaatgttcaaggttcgtcatggtgagagggtacaggcgtttgagtgtggctgcaaagggaggcgtttagctgattcggtgggtagttcagcccggtccgattgttcaagcgttcctgggatggaactacagagtgtatatgcggtggtgagctccccgttcctgaaagcgtgcaaaccttccagtgttttcacacatctgctggtgctggactagtcgacggggagatcgctgctgttgtagtttccagagttgcgcgactggtccaagctcaggtgatcaacttggccacctggtcattgttgcagcagcctagaaaatctctccttgctagttgaggcccttggccttctcgggttcaggagcacctgacaaagatacttcacc

SEQ ID NO: 72158 - DNA, 1009 bp, Homo sapiens
atctcaccctccctcctcctcctcctcctccttccctcgctggctgcactagctctgaggtaattgtagacaacccaaccagcttccagggtgagggaaggcatctcagggctggcagtgtcggctgggctggtggggagcggtgcccacgtcgctgggccctgggggagcgaggcctgcgcgcctgccggggagcaggcttcagtggacccggcgcatttgctaaaatcgaaacttggctggcttgctggggccgctgtgggggtattgaggctcctctgtgtttttttccagcgtggggagggcctgcagggggccccgggcctccctcccccgtgctgaggatcagcatgctggactgggctgggcaggtgcccgctgctccgggaagcctctatttataatctgtgtttttttgttttttaaaaaaattcctcctcttcgccatcaccctgcagaagaaggctgaagctgcacatcggattctggaaggcctggggccccaggtggagctggtgagctggggtacagggtcaggggctcaggggagggcgggggtggctggagaggtgggcagggaggcgggagggtgcggcggaggaggaagtcatctattaccaagcgctgcccaggcggcgtccgcggaggaagcaggaaacccaccttcctgatgagaggacggcagatagcgggtgggcgggcctggctgggctgggtgggggtggggagtcttggcagcgagcgcctccggggccacctgcgcactcctgtgcataccgtgaagcccggccgctcgggctgtgaggagagtcacacatccgtaggccggtgcgcttgctccagctgagcgcggagagccggttctctgggtcacacaatctcggtccactcccaggtgcaccgcttcatggcggtgtgaccctgagcgggtctgttaccctccctgtgcttcagtttcctcatctgtaaaatgggaatcctaacagcacctattccactggattacagt

SEQ ID NO: 72159 - DNA, 1168 bp, Homo sapiens
ccggcatgggtggtggtctggctgcggggccaggccacctgggccagactcggccttctctcggggagagaggatacctgcgtggaacctgggatatccctggggtgggcttgggctggcaggaggtgggggtgccgtcctggggctgggatggctgggcttcccctcctgctctgagtggctgtggccccgacacctgcacacctgccagatacccacagggctgcctctggggccaggggagggaggggctggggtgtctgtgtggtcgttggctggcttggcctccctgccactggggcagtccccgcctcaccaagttgtcacaggaaagtggaggtcagttaatgaactcctagccaacagaccacatgcgcctgagagcccactcaggaacctcccccggcggatgcagctgtgttcttgttggcactcagggactccaccctggccacctccctgctctcctgcgtacttccagtccatcagcaaatcctgacacctctgccctaaaatatctcaattccagccttctgcccacacctgaggcaacccccggcctgagctcgtcattgctctccagtaactttgcagtagcctcctcctgggtctccctgctcctgcctccctctactcccttcagtttatcttccaagcagcagccagagggctcttataaaggcagacgactgcatccccctgtgtgttcccccctgtgctccaaaccatccatggctcctgtctcaagcaggaaaaagccaaaatccttgccatgggctgcaggtccggcgtgatccagccccgtcacctccctgacctcatctccctgcagcagccctctcaaccgctcacgtacagcctcccaggccaccctggagttcctcaaacacgccaggcacattcccacctggggacctttgcaccggctgtgccctccgcaggagcgccctcccccaggcacattcctctttcctcgctccttccagccctggctgccctccagggcctgcatggcaggggagacctgtggctagccctgtggggactctcgaggccactcatggctgaggctgcagccccaccacgtcctcctggggtgtgagattcagccacaggggccctgccggccttgaagggggtctctgtggcctggggcttgggccgcctg

SEQ ID NO: 72160 - DNA, 1120 bp, Homo sapiens
gagggcatgtgatcgtgggcgctcccgaggctctgccctggggctccgcggtgggctcaggcaggggagagccaggtgcaggcagcgctgcagcccggccccggcgcccggctccccaccgaggtggcgcttggctcggtgcccatgtctggtttgaaatcagcgccaccggcccaggcttgcccagggacttggcagcgaggagccgggataaacactggaaagttggaagggcttcccgagctcacaaggagcctttagttgcaaaccggggggatgagggagtgatttgtcctgaggtctgggtgcgccgcggccatagggaggtggcgggaatggctcctggggacctctgagcccaggctggggaagggagggggctgggcttccaggcaatgttgctcctttgccacagacctgggtttgagtcctggctccgtcctctctatgctgtgtgaccttgggcgtgttgcctcccctttgcagacctcagtttcctcgtctgtaaaatggggcacagtggggtctacacaagcatgggactgacgggagaaggagctgcagttttagggggaacgcggggcagactgcctgggttcctgtcctggttggacacttcctggctgtgtgaccttgggcaagtcacttactgtctctgagcctcagttttcccatctggcaaatggaagttgcatctttccccacctcataggctgtatggcttaagggagtgaatgaaacctgccttctagctcataataggctcacagttgataattcactggcactttgttttctcgatgctgacaataccggcacctggtctgagggtggggggcccctgggatttcagcatctcagggcgatggtatttatgaagttgtagtggccggactgaggttccagtcctggctcgacccctcaaggatggtgtgaccttgggcaagtcccggaatcccacagagcctcagtttccttgtcctttaccacagtggtagcactgcagcctgccggtgtgtctcgggagagcctgagagaagcctgaaggggcccgcacagtgctggcctgggtgggcctccgtaattgtaaccacaaggttggatttaagttcgagttccg

SEQ ID NO: 72161 - DNA, 1022 bp, Homo sapiens
ggggtgtttcctggggaaggctagagggccagctgttcacaggagacatctggcttccaggggcctccgcagccactatgctcatcccctcgtggccagtctgggccccctgccagtccagtggccacgggcccctgtcacaggcaaatctggtcttagtcctgaaaccctcctgtgactccttgtggctgaattaccacgtggatagcggagacaagccaggcttgcccagttcaagtcccagctcagccactagctgttgaccttgggcaagtcacctaccctctctgggccagcctcctgctctgtctgtgtgtggcggctcaggggcatacctgcctatgccgcggtggtgtgaggccagctggtgaaccaggggacccgcttagcacagtgctgggcacacagtccgagctgctgggctcggtgtgtgtggccactgttattgttattaatattattactctcaagatgctcctgagagtaaaaaggatgacaatgttattgctggagttgaaggccaggcccagagtccatctgaccacttcccctccactcctattagctccctgacctcatcgtcaaactctccccgcctcgcccctgcgccccggccacaccagccttctctctgctttgacaacacacccgcgtggtccagcctccagaccttcacatctgccatgcttctgccaggggtgccttcctcacatctgcacccccagacccttgtcatcatgtgggctgctgtccagggacacattcttaggcccaactcttggctgctaggggcagggaagtgaatctggagaccctggtggagcctcctctgcctcctgggagctccagcagcttcctctggcgcctcatctctgctttccagagcacttggagaagcagagctcagcctgccccttctacggatggaaagttgacacccagagaagctcagacttgtctctgagtcacacagctaattgcagccaaggttcagactcctggctgactaccaagccatcatt

SEQ ID NO: 72162 - DNA, 1121 bp, Homo sapiens
gcccacggccacagcagtttctcagagaacaataccatgtctccagtggggcctgacattcttggagacagtatagtctagtggttagtgtcgtagatgcgggtttcacacttgctgagttcaaaaccgacattgccacttcccagccccgtccccttgggcaagtcacttcactgctctctgcctcagtttcccagtatgtattaatggaatgggtatgacagcaccccataggattgttgtaaggcaagcttgtccaacctgcggctcaggacggttttaaatgcagcccaacacaaatttgtaaactttcttaaaacagattgtttttcggttttttgttttttttttttttagttcatcagctatggttagtgttagtgttatgtgtgatccgagacagttcttttagtgtggcccagtgaagccaaaagactggacacgccggttgtaaggcacagtggaggccgcgtgaagcccactgaccctggcacactgagagcttgggtgatgctggccggcgtgatgtgtccttcccgggttaggtccctgggatccagctggctggcgtggagcattcctgggcactcctctttcctctgccgctgcccctgccaccggggtgtgggttcccaggagccccagaacaggcagccacctgccccctgcccccagccgtccttgccagttgctgggtgcccatggtattctggcgtgccggatggtgctgcagttggaagtgagtcttgagtgagcaattaactctgccagctgccagctcacagctgctgtgggtgggggcggccccttttaaaaataaaaacaacatgcagaaaaacagccctggagtaccgttggcttcccttagccaacgtggtcagggcttcattttgatgcttttgtggagaagaatcccgggcctggatggggaaataggatgcattttggtctggggagtgtctttatttaggggcagaggtgatggcctgtgtctggcctccccatccaggaggcaggcccctttcctcaagctgcccacgagtggctggctcatggatgcctgccacagggaaggggatttgggttccttggggccagtttttagcaggctcaggccggag

SEQ ID NO: 72163 - DNA, 1281 bp, Homo sapiens
cccaaatccccaccagtcccttggcactaaatctctagcacccacctccaccccccacccccgactagaggtacccactgatctgctgttatagaagcttttaactcttctagaattttataataaaattatcattttattatatactatactttgttgtgtctggcttctttcactctgcataacccatgttgctcatgtatcaattcattctttctcatggctaagtagtatttcattctgtggatatattacagtttatccattcatcagttgatggacatcaaagtttccagtttttggctattgggaataaagctgctctgaacattcttgtgtaagtctttgtgtgaacatgttttcttttttcttatgtgaatatctaggcattgggttgctaggtcacatggtaaatgtgttattttagtttataagaaaccaccagctgttttctaaagtggctgtcccattttgcatgcccacctgcagtggatgagagttccagttgctccccatccttgtcagcacttgctactgtcaatcttttaatgttagccgttccaggagaccctaatgcacatgcgattacatttttcagcttttgctgccttttgggcaaagctgtggttctgtgttttgattttatgtgtctggccagctggtgggagtctaaaggatggtgggagataatctcgtgtctgccaacgctagctctgtgttttcctttctagtctttatgctgctgactgactgcttctcgtccggctgcagtggttgagaccacagtgcagtgccggattgcaccagttgggttgtttggggttagttagctgtgagtgttgttatttatttttttattttttattttttttgagacagagtcttgctctgtcgcccaggctggagtgccatggcatgatcttggctcactgcaacctccgcctcccgggttcaagcgattctcctgcctcaacctcccaagtagctgggattacaggcatgcgccaccacatctggctagtttttgtattttttttttttagtagagacggggttttgccatgttggccaggctgttcttgaactcctgacctcaggtcatccacttactttggcctcccaaagtgctaggattagtgagtgtttttttttttttttttttttttgagtcggagtttcgctcttatcgtgcaggctggagtgcaatggcacgatctcggctcactgcaacctccgcctcccgggttcaagcaattctcctgcctcagcctccctagaagc

SEQ ID NO: 72164 - DNA, 1036 bp, Homo sapiens
gagtttgaaaccagcctgggcaacatggtgagaccctgtctctacaaaaaaatacaaaaattagccgggcatggtggcacgtgcccatagtcccagctacttagcaggcttaggtgggaggatcgccttagggttggggctgcagggagccatgattgcaccccagcctgagtgacagagcgagactatatccaaaacaaaaacaaaaacaaaaacactccaaaataccaaacaaacaaaaataaattcttgcatgagaatagtagacacccccacccccggaccccatccttcaggtgtccgtcgacccatctccctgtttgtggggtcctctgggtagttaatggggcagtttcccagtagcctagccgtgtggcccggggcccctcggtggtcttgccagggtgtgggatgcctttaaacccacacatctgggattgaatcacagctccgtcacttcccggctctgagaacctgggcatgagatttgattgtctgagcgtcagtctccctctctgtcaaataggtagcagtacctgcctcacagggttctcatggagaaatacttggcccagtgcttacgacacatgggccctgacggcagacatggtcttttttcctgcatgtcggtgtcgtcatgccaaactgcatacatgcgatgtcaactaacaaaacccgtgttttgtccgcaggtctccctgagtctttgaggacacagcctcgctggaggcagtttctggtaggttcatgtctgtctccacttggtgtccccaggaggttcatcctgcctggactttctcacgggaagtgggtctggaattactcggagccaggttcggcctggagtgtgtggtgggggcctcggggggcgtgtggggtctggcacatcagagctgtccagggcagggagcaacttagggcagtttgcggggtcccccagtgatgggccgtttcctggctgagttggtgcagtgattttttgatgacacctgagaggtgggagggtccctgacagtgtcagtgtcaggagggtggg

SEQ ID NO: 72165 - DNA, 1333 bp, Homo sapiens
atggggcagggctcaccctgttcctttttggcctgccccggggccctggctcctgagtgggggtttgtgagagcgtagtcaccaggagctgcaggggagggtgctgaccatgccaaggacatcctgagcagctttgggtggcctctggttccccagctcccccactccccattttgagggacaccagctgcggagtgggggcgcatgcagctcgggctcttggacgtctcctcccgtgggtgccccacagcagctcagctctaccctgcaaagccttctgcaacctggcatgcagggacgtgaggaagcgtaggtttcagcagtggggggatttcttatggatcttactagagcatgggctgtacaatcgggccatttgtgactggtcagaaaaaaaacgttgctcaaaagtattgataagttctttgttgttaatctagagagggaagtctctagtgttaggccacagggctctgtctgatcacgttttcatcagatgctggactctgcactgctggggacgtgtattcacgtacaggtgctggcactggtcatgctcacccatgctgtgtagcagtggagagactgaggcacgtggaccctggggaatcgcctgttgggagttcagaatctgtggggtggggccttgggagttccctagaggcctaaagatttttgtttttgaagcctgtgttaagctgagtaatggtcccccgaacgatgtcctaattctcagaagctgtgaatatattattttatgctgcaaaggggatttaaggtggcagatggaattaaggctgctaaccagctgaccttgagatgggagattatcctagattatctgcccgggctggaggtaatcacagtggtctttataagaaggaggcaggaggtcagagagatttgaagatgctgcgttgctggctttgaggatggagaaggggccattagccaaggagtgcaggcagccgctagaagccataaagggtgatggacaggttctcccctagagtctccagactggatgcagcctaccgacaccttgaatttagctctgttagatccatttcagaccttggatctccaaaactgtaaggtaataaacttatgctggctgggcacggtggctcacgcctgtaatccccagcactttgtgaggctgaggtgggaggatcgcttgaggccaggagttcaagaccagcctggggaacacagtgggaccccctgtctctataaaaaacatagaaaactagctgggcatggtacctgtggtcccagctaatcaggggactgagatgggagggtcacttgagctctggagttggaggctgca

SEQ ID NO: 72166 - DNA, 1068 bp, Homo sapiens
aactggttttattgtgattattattatttttccctttttgcagatttggaggaaggatgtgtgagggagggaagaggggaggaggggataaggggaggaccctgtgggcggggtgggggagttctgggcgcgttgggatgtgttaccggtggccttgactttgccccttttcagccagatctgggtccttgcggcagctttgatataaggggctctccgggccagactgcgccgggagggcgacccggggcaggctgtgtacctcgtgggtggcctctttgggggtgctgaggaggggccgagaaatggcaagcagcagtgaggtgggatggcccactctgcacctcagctcctggggtttgactctgacctttgccactttcctggcagtgtgaccctggacagatgcttaacttctctgtgcctgtcaggtttcccatctgcaaaatgagggtcaaaatggtactgagttcacagagtggttgtgagagctgaccgtccggccataagaatcccttggtacttgtatgtgttactatgactactgtgtcggtattattattcctgggttctaagattgggcctttaatccaacgtggtctggaagccctgtgaaaaggggccaccttacctttggctgggggtggacagtggggggatctgggggagggagggggccttttcccactcccctctgcttgtccggagaggatggagaagggcaggtgcccccgcccattgaacagatgcaaagactgagtcaggcccagcagagcaatgaagggggggtggagccagcggtgactggcgagtcggcagcgcggctgccagggcatcccgggctctgtctggcttccctgagccgcctgccgtgtccctgcttggaaattcactgctgccaccgccagcgggtgccgggggagtctgtggtgccggtgcccagacatgggggcgggagcgcagcaggccccagccctggcctcttcccactgagctatttacgctgctggggatcaatactattgataaatccatgtaaatggtaatgtggctgtcaggccctggtga

SEQ ID NO: 72167 - DNA, 1815 bp, Homo sapiens
gagagaccgtctctaaaaaataaaaaataaatcaacacataaacatacgttctcctcctgagggacagagcttgccccggttgttccatgttgactgtgctgcacacaggccgccccccttgctctgcccctcactgtattaagtctctttgggcctcagtttctccatctctaaaggaggtcggggaggccaggcgggtgttgagtgagatgaagaggcccttggagtcattccaggagtctataggtgactccagtctcttctcacttctgacagcctggtggcgggggtggagtctctgctggggatgtgggtacagggctgtggtgggcggggatgagggtggggtttggtgacagggcgtgggtggtcacccagctttgcctttctccacagggtcctgaggacaccgtgagccagccaggcctggccgctgggcctgaccggccccccagcccctacaccccgcttctcccggactctcccagcggacagccccccagccccacagcctgagcctcccagctgccatgtgcctgttgcacacctgcacacacgccctggcacacatacacacatgcgtgcaggcttgtgcagacactcagggatggagctgctgctgaagggacttgtagggagaggctcgtcaacaagcactgttctggaaccttctctccacgtggcccacaggcctgaccacaggggctgtgggtcctgcgtccccttcctcgggtgagcctggcctgtcccgttcagccgttgggcccaggcttcctcccctccaaggtgaaacactgcagtcccggtgtggtggctccccatgcaggacgggccaggctgggagtgccgccttcctgtgccaaattcagtggggactcagtgcccaggccctggccacgagctttggccttggtctacctgccaggccaggcaaagcgcctttacacaggcctcggaaaacaatggagtgagcacaagatgccctgtgcagctgcccgagggtctccgcccaccccggccggactttgatccccccgaagtcttcacaggcactgcatcgggttgtctggcgcccttttcctccagcctaaactgacatcatcctatggactgagccggccactctctggccgaagtggccgcaggctgtgcccccgagctgcccccaccccctcacagggtccctcagattataggtgcccaggctgaggtgaagaggcctgggggccctgccttccgggcgctcctggaccctggggcaaacctgtgacccttttctactggaatagaaatgagttttatcatctttgaaaaataattcactcttgaagtaataaacgtttaaaaaaatgggatgcctgcctctgtgacagccttgtttgctgaggtcgtgggggtgggggcctctgggaagttccgggctcctcttctcttggtcaatagctcctttctggtggctgccaagagcgtctctcccagggccgggctgctggcttaccttcctgttgttttcaaatttcaaccttgtgcaatgttgagtttcatagaaatactgcatgagtacgcccttgtttagaagcagcagggtctgagtcccatcccacagcccccagtgcagacgcttttgccacttttgcatggggccccctggatgtgtttctgtgcatttatctacaaatcctggtgcccataggacatgccccgtgttgttctaggcctttgctttctgctcgttacataaatggtgaagaagagaagcgggtaagagaacagattggagccatctaaaagttctcatcttaagtgtagatcat

SEQ ID NO: 72168 - DNA, 2610 bp, Homo sapiens
ggcctattctgaatccctgatgacatcagctcccaagggctctgtgctgcaggaagcaaaactgtaggtgggtaccaggtaatgccgtgcgcctccccgccccctcccatatcaagtagaatgctggcggcttaaaacatttggggtcctgctcattccttcagcctcaacttcacctggagtgtctacagactgaagatgcatatttgtgtattttgcttttggagaaactgcccttcctatgttctgagtgaatagcagtttttttgatcccagagggcaacttgtattctgtgggctggtgcctatttgcaaggtcacattagaaagacaggagcaaggcttaggcctgctgcttctggaatctcttgtgcaatagactcccctggggaagtctgctagaaatgcagatccctgggcagccttctagccttctggaataggatcatggtgggaccctggaatctgtattttaatggaccctaatgagattctgatgtagaaacatgtttgagaggcattgatctaaatctgggatgactggccaggtgcggtggctcacacctgtaatccagcactttgggaggccgaagcaggtggatcatttgaggtcaggagttcaagaccagcctggccaacatggtgaaaacctgtctctactaaaaatacaaaaaaaattagctgggtgtggtggcacacgcttgtaatcccagctactcaggaggctgaggcaggagaatcgcttgaacccgggagatggaggttgcagtgagccaagatcgtgccactgcactccagcctgggtgacagagtgagactccgtctcaaaaaaataaaactaaaataaataaataaataaatacatctgggatgactgaccaagaacaaagaatgtaggcatcaactgaacaccaactgtatacctgggactggatctgagggtaggattgccagattgagcacaaacaaacaaacgaaacacaagaaacaacagaagggtgcctgttaaatatgaatttctggtaagcaataagtaatttttattgtgttcctgtgcaatgataggacgcacgtatcctgaaaacctgtctgtagttcacctgaaattcacatttaactaggcgttctgattttatgtggccgccctatctgctgggaacataggctgatgcccctgggggttctgcgtttccttggccaggttcctgtagggctgaggtcatgggggagccgtggccagggatggtgtccttgccaggggaggtgacgggcagagctgcaggccctacaacttggggttgggcagggatgagtcgctctaccgtggtgcctctgataatagctgttattttagtttctgaaaaatgtgctgccctcaagagcttctgaggctaggcctacttgggtgaaaatagctttccagggagccacattgtggggacgtgaggcagcagccccactctttggggccacttggctgtctctaactcatctcacttgccagggctggacaaggagatgaaaaagaaaatgccaaggggtgggcaggcaggagcctgttggcgttggcaggcgctgccagccctgtgtcccagtcaagctctggggcgcccttcctgtccatctgggagtagggggtggagtctgaccatgttggggtggagtgttaatattaggagaggatcctccctgggacagggtccccaggcttgggggcaaggccttctgcctggacccccttcctttcctctctcccaggattcctccaggacaccgtagtgctgtgcacggtttggccccatcggtgtgcctgctccttccagccactgctcccttctgcagaaacttgcctgggattcccagggtgcaggggtgggggctggtcaggggctggtcagggcctggtcagtgtagagcagggagcttttcacttttagcatagatagagtggccagggccccatggctgcacctccctggacataaccaggatgtcctgtcatctgccccccaaacaaaactggggtctcccctttattttgccaacagaatccaatttttaggtgatgagacaagtgtttgacttgaaaagaccctcctgccctgcctcctggaaggtctggagcccagcccagcgccccggatcccctaggcatgtgaaacggggaatgcagtgtcctccagtggctggctgcagcttggggtgggcacctgggtggtggctggtggtccccctgcaggccactgctgccccctcttgggtcctgttctgagtctcaggcctgagtccctggggaaggccccacacctttgccctgtacctgggtatggggatggccctgaggggctgccttgcttgggagaaggggggaaaacagatatttttatataaataagaaaaagacagcccctctgggcagatgaggcctgctgtagggcagggggcttggtaaactgtgtgtccactggtctgtaacccttcagctgggtccttttgtgcagtgaacagcctggacaactgtccaggtggcccttcagggatatgttcctggacctttcttagcttctcaccgatctttcttccacgccaagtccatgttcctcagtcaaa

SEQ ID NO: 72169 - DNA, 1030 bp, Homo sapiens
gtgtgggctgcttggcttgcgcttgagactcccctccccacacccaagttcaaatctggcgttgccttttccatccgtgcctccctagcacccttgtgcaccatgcatttccccctccccacgcttgcttctgccttcccttccacctggaatgcgcttcccgggcatccttcacctggctcctgtgaagaggcctcttccttcttttggtctctcctgtcagaatcagcggctcctgcctcaccccttctctggcgcagagcttgtccctcatcacagggcctggggctttttacagaatggaggaagggatcctctctgtctggttatcttgtcatcgccacgggggtgccctgcagaccacagctctgtgcagacctccggcctggcaggacctgccaatatactgtccttgtctgatgtcccctccctgcccctcttctaggtgcccccttgtttctctcccatcctcacttcctcaacgctgacccggttctggcagaagcggtgactggcctgcaccctaaccaggaggcacactccttgttcctggacatccacccggtgagcccctgccatcctctgtggggggtgggtgattcctggttggagcacacctggctgcctcctctctccccaggcagagagctgctgtgggctggggtggtgggaagcctggcttctagaatctcgagccaccaaagttccttacttcaccccgactccatagttcaaggtagttcaagggttttatgatccctgtactggtttctataaatgggctctaagacagtaaattaattagaacttatcagctgggatgtctcctacatgtgagctggaggcagccctctggatgtgtcaagataccataaagatctttaggtaccaagaagagcctggggtattttgcagataaatcacacagggaatttgtcccgtgtgaagttctgtctacaagcagggagctggacatgtggccctcccaaggacactccttcagcttgtggcctcttctcttggcacctcc

SEQ ID NO: 72170 - DNA, 1031 bp, Homo sapiens
gtttcccaggtgggtccacctgtcttggtttggaagtcctggccaaagtacttttttttcccttttcaatttacatttctgagatctccaaaaggggctgtcttgttgagggctgagccacaggcccgcctctgggactggggctggagttcacttagcctgagtccagtggggtgcaagggggagaaggggttctcgggagcacatgtggccttggcactggaggagcagagggtggttctggtgtcccagatgccccacgtggccactccaggggcctcctgcaccccagcatttcccttcatgggctctttgctgtgaggcccagctggggccaagggaggatgggccagccacgtccagcctctgacactagtgtcccttcgccttgcagggtgcggcggtgatgatggagaataagcccatgaccctgaagctcatcatgaccttggcattcaccaccctcggcgaacgtgccttcatgaaccgcactgtgggtgagatcatgtggggctacaaggacccccttgtgaatctcatcaacaagtactttccaggcatgttccccttcaaggacaagttcggattatttgctgaggtacgtgtggcctggtgagaagccaaagattcaggcctgtgtcctgtcttcccctcacacagcctggacactggtcaccagcttgctttgtagctggctggggatctagtggctgtgggttgtaagtgactgagaacctgactcaaaccggcttgagtgaaatggggaatgttggggctcatagaactgaaaatgctagggttggattcaggtacagcttgatccaggctcaaatgatgtgactgggccttagcttagcaaattggaggctttgctggaggaagggggcatggctgctggggagtaatatcacaagctgactcttaatcttgactcttggcaacctggtagggtcactgactgggcttcggagccaacatctcgtccatggagggtctgaccctgaccttggctccctcaccgcaggtttcac

SEQ ID NO: 72171 - DNA, 1027 bp, Homo sapiens
gttgaagaagcctgcaattcctcctggtcccttcctccacctgctttctaaaatttctggctctcattccttgcctttgagcggtgatgtgtccatccttcagcggccctcggccagcctctgcccaccccagtgccatcacatgggaagagatggcggatctgatccctgactcatcccctgggccaggaagattgtggaaaccctggggtctcagggctggtcgggtggaaacgggaggctggatggagtggcaggtgggggcttttcctgttttgcctctccctaactgggcctcccggcagccactagcccagatgcccaggcctcagagccttgtggaaattcttgtgccagatcatcttggccctgtctggcctcctggcaggcaggtggaggtcaaactggccttacttggccgagagcccattgcagccaggatcccttggcagctctgggaacagccaagtctcccctgtccttgggatttccttccactgtctgttcccaggctcctggactccacctgctgcaacccctcgctttgcactttccacccagagtcttggatttctgttttttgtgaaatttgctcactttgaggaaagtgtaagacatatgcaatcaaatatgtaactaagatgaacatgcatgcaatcaccccacgtgaagaagagggaaagctcatctgccccgaagcccctgcagaagacactgtgtttggtcccagcttgctttgctttttatagtatcactccctcatagccatccctaaacaccgggattagtttggtccggttttggacttaacttggatgcaggcatactctcagtatttttgtttggtttggtcttgctggtgttacttcatatggtatttgtgggatccacccacattgctgcgataagctgcactctattttcatggccatgtcatatcacagttcatgatgctaatcggaagaagctgagtatcacagttcatctgtctttttttttttttttttttttttttttttgagatgga

SEQ ID NO: 72172 - DNA, 1050 bp, Homo sapiens
ggtctagaaggtggtggcggggcatgtggaccgttgtaagggctctggggttcctgggtgggctggcgaagtcctactcacagtgaccaaccatgatgatggtcccgatagaggaggagagggaggaggagggaaaaggaagggtgaggggctcagaggggagagctgggaggaggggagacataggtgggggaaggggtaggagaaaggggaagggagcaagagggtgaggggcaccaggccccatagacgttttggctcagcggccacgaggcctcctcagctcccgccccaaaacggaagcgaggccgtgggggcagcggcagcatggcggggcttgtcttggcggccatggccccgccccctgcccgtccgatcagcgccccgccccgtccccgccccgaccccgccccgggcccgctcaggccccgcccctgccgccggaatcctgaagcccaaggctgcccgggggcggtccggcggcgccggcgatggggcataaaaccactggccacctgccgggctgctcctgcgtgcgctgccgtcccggatccaccgtgcctctgcggcctgcgtgcccggagtccccgcctgtgtcgtctctgtcgccgtccccgtctcctgccaggcgcggagccctgcgagccgcgggtgggccccaggcgcgcagacatgggctgctccgccaaagcgcgctgggctgccggggcgctgggcgtcgcggggctactgtgcgctgtgctgggcgctgtcatgatcgtgatggtgccgtcgctcatcaagcagcaggtccttaaggtgggtgagggagaccccagggggtccgcgcacggacccgggctgttgggcgctgggcgccgggaggacccgcgcgttgcggtgggtgggcgaccgcagcggaatcggcgcccgggcctggcgccgcagagcacgagggaggccaggcgcttcgggaggggctgctgcccgcctccccaccaccctcaccgccccagactgaggctaggggggaacccaggggctttgctggaggcgcaggccagggttggg

SEQ ID NO: 72173 - DNA, 1347 bp, Homo sapiens
gtccaccctgcacctggtgctccgtcttagaggtgggatgcagatcttcgtgaagaccctgactggtaagaccatcactctcgaagtggagccgagtgacaccattgagaatgtcaaggcaaagatccaagacaaggaaggcatccctcctgaccagcagaggttgatctttgctgggaaacagctggaagatggacgcaccctgtctgactacaacatccagaaagagtccaccctgcacctggtgctccgtcttagaggtgggatgcagatcttcgtgaagaccctgactggtaagaccatcactctcgaagtggagccgagtgacaccattgagaatgtcaaggcaaagatccaagacaaggaaggcatccctcctgaccagcagaggttgatctttgctgggaaacagctggaagatggacgcaccctgtctgactacaacatccagaaagagtccaccctgcacctggtgctccgtctcagaggtgggatgcaaatcttcgtgaagaccctgactggtaagaccatcaccctcgaggtggagcccagtgacaccatcgagaatgtcaaggcaaagatccaagataaggaaggcatccctcctgatcagcagaggttgatctttgctgggaaacagctggaagatggacgcaccctgtctgactacaacatccagaaagagtccactctgcacttggtcctgcgcttgagggggggtgtctaagtttccccttttaaggtttcaacaaatttcattgcactttcctttcaataaagttgttgcattcccaattggtgttttttttttttttttttttaagtttattttgcattagactgggtgaagggggtcaaggttttcggtctacaaatgttcctgtggtaacggtgaaatgtcagtgaagggggtggccttaatatagtatgaactgtagaaggtgggtgcaaataaaagccagcttcaagaccagcttggccaacgtggtgaaaccctatgtctactgaaaatacaaaaaaggcaggtgtggcagtgagtgcctgtgattccagcttacttgggaggctgaggcaggagaatcccttgaacctacgaagcagaggttgcagtgatctgagatactgccactgtactccagctggggcgacagcaagactcaaaaaagaagttattgggagatggaagtattttgcatatgtagatttgcttataagttaactttaaaagtactggtttgtgggtgatgtgtaaggtaacggaatgggagaattactggaacaccaggaaaggaattttaaaaggtgggagtgatggggtaactgaaaggatgctttcagtgcataggt

SEQ ID NO: 72174 - DNA, 2655 bp, Homo sapiens
gagaccccgactctgcagaaggcgctcgctgcgtgccccacgtccgccgaacgcggggttcgcgacccgaggggaccgcgggggctgaggggaggggccgcggagccgcggctaaggaacgcgggccgcccacccgctcccggtgcagcggcctccgcgccgggttttggcgcctcccgcgggcgcccccctcctcacggcgagcgctgccacgtcagacgaagggcgcagcgagcgtcctgatccttccgcccggacgctcaggacagcggcccgctgctcataagactcggccttagaaccccagtatcagcagaaggacattttaggacgggacttgggtgactctagggcactggttttctttccagagagcggaacaggcgaggaaaagtagtcccttctcggcgattctgcggagggatctccgtggggcggtgaacgccgatgattatataaggacgcgccgggtgtggcacagctagttccgtcgcagccgggatttgggtcgcagttcttgtttgtggatcgctgtgatcgtcacttggtgagtagcgggctgctgggctggccggggctttcgtggccgccgggccgctcggtgggacggaggcgtgtggagagaccgccaagggctgtagtctgggtccgcgagcaaggttgccctgaactgggggttggggggagcgcagcaaaatggcggctgttcccgagtcttgaatggaagacgcttgtgaggcgggctgtgaggtcgttgaaacaaggtggggggcatggtgggcggcaagaacccaaggtcttgaggccttcgctaatgcgggaaagctcttattcgggtgagatgggctggggcaccatctggggaccctgacgtgaagtttgtcactgactggagaactcggtttgtcgtctgttgcgggggcggcagttatggcggtgccgttgggcagtgcacccgtacctttgggagcgcgcgccctcgtcgtgtcgtgacgtcacccgttctgttggcttataatgcagggtggggccacctgccggtaggtgtgcggtaggcttttctccgtcgcaggacgcagggttcgggcctagggtaggctctcctgaatcgacaggcgccggacctctggtgaggggagggataagtgaggcgtcagtttctctggtcggttttatgtacctatcttcttaagtagctgaagctccggttttgaactatgcgctcggggttggcgagtgtgttttgtgaagttttttaggcaccttttgaaatgtaatcatttgggtcaatatgtaattttcagtgttagactagtaaattgtccgctaaattctggccgtttttggcttttttgttagacaatgcagatcttcgtgaagactctgactggtaagaccatcaccctcgaggttgagcccagtgacaccatcgagaatgtcaaggcaaagatccaagataaggaaggcatccctcctgaccagcagaggctgatctttgctggaaaacagctggaagatgggcgcaccctgtctgactacaacatccagaaagagtccaccctgcacctggtgctccgtctcagaggtgggatgcaaatcttcgtgaagacactcactggcaagaccatcacccttgaggtcgagcccagtgacaccatcgagaacgtcaaagcaaagatccaggacaaggaaggcattcctcctgaccagcagaggttgatctttgccggaaagcagctggaagatgggcgcaccctgtctgactacaacatccagaaagagtctaccctgcacctggtgctccgtctcagaggtgggatgcagatcttcgtgaagaccctgactggtaagaccatcaccctcgaggtggagcccagtgacaccatcgagaatgtcaaggcaaagatccaagataaggaaggcattccttctgatcagcagaggttgatctttgccggaaaacagctggaagatggtcgtaccctgtctgactacaacatccagaaagagtccaccttgcacctggtactccgtctcagaggtgggatgcaaatcttcgtgaagacactcactggcaagaccatcacccttgaggtcgagcccagtgacactatcgagaacgtcaaagcaaagatccaagacaaggaaggcattcctcctgaccagcagaggttgatctttgccggaaagcagctggaagatgggcgcaccctgtctgactacaacatccagaaagagtctaccctgcacctggtgctccgtctcagaggtgggatgcagatcttcgtgaagaccctgactggtaagaccatcactctcgaagtggagccgagtgacaccattgagaatgtcaaggcaaagatccaagacaaggaaggcatccctcctgaccagcagaggttgatctttgccggaaaacagctggaagatggtcgtaccctgtctgactacaacatccagaaagagtccaccttgcacctggtgctccgtctcagaggtgggatgcagatcttcgtgaagaccctgactggtaagaccatcactctcgaggtggagccgagtgacaccattgagaatgtcaaggcaaagatccaagacaaggaaggcatccctcctgaccagcagaggttgatctttgctgggaaacagctggaa

SEQ ID NO: 72175 - DNA, 1014 bp, Homo sapiens
cttgggccttggggaagcaccccatgcttcctagggagccggccattcggtcaagtgggtggcacgcgtgtccagagagcatgcagggcccgggtgggggactgctgtctggtgaagaagctgtgctccgtgctggctgtgacgtccccttgggcagggccaatctcccagggggatggcaaaggtgattccagccctcctggctttgaagccactgggactcctgggggtggcagtggatgcagtttgggtctgggtggcccctgtctgtgtggcacctgctgtccaactgcccacggccccaccccacatctcatgtccatttcccacctgccctcccactctgcgggcatctgagttgagcagctcacctctgatgaagagcagctgcccttcctctaacactgtctcctcaagtgggagttctgggacgtgaagcggcccttggggcttaggctggaagggtgggcctcaccccggacctccccccaggacttcctgctgctgcggtacaaggtggtgatcatcgacgaggcccacgagaggagcgtgtacacggacatcctcatcggcctcctgtcccgcattgtgactctccgggctaaggtagcgcaggaggcgggtgctggggagccccgagccctaggccccccccagctctgtcagaggcttgggcttccttcacctgttccccgttgtaccctgggctgctgccatgagcaggtaccccgagcacaaggtctccctgggcctaggtctaggcctagtgccagggctgtgaatcttggaacagcccctgtgtgatcccctccccaccgccccggtgccagcctcataaactggtgtccttctccccatccaaagcaagaggctcaggagaagtgttgatgccttgccaggcgcaatggggctggttgatgaggcctctgggcctctgggatcagcagagcaggtgggcctgcccagccaagggccaggctcccggagctctgagaggggctccccagggcctct

SEQ ID NO: 72176 - DNA, 1057 bp, Homo sapiens
ctgccgcgcgtctcattcattcattcaccgcgtttgaatggctcctactgtgagccaggcagcacactggcgctctcggtccccacgcggctgcgccctccccagctaccccgggtttgtcctagcctcgcatcccgacccacttcccctgggaccttctgccccactcctcctcctgctttgaagatacttggagttgtttttactttacaggaaaagaagggagcaatgcgatttgctcggtggctttgggaaaccgagcacctactgtgtgcggggcctttcgcgtggagccttttgtttagtttggggaggtcccggatcctgcagcctcctgggaagggtgttgagtcccaggaggatcgcagggggttttccccaattcctgctctctggagctaggtgcgataggggtgccattccgggccgaagtccgccgactagctcttgagaaggaggaagttactggggacagttgtgtgtggtattgcggttcctttgctgttccctggggaggagggggctcttgcttgccgccagccttcctggggttttggagtcagagaagtttgggttcaagttggagctctaccagttggatgactttggggaagtgacttcacttctttgagcttgtttctttatttgttaaatggggatagtaatcattccccttcattgcgaggttgtaattatgactagttggtaccttcctggcccagaatcatggctaaaaagttaaagttttctgctcattgagagggagtggggaatagaagggaatatgaaggccgaaatcagattgactgcatgttcttactggataacatgaaaggttaatttgttaggaaaacagtaagttttgacctccctctcctgtgggcaggggcacctcttgcacaggtgggtctgtgtcttcatacatgtaggggagagaacgctttgtaggtggccaaagaggggcaaggaagcagggctgaacgcctgaatgtgaaaaggttgccctggagtctggcgcgggaaaggatcaggggtgtgagtgcagggagtctcactt

SEQ ID NO: 72177 - DNA, 1063 bp, Homo sapiens
ccctagctacttgggaagctaaggcaggattgcttgagcccgggagtttgagggtgcagtgagctatcattgcaccactgcactccagcctggtcaacagtgagaccctgtctctttagagaaatcaggcagaggaaggcagagatcctgacccaagaggaagcatgaaagacagcaggagcaatggcaagcggcgtaacgcggccctgcagagagtcccagcctccataggtgccttgttcagcccttgcaaggaaggggtcgttttcaccagtttttctcagttaggctgtgatcagtacccagttcaagtcaatcccctgggccagtagtccacatgtgtggtattcatcatgggctcactatttttcccttcccaggtataaactcccaagctccccagttcactgcttgactgatggaggaaaacagtgattgggtgatgaccgttttcttgtttctgcagttcttggccaggctgactgagagatttgtgctgggagtggatatgttcgtggagacactgtggaaagtctggaccgagctcttggatgttcttggacttgacggtaggtgtaggggtggcattcacgtaaggtgtcattctattttggtggttctcatagtgtggaactggtactcacagtgagtaatacatgagaaggttgcggagggctggtcagtgaggatatgagtgaacattttttattttaatagtctcatatataggccaggcatggtggctcatgcctgtaatcccagcactttgggagaccaaggtgggagggttgcttgaacccaagaattcaagaccagcctgggcaacatggtgagatcccatctctataaaaaaaaagtacaaaaaaattgctgggtgcagtgatgtgcacctgtagtccccatccacttgggaggctgaggcaggaggattgcctgagatgaggaattcgaggctgcagtgagctatgatcatgccactgtactccagactggacgacagagcaagactcctctcaaataatcataaaaataaaaaacaaatggcccatcaaagctgagattt

SEQ ID NO: 72178 - DNA, 2466 bp, Homo sapiens
tccctggctgggcatggtggctcatgcctgtaatcccagcactttgggaggccgaggcaggtggatcacctgaggtcaggagttcgagaccagcctgattaacatggagaaaccccgtctctactaaagatacaaaattagccgggtgtggtggcgcatgcctgtaatcccagctaccccggaggctgagacaggagaattgcttgaacccaggaggcggaggttgtggtgagccgagatcacaccattgcactccagcctgggcaacagagcaagactccatctcaaaaaaaagaggcttccctgtgtgtcctcatggagcaaagtgtgactattcacagaggaacttccttgagttcctttggttgttgcaaaggccttttaagccccacaggccagctcaactatccaattctagcttgttaagaaacccctggcccctgcgtaacgagccctgttcctcttttctgtcccgcagtctccaacctgtcccagtatttcagcccagcctcggtgtccagcagcccggcccgcgcgctcctgctggtcggcgtcgtcctcctggcctactggttcttgtccctgaccctgggcttcactttcagcgtcctgcacgtggtgttcggccgcttcttctggatcgtgcgggtcgtcctgttttccatgtcctgcgtgtacatcctgcacaagtacgagggcgagccggagaacgcggtgctgccgctgtgcttcgtggtggccgtctacttcatgaccgggcccatgggcttctactggcgaagcagtcccagcggccccagcaaccccagcaaccccagcgtggaggagaagctggagcacctggagaagcaggtcagactgctcaacatccgtctcaaccgggtgctcgagagcctggaccgctccaaggacaagtgaaggtcagccggccgggcgggtccacagttaccagcacgctgtctcagaaaacgaaaacggaggaaaaaaaccccaaaccccaaacaatcttaataaacacgactgagcaagaaagtggcgctgtgtagggctatttccacccacccggcagctcttaggacacattcccagaagagcggaaagatcattgacgtggaactacacacgaagtgtaattagtgggggaaaaaatattttttaaacaaaggatataaccatatttagttgtacagtaagagaaatttatctgtgcatagagcataaagttaattttttcaagcatttaaatacatcttttgtaaggttttttaataaaggcagattgagtcaagtttattaaaactttacatggaggggaagaatatgctaatttgacatttgagaaaagtttaaatgcgagcgtttgttttcacagcttagggattggtgggtgaggtctgtgtgcgttattttcatgttcccaaactgtgagctttatttcatgttatttttggtggatgttgacttagttcatgaatgttgtcacttctaaatgtggacagttgggctgcaggatgcaactcaacctcttttggatcctagagacccctgccaagcccccatcagtcctatttttaaatgaagacatcgccatttctagaagacctgagattttcttccctctgtgcttcgatgtattttaacctcaacattttgaaacggaaaatgcaaggaggggccaagaaatgtcctggggatttgatgccaggaagtacctggtaaggattggagattgctccagaatctactgcatgtcccaatttgcagtttgctcactagggctatatacaaaagctatacccttgagggtttttttttttttcttttgatttcctcaggaccttagagggaaaacaaacagtagcagctaatattctcaagtatattgctgcttagaaagatcctcaggaacaattagcagcaataagcaagcctttgaaaagatctgaattctttttcctgaaatatttacgatacacaggtgctttttatctgaaatctgttgtgtcctccttttaggcagtctctgtgggcagagagtgggacttgcgaggtggacagctgtggggatcctgggcaagggagtttcagaaggtgtggctcaggggctggtagaaacccccttttgttaggacttgttttttaaaaaagaaagccctaggccaggcgcagtggctgatgcctgtaatcccagcgctttgggaggccgaggagtatggatcacctgaggtcaggagttcaagaccagcctggccaacatggtgaaacccccgtctctactaaaaatacaaaaattagtcaggcatggtggtgggtgcctgtagtccagctactcaggaggctgaggcaggagaattgcttgaacctgggaggtggaggttgcggtgagccgagatcacgccactgcactccagcctaggcaacagagcaagacttcatcttaaaaaaaaaaaaaaaagcccagcattt

SEQ ID NO: 72179 - DNA, 1906 bp, Homo sapiens
gaattgtatgaacctgggaggcagaggttgcagtgaactgagatcacaccactgtactccagttgaggcgacagagtgagacccagtctcaaaaaaaaaaaaaagtgtgtgtgtgtgtatatatatgtatatatatatacacacacacacactttccaataccagtcggcattacccgccctttggtttcttttgctttggatttcagcccccatatcatttctggtaacagagcacagcaatagaatttctgggaagcagaccttgtgaatcgtgcctgtgtcttaattcacaaagggtaagtgaatgccgttgaaaggtgtttcatacacttaccccagaaatgagagcctgtctcatgcaggagtcgggaggcagcgatgtcagggaactgggactatgtctttatgactgtgatggtggtaaccaagtggggtggtcccctctggggagctgagtaagaacgcaaaggtttgggtcagtgattaggaagactataatatgactttgtgcatgcccgggagggctgccttgtagagaggatgtgagcagcttagtcgctcatctggccctgtgattcaggcttatggagcgttaagaataacagctgtcaaatggcctagacatggttaatgcaatttgttgctagtggaaatcctgaattgcttcctttctgtgatcactgctacttcttaagatgcttttgatgaatgtcatctgccttacaagttgacacctgataacttctccctgatgggtttccgaactggctgacttaaccaaaaagccagctcttgccatctatcttgcattaaaaggaattcctgaggctcctaaggggtcagctgccccactcctgacttttttatttttaatggtctataccttctgcaacatttttgtttatggccatttgaatagttggactttgactcctcacttgtgaataataggaatatattttgcagaatctaacataatacccttaaaattcatactggacaaccatcagtgtgatgtatagtatctggtgtaaacaaattttattcagcatattaaattattctgtgttttgcttttccttgatatgtaggaggtgcaccagtaccagtttttctcttgtggtggcttaaaacgctgattgccatttgcattgtctactgaaaagctgtggcagcgagtggtattattgaccatgtgttctcatgtctttttgcagatttaaaggttttattgtagtgtccatttaatatctgcatgtgtgtttaatctctgaataccatgtaattaaactgattaacttgtgatggtgatggtgattagcacacactaaaaacccaatgaagcaattgtctccctcttcttaactggaaatcacacttgtgaggtatggtatccattatcaacagtggattcatgattgacttcatattttgtgtatctggttataaattttgtatagcatttaatttggcacttaatataaatccatttgatttgaatagtgtgtgtgtgtacatggtgtgtgtgtgtgtgtgcactttagtttcgtgagccttgggaaactgattctacaaatatcttatatagagataaatgtatcaggcatttttttgcaaagcgatatatacattcctcttatttattaaatcactggctttggtgttatgtagagatatttgtagatctcagaacagaattaaaatattgtgaaaattacagcttaataaatgtttattgtaattttgttgtatggacttttaaaatatatctcatcacttctaaccaaacatttgtggagtttccccagttttgatgtgtaaccaggattctatggttctattcctcgatctgagaagagtcataaaaccttgaatttatgtattcagttggaggtaaggttgca

SEQ ID NO: 72180 - DNA, 1197 bp, Homo sapiens
atccgtcatccatctattcatccattcatttatcctccacccatcatctacccattcatccatcttccattcatcatcctcatccaccatccatccaactatccatccaactgtctatacattcttctctctacctacccattcacccatcttccatctctccatccactcatctatccttcactcattatccattcatccatccatcttccattcatcatccctcatacatcatccatccgtctatacattcttctctctgcctacccattcacccatcatccatctctccatccatttatctatcctccatctgtcatccgtccattcattcatccatccatcctccattcatcattcctcatccatcatccatccatccatccatctgccagccggcaaatatatgaggacccttgatgtgcagggcatggtaaaaggcatttggtaaagcaaagaacaagacaggcaaagtcccagccctcatgtgagaaccagatactagacggccagttacacaggtgattattcatttgcagttatgctaagtttggtgaaggagaaatacagtgtgctttgcaggtaactagttgggggacctgagttcaccgggttgggggcaagacagccttggagaaggctgctctgaggaagtttcatttgagtgaagagctgcaggatgagcgcacactgagtggagactgctggtgtgcgtggaggagtgttcagcagatcagacagctgtgcaaaggcaggaggtgattaggacaactgaggagtcggaagaaggctgctgtgaccagatcccagggagggatggggagcagagggaggagagcccacggggtcattgtcatcagagcatggagaatggattgcagggggatggtggggagttgacaggctggcagcaggcgattcatctgggcgggggctggtggtcaggatcctcaggcagttcaaggccagcccccttcccactctgaccttggctctcagagaaaccttttggacatctgctacctcccatacaccctgaacccaaggcttcttcctatgttttctccacaggttatttacccaacagtgagcacgctgtcgaggcgatgctggctgcggcaagcattggtgccatctggagctccacgtccccggacttcggtgtgaatgtgagtcagggtctgtgacagagggggc

SEQ ID NO: 72181 - DNA, 1231 bp, Homo sapiens
ttcacacgcctgtccactgagagctcctcggctggctgtgctgggtgctgaagggaccctctctgctgcagagccacagaccgcagtgggctgtccagggagtgctggggcatccgtctttactcgatgacactgggggaacgcgtttctggcctccgtcactcccctgtgctttacttctacccattccatgctctctcccaccactgcccacctccttctgcctgctctctgctggctgcctgggcatctcagcttgccttactaatgcttttgggctcgaagggcatcgccaggttggggaagtgctctgttctaagggttcccaacctttccagccccagcaagatctctaggtcctgagtcttttgatggctttgggttttttgtttcactgtttacctttgagcctttgccattttcagagatgtcagggaaggccaccctctgatccctgcacaccagagagcccagcctgtagcctgcaggccttgtcctcctgaagtgccatcaggtggccgtgtgtgtgtgtgtgtgtgtgtgtgtgtgtgtgtgtgtgtgtgtgtctgtgtgtgtaaataggacagccattctcgctcgctctgggtggctgtcaccatgattcaacaccggctgttggtttcaatgcttgattggttgctaagcaccgtattcaggtcagacacatgttcataggtgtgtttgttttgttgcaacatgaaagctgtcctcgagcagctctcctgggccaggacaggctgacagctggttttggatgctcgagatcttgatccctgctggtccagccaggaaaacttcagctgtgtcagaggacccctgagtcttttcatggggctaggggccagacctctgattcagaaacactcgtctttgtagcctgatcactgtcactgtgcctggggtcctgtggtatttgagccccagatcactggcaggctcagtcctttcaccttgagatcctggtcaccctgtactgggctggttctctgagatcccagtttccttgtggaaattctctgccgccctccggggctctcccaggctggctctctctgtttcttccctggcctcaggcttcctggcaggtcttcctctgggccccactccacctgcccctgggtgttgatctctatgtcctctgttcagaacagcctcttctccctcccgcctaccctgtgggacctgcttattcttgacgctgggctttgga

SEQ ID NO: 72182 - DNA, 1128 bp, Homo sapiens
cccatggactgtgggaccctgccgaccttaataaattataaccaggtgccagagcgctggctttctttcatgcaacctcggattttgtgccccaggtgtatggatggaggccatgatgcatggaggctaggaggaaaaccagacagggtttaccagccccctggttggcctggctattttttctgaataatattcatcagcagttgatataaaatgagggcatccagcagaatcatgttagccacttcatttagcccgacaccccaggggctggactcccactgcagtccatcctttgattgtggatgccacagataaagcagaaacgggtacgtgcccatctgtggagaattgacggggccgggggagccaccctgtgggcttttcattcttagaagagctttaacaaaggtaatcattatgtactgtgatttatgggccatttgacagaaaaggcttttctctgtgtgaagtatctgattagatctggcactttataatgggattcttataggaggtagaggtgggatggggttttcattggctgtaaagttccacagtgaatagttttcctgacatgctggagcagacggctttgtttgtttcttgcttagagttgaattattttggatgccctttttaaaccaccatgtcttccccaggagaaacctttatatttaaggatgccttctcatgcaagacagcaaaattcttcattttagtctgtatggcatttgtatttcagagtaattatccctagcaaatggctgcaggctgcgtttaactgattcccacctccttccctgagagaaagtccatttgtcagttgagtatagggccaatgttttgagatggatgttgctgctgaattcaaaatagaaaaccaccttttcccaagatggcttgtggcttctgcggctgtttctagtgcagaaaacaaatctcctgtttgtgtcgcccctttggtggttcttggccacctacaacaatgctgcctgtcagctttgggggtaagcctaggcacacttcctgggtgacagtcaatagctgggattaattttatttgttcttgcacagatatttgtatcttgctattgtaaacctcaggatctagtaagttagtgacaa

SEQ ID NO: 72183 - DNA, 1061 bp, Homo sapiens
agcctacaaagtcggtatgttttaaaatccaaaactggaacaaaatgaaagccgtccgtgaatcttggctgagtttgggccgtaattcattcaagtagctcattacgcatcggaattacccaactgccgaagcttctgaacagcaggcaattctagagcttcactttcaactttctgctcttattgatttatgaaaccttactaccttcaaaatcatgaaatattccaggcatgcaaagaggcacagagaatattttaatgaatatcgtgcacccaccacccaaccgaggaaataaagcctgacagttacaatcgatgctcctgtagactcctcccagatttccttccttctcgctctccctagagattaccactgcctgaatttagcaatttttcttaagtttgctatccatatatgtaatcataaactacatgaggcattgtgtgtgtttaaaaactttatataaatggcatcttgctaaacatatccttccgcaatgtgttcatcttgccacgttggtgggactcatctgtgctgatctatattgctgtagtttatttcactgctgcatagtattctggtatatgaatatatcacggaatattcatctgtcctcctgctgatgggcatttaggctgcttgctgtttcttgccacggtaaacaatactacagtgagtgtcctggtacatctccttgtgtacaaatgcaaaacttcctccagagtgtatacttatgattggaatcactggagttcaaggcatgtatggtagacagaattgaaggtacacatgccctgtgtaatctccaggaccgtggatatgaggaatatcgctcctgagactggattgtgttttatggcacagttgaatttaagatagagagagtgttaaagacaagataattgtgtctccataccacttaatccttccccgtcccccagccaattcatacgttgaaatgctaatccccaatgcggtggcactggaaagtggggaccttaggaagtgattagatcataagggtgaacccctcatgatgggactggtgcctttatgagaa

SEQ ID NO: 72184 - DNA, 1067 bp, Homo sapiens
gattgaacaacggcataatacttccctaaccgattcccacaaatgcatgcattgagccaagggctgggagagcactttgttgggagccccagttaagggattcatggtgctcatgaggagcagagatgcatgagtctcctcgctgacttttcaggtcctctcgccgttgtctgactccatcctggctgagaagacggtgattgtcctggatgaccgagtcaccatcgcggagctgggagtgcagctcgtagctggcatgtctctctccctgcagccacaccgagcagacaaaagggccatcgtctccacagctgctgccctggatgttcttcagtccccacagcaggtgagcgttccaggggccctgcgtccttggtcagtggggatgacttctctctcagttagcacatcctgcgaaggagagcaggagagccctcacgcctaggactggggattcttgaagcttcttgcttcttatccaggccaccctgtctctgagaaaagtattcagtggcttagacacatttcctcttatgtgcttttccacgctgaccacatccttatacgccatttgctttcccctgggcttatctgtgacaggcacagcctgctgctagaccatgaccaaaggatcacgtgttttcacttttgccaaagcaggtggtttttgatacttggaaattccatttcagctacttaagcatggctaacaggcaccaaattgctactgtttacaataagtatggtcaactctaaaacgtcctcccatctctaaacttctataaattatttctaaagataccagagccactgtaccattcaagccagccagcctcacaatgcaccttcccgagtccttccagccagtgcatgttttgctccatcaccactggcttcttaatgaagagtgttcaaagtgatattatcttgagcagtagcctgatttgttgcacctgaaattgattcagataaattgcctgatctttcaaaatgtttttaaaaaggtcaaagtcaaattctattgtatgtatgcaataaattaatttatagtttaatgcagtcattaa

SEQ ID NO: 72185 - DNA, 1060 bp, Homo sapiens
cagaggattttacttttgattacgagagtggctgttacagatgtccatgtgttcagtgctgggggcagtgatttggctggaaaggcaactgggactggatttgaagctgatatttgcacaacaagggaaagtgctgaaaactagggacgtagcgaagccccacccctatcccaaaccgcctctgccctctagctaagtgcaaccttgatttgatggggctttctttccctgctttttgctttacaaagttcaccacgtgatttgggggtgcataagggcctgcaacttatcatctgcaaaatacattttccgtttgtttctcatgatcaaaagcagcagttcattcccccctcggattcctccacacgtaaagcgtttgcaccgtaagatatcttctagagaggaaagtttgctgaccttgtttacatttctgctgtctttaaaaaaaaaaagccatctctgtctcttcctgcacacggatttaagtgctgatttctggaatccttgaaaccactgattaatttttaataccaattgtctgtttatttttgactgtggatttagaggctttgcaatttgtcagggttcggaaaaggcagaattgttcttgggaggttccataaataggacagggcattgaaagaaagaaatcttttcctaagatttaagacttgggccgaggcaggagaggcaaaacatccttgaattagaggttgatgtattgcgcctgtataaagcaagtggaagggcggtgccaggctgagatgccctcggaagtttagtgatggttgttagtcacatatgagaccttctgggaaggttatgtgggaccacattctcttttctgaaatctgtgggggcaaatgtatttcaagatttagaattactgatatctttgaatgacaagatagaaggaaagatagaaaaatagaggcatgaagtcatatgcatgtgtggtatggcacccttagtctgcgtctggagttgcagcctgtaattgcacatcgtgctgactttgtgtgcaatgtatgaatctttacctaaagaaggataataagac

SEQ ID NO: 72186 - DNA, 1040 bp, Homo sapiens
cgtacctggtttataggggtgcagctgaaaacacatgcaagcacacacactcacaacacattttggagaatattctgaaagaaagtaggcccaagaggtgtatttaacgtccccatcttcaaagacagaaaattgctggtaacttttaaatcagcattttctaatttgcagtctgccctatatgattctcaataatttttggcctatattggtatcatctgcacttccatttacttaacaacagcttttctctatttcaagtcttttaatctgagctttgccctaagcaatcatttccatgaaagtcactgttttacatactaattgcattttccccaaaacatcaagctaaatacataactgatagcatgtttaaaggtcctatgtttcacctcaaattatctcatatttcacatgaggcaaaccctgtcctgaggccctgatgaagatgggcaggcagatctgatatcagctgcttttctttccttgatggaacctctggattgcgtgccctatcctataatgtgaaaaaagggcttccagaaaaggtggaggaattactttctgaaattctgaaaggctggatccaaaggtgcagaaaggaacattatttcctaccatataaaacccagtagggcgtgtgatgctgggacactgtatgagtccattctcatactgccataaagaagtacctgagactgggtattttataaaggaaagaggtttggttgactcacagttctgcaggcttaatagaaagcataactgggaggcctcaggaaacttacagtcatgggaaatgggaagcaagggacgtcctacatggcagcaggagagagagagagtgaagggggaagtgccacacttttaaactatcagatctcatgagaactcactatcatgagaacagcatggggaaagccgcccccatgatccattcacccccgaccaggtccctcccttgacatgtggagatttcaattcaagatgagatttgggtggggacacagagctaaaccatatcggacactgaagatgtg

SEQ ID NO: 72187 - DNA, 1040 bp, Homo sapiens
ttcttttggagcagcctcctgtgaattcagtatctggtatgtgtttagccagctgccactgttttcctcaagctacgtgtgaaaccaacactctgttaagaagtggaaacaagatcctccccgttattgcatcaaaactagggcaaccgaaataaacaacacaaaatcagcgcccggaagtggagggaaggagtgaagccagccggcgtcagctgcacagagcacacggcccaagcctccttggaggatgattgtacctctttggggtggcccccacagcaaggtgatggcagggcctgcggggccctctctcacccggaacacatgctcccagcccagtgctggtccaagctggtcagaggctgcggagctcagactcagcgacaccttctccagggaagcagtctcaaactctaggcccagggggcctcactggccctcagacagtttattgcacacacagcagttaaaagaatgacagagaggcagggagagagggaagagagaagagacaaggggaagaagagagggagggaagatgccacttctttaaaattagagacagcacataaaaactgagattcttagtttctttagaaaagttaagatttggggcaacagcaggctggattcgctgcctggcagccatcggctggagtcagggaggggccgtcccttgggtcttcggatcaccagaggccccacctggccgccctggcattccagccctgcctggccctgtattctctgggttggccacgccagcccaagaaaagcctcttcctctctccacactgacaccacggatcccagaagaggaagccactggcccagacgcttttcctgggctcgggctcttggaagtggagggatcccctgggtgaaatagaagccctggcctcttgggactaagtcagacccatacaggaacctgccggccaaggagccagtggacatttctaagctctgccaccagagggcggggaagggcacaggtgacggccgggcacggctgcccaggagcaagctgggtctggggt

SEQ ID NO: 72188 - DNA, 1033 bp, Homo sapiens
cacttatcaaatttattgatggcacagaaggaagtgaggctgcatgttttaaaagtgagtttggttgaattcggtatacagaaaaatatataaataatgagatagttggttctcaaatatagcaaatactgcaaaatgaataaggcaattacggaaattcaaggaattctgctgtggatgctggcaccctttgtgctctgattatgacgagttatttttctccttatttttcttttttattaattggcgcatatgcctcaaaacataaaatcttgtccttcaaacctttgtgcagctgagtgaactactttttctttttttcttgtttcatttggcttctcttgtttttatttggaagtaagccgaaagcatgaatattcatgatgctgttaaacaagatttttattgaaaacaaaaacagattcaaagtttcttgtttgtggctctctagccagagagtaaaagccccattgaaagattggtatcagagatttgggttctttgctgtttacttttgctaaaaatgtagatgtttggctactaaggggttagtctgttttagaaaaaaaatacaaaaataaaccagtattacgtttctagactgcccttttctatccttgagcaccagaggaagacaagataaaataataaatgaaaaaaagggagaaatattgtttttcctgtttgtcctaagttcaagagaaagaaaagacacaagcatctacagctaaaaatgtgcctttgatttttcccaggcttcctttactttctgatttctagaaaattgatcctcttcatcctttttaatttgtgtgagtctccgcctgctacccccggcaggaaagagggctgcatattttgtgaggttcattaatcaacccattattcttcctcacacattccaatgtgcagggccactcatttttcatgagacctattgttacttggcagaaaataaatacaccatcaaaaatgtattgcgacactgactaaaatttgaaggggagtaagcattgcactttcggtctgtaca

SEQ ID NO: 72189 - DNA, 1931 bp, Homo sapiens
ctcagggaacctcctccttttaccttacagaagagagggatgggctgctaggggcaggtggggggctgcagacagcccacctccagagcccccggtggcgatgtatctgacttcagggagcttcttcagtggttttgaaagcaagatgcttgtgcattttggactacagagacaacatttgttactttttttatgactccagttaaaccttagtgggaaccagattaaatagtaaagtcttgaaaaaatacctgtagcagcgcagcttacctgccgctttccttttgttttctccaggtaatattaacggctgctatttgaactattacttttttcttctggctgctattcaaggagctaccctcctgcttttcctcattatttctgtgaaatatgaccatcatcgagaccatcagcgatcaagagccaatggcgtgcccaccagcaggagggcctgaccttcctgaggccatgtgcggtttctgaggctgacatgtcagtaactgactggggtgcactgagaacaggcaagactttaaattcccataaaatgtctgacttcactgaaacttgcatgttgcctggattgatttcttctttccctctatccaaaggagcttggtaagtgccttactgcagcgtgtctcctggcacgctgggccctccgggaggagagctgcagatttcgagtatgtcgcttgtcattcaaggtctctgtgaatcctctagctgggttcccttttttacagaaactcacaaatggagattgcaaagtcttggggaactccacgtgttagttggcatcccagtttcttaaacaaatagtatcacctgcttcccatagccatatctcactgtaaaaaaaaaattaataaactgttacttatatttaagaaagtgaggatttttttttttttaaagataaaagcatggtcagatgctgcaaggattttacataaatgccatatttatggtttccttcctgagaacaatcttgctcttgccatgttctttgatttaggctggtagtaaacacatttcatctgctgcttcaaaaagtacttactttttaaaccatcaacattacttttctttcttaaggcaaggcatgcataagagtcatttgagaccatgtgtcccatctcaagccacagagcaactcacggggtacttcacaccttacctagtcagagtgcttatatatagctttattttggtacgattgagactaaagactgatcatggttgtatgtaaggaaaacattcttttgaacagaaatagtgtaattaaaaataattgaaagtgttaaatgtgaacttgagctgtttgaccagtcacatttttgtattgttactgtacgtgtatctggggcttctccgtttgttaatactttttctgtatttgttgctgtatttttggcataactttattataaaaagcatctcaaatgcgaaatccatgagccggttctttgcgtggtttgtcctcagtcgctgctggtgtggcgtgtggattcctcccctgtcgtgtagaaggcgcagagcttcccgagtcgggaactgaggggagggtggggaagtgcgctcctgcacagccctcggatgctccggcgcgtctcctgattctgcagcctcctctgcatggaagggtagtttcagcatttggagaagacaaaaaacaaaccaaaaaaccctcacgttgttgttcgttgtgtaatagaaagtatagaaaaactatagaaaaatacaagacatttcaaccagtggaagtaggatagagtgaatacagatgacactcatggtatcactggatctcagaggggccggagttgtgagcccaggttaaaaaaaacggggcaggtttcgaaaagccttgtgctacgaaggataccactttccggagacagaactcatgtcttcaggatatatca

SEQ ID NO: 72190 - DNA, 1134 bp, Homo sapiens
agatgcttttacactttatttccagtggctgatttttgtttatagagtaggagctgctgcccttgcttgtttttctcatgtctttctgttacacttgataggtgaccagtaacttagcctgcacctgcagtgagatctcaatgctgctgagagcacaggttgatttgtgaagtcagcttactttgttgcaaagattaagcctaccctatgcagggaaaccaacatcatcatcatcattattatcatcatttgttgttataataataaatcagtagatcaccttcgatccatcactatgattggaagaacatctcagtattacctgctgttgggtaaaatagcactactgttaattctacagtaggactttttaactttctcctactcccctttgtaagagacaaacgaggtatgggtgagcaatccagatatttgaggattaaatgaaacatgttgaacatctgattttatataagatgctgtaaaaagccgaagtgaaataggtgtgctatgccatgacctccactcagcctgcttaggaggctgaaggctgggggcctattagtcctgggggaagctgtgattagacgtggtcctttcacgcatcagaatcacgtttgctacgaagtctcgtagccaacatcagatttttagattaactgtaaatgttaataaatgaatattacactaacctacttttgaattctaggaattttggagagtaaaaggctgaaccttgttaaagagaaaaccattaatcagaccatcggcaacgtcgtctaccatgctgccgatctgtcgctgtggtggcaggtgccgcagtacttgctgattgggatcagcgagatctttgcaagtatcgcaggtgaggacctttagtgccggaggtgtctgagtccaggcacaagcgtgagcgctcgggcattctgactgtgctgttggaatatgttgagacaaggatagcacagcacttctgtagtttttggcagtgtgtggtttagaatatgaatcgctaggtaaacacaccagtgctgaggttctccattctttgtgtaaaaacagtatcgcaaaatattttcatgaaagtttgttaactaccttgtaagtgccacaggacagagaagaagaaagcaa

SEQ ID NO: 72191 - DNA, 1825 bp, Homo sapiens
gagaatggcgtgaacccgggaggcggagcttgcagtgagccgcgatcacaccactgcactccagcctggaaggtagcgagactccgtctcaaaaacgaaaaaataaaataaaaaaaaaaagttgggcctccaaagcctgaggaagcatgacatacccaacatttttacagttgtgacacttaatttcatctggcccaatctcagtttcaatccaggttgatctgtgttttgaagataatatagtgcttgatattaaatgagaaatgaaggcgtatttgttcaactcatcagaccagagtagaaatggttctacagctttttgagatacatacttctttgggaatccgtgagaaccagtggactcttttcctggagaatacacacacctacatgcggccttcacagagactcaggcacaggcgtcctgaaactggagctcgtcaacttgtgtgggaggagcagagggctcttgtgggtgttcgggtgtcacttgtgaccgtggcttcgtgttggacccttgtatgttgcaaaatagtgcacctaacaatatgtgtaacccagtaaagcttcagatgcatgttgatttcacagcttttaaatattttaattacataaagcgaaagtaatataaccagtaacctgtgtgaatgattctttgtgtgaaaatgggtttatttgttatttaaatgtttttagtgaaaggtatttaatatgatgtggtaaaccactgatagtatctgcattaggtacaaaaggactttaatttcctttttgaaaaaaagtagtacttgaagaagttaatgttttcgagtgaaagtatttataatgtctttggaatttattttcacttttgggtgtttttgtttttgattattttcccccactagactaagtccgtaaggacaggagccctcccctttagcccccaggtagagcaatgcagggcctacagcaggtactcgatcagtatttgttgaatcgaacttagttttcttgtccaaaatttggctaaaatattcagttatagttttcagcgcttctatttttccccactctgaatgtccagacttaaaatgttgactttataagataaagaatttaaaatactggcaccatagtaaaatgggacatgagttaataaactagaaggctgacaggtgccatttctgttggcttcccacagttaaacacaatcttattgggaattaactctctcctggtacttctggctttagagaatagtgtgcactttgttttcccattttacccctgagatccttggagcccgttccccattagagtgttttggagctgggagagagtgcggagctgtctagtggggcctgttcattttctaaataatgaagcaggcccagagcaaggaagtgaaactcgttagtacaagagctggggatgccaggtccatgttcctgctgtgaccggcagatgtgagggcagtggcagggagtggagggacagtggtgtcctgcaggggtcagggcctcaggctgtaaagccaagactgcctgggtccaagtcctggccatacctcaggcacccttcacactctctgtgccccggcatcttcctctgtgcaatagggccctgaagagttttaacaccacatggttaatgagggagcacatgggacgcggtgcactgggcactccctgtttcctactgtcaggggacagagccagggacatcctcctctcatcaccaccagcaccgccctcccccaacagctcttccttaatccaagagctgacagctttcctccgagaatagaagcctgcctcagtcctgccagtgactcagtttaaac

SEQ ID NO: 72192 - DNA, 1977 bp, Homo sapiens
atttagtgtaattaagtgaaacctacctagcaactgtagtaattaaaagcgtggggtgtgctttttgttgagatccgtgaatgtttctgtaaacacaattttgattgtgttgcgcttcttaaaggttgtgatgacaacggtaattttaaccacttgaccgtatatggttttcatccttgaagactgtcatatattttcaagtgtctttcctccctgttattttaggttaaagatcgaggtccggaagccactaggagattttttaattggttttattggagcattaacctgggagcgatcctgtcgttaggtggcattgcctatattcagcagaacgtcagctttgtcactggttatgcgatccccactgtctgcgtcggccttgcttttgtggtcttcctctgtggccagagcgttttcatcaccaagcctcctgatggcagtgccttcaccgacatgttcaagatactgacgtattcctgctgttcccagaagcgaagtggagagcgccagagtaatgggtaagcacttagttctcatcttgggctgtttgaaaggactttatcgatctctttattaacatcctagcttcggtttgttgtgtgcttattgtgtgctgggcctgggctgagtggtttacatgtcttctctcctttaacactgcatttccccaaggaggcgggtgcggtcttattatcccatcttaaagacaggccagtggcctgattccagagctcatgctttaaccccacgttgcactttctctcactgctagtgtagacggaagctcctttggtgccagattataaaggtagaaatttgtggaggacatcgaggagacagaagacatgctttatacatgtttctttttattttaaaaagctttgaaatacatttgaatgaaaaactaagcagttgcttatgctgtcagtacctgtctctgctctttaaaaagtaagccactgcctcttacctaaaggtcagcatgggctccatcatacagcggtcaggtccatcatacggcggtcaggtccatcatacagcggtcaggtccatcatacggcggtcaggtccatcatacggcggtcaggtccatcatacggcggtcaggtctgtaactcttgacaggaaggtgcagtagcagaatggcgagatgcactgagggtaaccagatgatctcatgggacttacccagtgttagcaccaaagtcccatgaactgaggtgttaaaacagaaaggcctgtgtcctcagaacccctccaagtcactggccaactatgactcatgtttggtgatgttggatgccagttaataaagtccagaacttaagcccaagaagagagctcagaagtgtttgtgttactctttattgaggaataatttacagatagtaaaatttaccccttatatctgtacagttttgtgaattatgacaaacttactcaggttgtgtaaccaccagtgcagtcaaggcatagattatttccatccttccagagaagtctctgggaccttttgtagtcagtcccctcatggaatgttttgatcaacgtagaaatgcctggaggctgctgggtgggaggctgatcactcagccatcagagcgtcctgtgtctctgagccgtgcaccccattgtggcatggcactggttgctggacattcttctgcgggcccactcacacatctgcctgcctgcggcctgtctgtgtttgtcttactcatgctcttggagccgtagcgaatgtgtctaatattccttccacgtggtagattgaaacttcaccaaaatagccctgtgcgcctactttgctcctgaacatctctgatttctccggctgtccctgtgtggagttctggcagatctcaccagtctacatgacctattggaaatgccagtgggtcattgtggcattcagacacataattcaaaactgcaaatggtgggaccgcactaaagaatttttagtaattaaag

SEQ ID NO: 72193 - DNA, 1027 bp, Homo sapiens
aatgaggatgaatggcattttaaggttaggattttcccagagtaatcaaatgctgatattttcatgcttcatctgaagaggacataagtctgagactgtgggaagatatgtgcagtgtcactgtgggtaacgggaaggcccgagtgagaccgtgggaaggtgtgtgcagtgtcactgtgggtaatgggaaggtccgagtacatttcagttaggaaatcatttgtgcctctattaagtttatatactatgtttactggcctcttttatgcttgtcaaaaaattactttttgtttgttattttttcgcacttctagttttgttttctcagtaaccatttctctgctcacatttttcatttttcttcctggtccatgtctagtatagcatgagaattggtgtccactgttgagcaatatttaaatgcattgtgtcctagtgaagaagtgtcttagatgtctgtgaagttctcacctcaaactctttattcagtagagatgtctgcatttggtctaggacctctgttcagtattgtaatagataagagaaaagtttaaactcttgagaataagtgattttcttttaaatttagatttttcgtttgaagtggtgttactatatataattaattacctgccaccatagtggccatgcttaatcatttggacttcaaacaaatctctttttgaggagcacacaattttttttcttttgctctatttcctttagagaggaacacacaattttaactataaattttactcctctgatttaatctttaaaaaatagagtttaaaataccatatcaaatatatgactgctaaaaagatgcatgtgcttattacataccatatctttttttttcttttgagacagggcctctgtcgcttaggcaggagtgcagtggtgccatcacagctcactgccacctcctccccagttcaagggatcctcccacctcagtctcgcaggtagctgggactgtaggcgcacaccaccgcacctggctgatgtttgtaattttttgtag

SEQ ID NO: 72194 - DNA, 1041 bp, Homo sapiens
attaagggttgccacgggccaggagaggggcgtgggactgacttaaagggaacaggagttcctgttggtgtgatgagaatgtggacttggatggcagtgatggctgtacatctctgaatatactagacactactgaattgtacacttttgaagggtgaattttatggtatgtgaatcatagtgaaaaaacatttgaagggaaaagtacccttatgccagggtgcttgcccgtgaccaggtggcaggtccccctccaggtgcggctgcttcatggcaggaggcctggctggggaccctgaggtgtgcaggcctgaagtacactctgttgtgccccaggcgagggttaatttgtcctggtttggtccttttcatttagaggaaacctgtttgtatttttaaggtgctttttatggttctttgtcacttacctcttcatctcccaggtagagcctctgggaaacattctgataggagagacaatggggtgaggctgcatagctttgagaaggaggcctagttggcttctgaaagaggatgtgtgagctgtgagtccaagggagacgtatgttcgtgtaaatcatgtcaggccgtatcttcccccagtgtttcacctttttcaaaggtcacaatcgttcttggtggatggattatttgaaatagtgacctgaaagacgaaaatcttatgttacagatgaaaagagcaaatgatgcattttttttttttctagaggaaaaactgacaccccattttaaggaattcttctgtcagccaactgtttggtatgctgtacacaattctattcttttagcttttcttctccaaattgattttggtggtatcttttggccagtcatgtgaaaaccttgtttacccttggtagggcacgtagctgcagctcacacagtgatgtcatgcaaacgatgggcaggaggttgtggcctgctcgccaggggctgggaagcatgtgatgtcccttcacagcagccaggttcccttggtacagaaatgcctgctgtgtggttatttagggcttagtaatt

SEQ ID NO: 72195 - DNA, 1043 bp, Homo sapiens
gaatagctggcattacaggcatgcaccaccatacccagctactttttgtatttttagtagagacggggtttcaccatgttggccaggctggtctcaaactcctgacctcatgtgatccacctgcctcagcctgttgggattacggtcactccagcctgggcgacagagtgagactccatctcaaaaagtaaataaatttgcactccagcaaatatttttgagactgtctcaaaacaacaacaacaaaaaaacaaaaccaaaacacagaaatgaccaaactctactgtacactcaagtaaagagtctggttgctggccggggagccacagagcgtctgtgaatcttgagtcaggcgcgcacacataggcttcttctctttgtggacctgccaagtgcccaaaatctctatgggagatgcttttgttttcaagaaagcctttttaaatcaaatcagaattatttgggaataataggtgcttagtgaatttattagttgaattgaattattacttgacagaaggagagaacatagatcgatttaaaggtgttgcaagtcagccagaaacaagggtacaattttagttcatgaataatttagattagacaaatttatttagaatatttatgagattgcaaagttagtgtcaaaatgccatttaaaaatatgcttaataggctgggcacggcggcacacgcatgtaatctcagcactttgggaggctgaggcaggcggatcacctgaggttgggagttcgagaccagcctgccaacatggtgaaactccatctctactaaaaatacaaaaattagctatgtgtggtggcacgtgcctgtaatcccagctattctggaggctgagacacaagaatcgcttgaacccgtgaggcagaggttgcaacgagctgagattatgccactgcactccagcctggcccacagagcaagaccgtatctcaaaaacaaacaaacaaaaacaccttaataaatcagaaactaccgattgtctctatgtaaccacctgcattccacgcactctgctgtat

SEQ ID NO: 72196 - DNA, 1072 bp, Homo sapiens
gaaaaatagctaatgcatgctgggcttaatacctaggtgatgggttgatagatgcagcaaaccaccatggcacacgtttacctgtgtaacacacctgcacatcctgcacacgtatcctggaacttaaaataaaataagataaaatgaaacaaaaaagacttgaaacaaagcctctaccacatactctatgtcagtattaagttctattgaaaagaaaaatttccaagcattttatcagaaataattttcgtagtgtattcatcaatctcagccacactagcatggctgttctcagtattacagatgaacccacacgacctcagctgctttgtcatgtcagttacatgtaccattattcagaacgagtgggcccattttcaatttcctgttgtaaggttagtctgtcttcaatctatcacaggacgcaatggcgttgtaactaagattcataatttccagtaggagaatgatttgtcatcacattccatagtctcagggttgactgtttcgttggtcttgctattgaatgattaagggaacagccaggagattttaaacactccttacaaagcgttttcctctggagacctacttggctgctgcttaatcttaatgtgtgcaattagaagttgtaaatgtattcagaatatatgggcttagagagactggttgtggctctgatagctgacagtggcagataacggcttaagggtagatgtaggattaatctgcgtctctgggttttatgatcaggcatctgttcgcatttgtgccatcgtttgtctttgtcgtctctcaggctctggggatgggccgtcctcatcaaccttactctatcttcccttggcctctggagcattggaaacctgtgactgtgatttgtccctcccacttggagcttcagacagtgaaaacagaaggtagagtgaagttggtagacactattagtgatcagataccatctgccttctcaccaactattaaccttgaaatcagggggagtgggtgggaagggcttcatttaacactgcatataaacagttgagtgattgattagtcaccagggtgtgta

SEQ ID NO: 72197 - DNA, 1024 bp, Homo sapiens
ttagttttccactgtcctgtgccctcaggttctgagaaaatcataaaaatagcaaataatgataggactaaaataattttacctgaaaatatttcacacatgctgatttgtgtgatgcatttggagttttggttattgtttaaggtaatcgatacagtcttggtatattccaaagtccacattgaattggggtgatattggagactagtcctagttatccagtaaattagaaatctggacaatggataatattgtagaaattcacttaaaatcataaaatgtcaaatacagaaattctaaataaatataatttaaattgcctaatattatgaatgaaagccaaatgatatgaaataatttatgttattgagaaatttatattgaagttagttgtgcttgcagctgtgacttaaacccatttgaagtgtttttttgtcttcttttttcttcccaagcctggcatcaggaggagcccaatgtgcacctggtgattgtgggtcctgaagtaagttgatgtgcagtaaacacttatctcatctctgttttcctctatatactttttatgtattttctacaatcagtttacattgctcttctttatttttttgagacggagtcttgctctgtcccccaggctggagtgcagtggcgtgatctcggctcactgcaacctctacctcccgggttcaagcaattctcctgcctcagcctcccgaatagctgggactacaggtgcccaccaccatgcctggctaactttttgtatttttagtagagacagggtttcaccgtgttagccaggatggtctccatctcctgaccttgtgatccacacgcctcggcctcccaaagtgctgggattacaggcgtgagccaccgcgcccagcttacattgctcttctaaccaagtggagttttcctctttttaagtaaatgaagtcaatttgcctcttaaaaatgaaaactagaccaaggttaaagatcattacaacggcaatgaatcttgacgactaatttattgcta

SEQ ID NO: 72198 - DNA, 1135 bp, Homo sapiens
tgagtcaagtaaacctctttcctttgtaaatgatgcagtcttggatgtgtctttattaacagtgcgagaacagacgaatacggacacggttggggtatagtggataaattaataagtaggtaggctttccagaatcgacgtaagcttatgaactatatctgaggaaatactttggacagaaactagagaggcagcagagcatagttttacaaattcagccccaggagtcagcctgaatgtgaatactggctcagcaactttctagctgtgtgatcctggttaagttatagaactctctgagcttcagtgtcttcatttgtaaaaggcgggtaatgataaccaggttgttggaagaaataagctaatgcatgtaaaggacttagcatatgttctgcacagagtaggtggccgagaagtattaactattaatggcaacaacagcaataaacaaaaaaattgtgtatggctataatttttctcttgaaatagatttctaggaattcttttaaattttcttatgcatccaaattggctgaaggctaacagcaaattttcagtgacttagtgacctcagggatgtcaacgagcttaacattaccaatcctttgcgttaaatctcaggctttctggtcatctgaaggagctggggtttaatacacacgtgaaacatctccttgccagaagaaatggaaataaagtttctagaaagcagcgttatttcagttagtgttataaactgttgggatatcatcatattcttcaaaccaacttggtttgtaactcataatgcctactggtaaagtgtaaatgagaatagaaattgaatatgccttcactcccggctcatcaggagtagcagctgggaagaaactgcaggcatagcattagcaaaatgtgtttagaccctctgcctgtatctttgaataaatgcttagaattttgtgttacacttgcatatatttaggaatttttttcagtattttaaaattctattcattgtcgataagaccaggagaggcatgggtgttggttgttttgttgaagactttgctgttggatgagccagatatgataactgtattctgcagctttgtcctgagtgggctggaaaaggtgaaacagcaccctaggaagg

SEQ ID NO: 72199 - DNA, 1040 bp, Homo sapiens
aaaaacacagagggagatggcagaagctgtgtgtccgtgcccatgaatctgctgttaggtgctttcagagcacaaagtgtgagtttgtaacgtgatcatcctcagccagatgtcagcacctctgcttaggggttgtcactagtattaatctccattgtcctttcaaattacctcccaactgcagtcctcggggcaatacattttattcgtcatgtaggctttaaaagtgtatatgcttatggtaccagtatttgaactattgtgaactgctcctttgtaggtaaatatacattttttttcaacttcttaaggaaaggtagagtgaaattcgggaatgattttataactagcacacacagcacttcactgcggatgaatcgctgtcaaacctcatttacttcaaagcaaaggcagctgttagcaactctgactgccttaaaatcttgatgttgtgttccttttgaaaactccaaaataacctttgggcgaagtgttttgaatgaaactgattttagaggagtggtaagggtgcatttcattagaattcaattcagatagccacagtgtttaatcatggaataagtgcctatcacttttgaaggaagtgaccttttgacctttcagaattagctgtattttcccatggaagcatagaaacgtcccatttgcagaaacacgtttcttactgataaactccaaaaatcaaactttagctggattcgtgggcagcggggtgaacaattctacaactaatcagttgtttccacttttgagctttttgacggagttgaatcctgcagagaattacattaaaagtatataaacagttatttgcttatcccagccatcatgattaggctcacacacacacgcacacacacaggcacacacacacacgctcacacacatgcacctacagatgcatgcatgcacacacatgtacacacgcacatgcacacgcacgtacacacacgtgtacgcacacacacacgctctgcctgagagagaggaagcccatcttctaaagcagagacgagcac

SEQ ID NO: 72200 - DNA, 1008 bp, Homo sapiens
aaataatatcagaataggaagagttttcagtagttacttgttgattctccaaacaaaggcttattgctttttaccatattccatgtctctcaaaatcaacgccagccaagcttcaggtcagtgaatattaatatccgctctggcaaagtgttctgggattttttttttccatctcccaaaaggcaacgtctatttactttatagctcaatttcagaggaccaaagaaagcactccaactttatcagtgaacgtctgaatagcaattccttataagtggatctattaggctgaacaaaagaatgagagctgtttggctcttccaatttcatacagcctcttgtaagatactccttttaatgtctgcaaatcattatcgtgccgccgatgtattcaggtcatttctgcgagttaccggcttcctgtgagccatcagacacgactctgcggcactcacggagtctcgttgcagacttattttgattccagcgctttcgtgttcatttcacaaaggatgttaaaaaaaatagaactcttctggttttatgttgggggaggctgcgattcttaacacacgttgaaagagtgtgctagacgtggatgtcgcacctggttcagtctggtttggttttctttacggtcttcttccaattttacctagcatggggtaggagctgttgttttaaacaacaacatgcattttaaataagtcagggactatggttctatgaatcttgactaagaaactcagatgaaaggaaccactagtgggttgccagtgttggcaagattaattttaaatatgaggccgggcacagtggctcgtgcctgtaatcccagtactttgggaagctgaggtgggtggattgccagaggttaggagttcgagacaagcctggcaaacatgcaaaaccctgtctctactaaaaatatgaaaatgagccaggtgtggtggtgggtgcatgtaatcctggctacatgggagggtgaggcaggagaatcacttgaac

SEQ ID NO: 72201 - DNA, 1072 bp, Homo sapiens
ctgcatgttctgcacatgtatcctgcaacttaaggtaaaataaaataaagaaaagcggggcatcgttatttcagatgccctaattattatgttggctgagtatttatgtaaccaggctacgtttgttctggtccaatttttattaaaataaattcgtatttccctcttttcttgaaccacaacttaaaattactccaaaatttgagcaatttggagatattcgtgtctctcttcggaacatctgaaaaccctgaaaaaggattacagattttcatcacctcctcagcacatgcggattgttaaaaatgctggcaactgggggatgggtgggctagaagttgagactccatcctaaggactcaatcaatgcattagtcattatggatattcacaaaaataaagttatcacatgcattacctctcagttcataaatgctaagtgacagcctatgacttagctacaaaaatggtattatcgagataaaaagaatctgagaggaaattgagaatgcaggaaggagaaggtgctagaattgaacactggcgtaaacataaatcacaaaagaagattggtttaatgcaatatgagagtcagaagctgaaggtgttataaagatcatccactcatcagatgaagaatccctcaggctgaaaatctttggtgagaaaaagcatgactttggacaaaaagagccagctagacagaggctgtttaagcctatatgagaaataacctatcattagggaatatcctattttataaattttaggtacaaggtaagaaatatttctgggagtacaacgtatcatatctttcatctcaaagtagttttgctgaaaacagcccattttgaagacttttcttatatccaaggcttattaatcttatataggcttacctagctttactctgcttccaagatattgcatttgttataaattgaaggttcacggcaactctgtgttaggcaagtctgtcagcaccatttttcgaacagcttgtgcccacttcatgtctctgtgtcacatttggtcaactctcacaatatatcaagctttttcttttttatta

SEQ ID NO: 72202 - DNA, 1077 bp, Homo sapiens
cgcaatccctgcagcttctccattcctgagctgaatatttgaagccatttggctaaactcttggggtggggacaaaaaagctgatcgggagttataggatctgcaggtggagaaaaaaagaagggactatttaggaaactgcctcctgggggctgtccctgtggctgcgcaggttgtcgggcgcccagctggattgcagaaagagaactgctgggagccggctctccaccactctcctctcctcaggaacaggctgctggaagaggagccaggccattcaggccccaacactgaagcactccaccagggatgctgaaaatagctgcagaagagcttctctgattttccactcgtctcttcctcccagttgtttactcagcttgttaagcgttgtgctcccatccccgaaattacactccttctcctcacagcagtttgctgcactcacagaaagattccactttgatccaccttaggagaatgtgtcaagctttatacacctgatttccactggtgtgtgtctctggtgcagaagcaagggtggatgttgatgctgttgaaatgctgtataataaagcaggttcaccaagagcagctgtaatcaggtagggctacagccccctttgatttttatcagtggacatttctgaaatatttggtggatactggtttattcaggacctgttaatgaacacttgagtctgtaagttgcaacaacaaaaacaaaaacctcagcaaatttttcaggagtaatacttgagcccacgtcaatcttcctcctagtgtgtgcagtgtggctggctttaggagagagtggctctcccaccagctgatctgtgggttcttacaatgtccccaaccccgaggctatcccactcctaagtggctgcaggggacatgggttgcttttgctgcagagagtccactgcccttctctgtagtgacaatacacaggttggccctgggggaccctactccccaaactcctcattgagttcatgtgctttgagatgatttagggcttggacaaccagtatgtttggatccctgggctgcagtgctgggctcaaggataag

SEQ ID NO: 72203 - DNA, 1080 bp, Homo sapiens
gtgagactccgtctcaaaaaaaaaaaagaaaagatctgcctcatgccatggtcctgaggcgtgaggaccacatttatcttcaaaatggaggatggcaaagcagagctggggcatgactaagtgatggacatggaatattagaagctttctgaataacgagagaaaataagtgaggctctcaagacgaaaaacctatgtttctgtcacccctgatcacagtaactttgggaagtttctattttggtatcagcctcttcttatctgtgaaataatgtcacaatgaccccatctacttaatagaattcttgactttttgttaggaagatcagtgataatatgttttaaaacagcctatgaattttccatcatataatggaattctctctataacatctccactgggaaattgtctagctttcatttatcttctctggggacaggaaataatgcattacctcttagggaaacccatgcttttctatataaatagacataatagataaatatgtgggtaaagtatggttatgaatatagatgatagagaaaaagataataaagctataaatgttatgtatacagagatagatgacaggtaggtaggtaggtaggtaggtagatagatagatttgtataaataatgtctagtgggtggctcgctttcattttattattcatttaagtcattattggtactcctctttcgcatgtccttatatccaacccaataccaagtcctgttgattttacctgaaaaaagatggatttatgtatttttcaaatctatccctttcttcctgtatccactgcccctattgtactccaaactattcttttttctagtgtaaaccattacaaatgtttcaactactcttaatctctctccacactattttctatactgtagatggtaatcttttataacttcatttttgatgatgtccttatctcatacttaaaacatatctatgactttctttggctcttagatgagacaccagaatacttcacatggcaaacaaaacctagcctacgtggtctaacccctgcctacatttccagtctcttctagtatcatctttt

SEQ ID NO: 72204 - DNA, 1032 bp, Homo sapiens
ccacccctcttctttctgcaacagaaagaaaaaagccactcctccgagtcagaagccaggggagaaaacacacacacacacacacaaagctttgtgtaatgcacagtaatgatagcccttgaaaatgtctttgctttatctactaaatgccagcctcagatgcagagtggctgaagtggaggagctggcctgggtagaaaaatatatttcaggagtgtcaattctgtcctcagctgttcctgaatccaagtgtcacgtgtgtgctcttctcagcacattgagagcttcgttatctgttacctaggctattgaaatgcttttcggacatttacccagggtattttacacacagctgcttgattaatccctctaaagcgcggttctgggcttgcctccttccgagtgaaaagcttcagtggccttccattgccttctgagcaaattggaatcctgctgcctagcaatcagggccctttgggacctggatctaacctgtatttccaaacatttagtccattacagctgttcaagcacagaacaggtcattctgccatgccttcccacacagagtgtccccacatgcctaaattctttctggttttcaagccaaattcaaatgacttgaccttggcatgtctgctctgtcatcatcccaaattcctgtgatacccgagggtgcagaggagcctcctcccttttaatctcctctgggttccaccacagtagcaggtgcaagtgatgtcacccagccccagccaatcagaatgctcaacctcttggccacagtgattggtcagggatggtcatgtgactcaagcatggccaatgaaattccatcccaggacattggctggagctatagggaagccacccatctttccagtggggacctggaactggtttctcttaagcccccagcttcctttcaccatctttgagagtctgcttggaaattgagatagagaaaagcagagccaagaatatgtcctgatgataaagtttcaatcctggattcaaccatgtttggatcca

SEQ ID NO: 72205 - DNA, 1111 bp, Homo sapiens
ggctcacgcctgtaatcccagcactttgggaggccgaggctgacagatcacgaggtcaggagatggagaccatcctggctaacacggtgaaaccccatctctactaaaaatacaaaaaaaaaaaaaaaaaaaaaaaaaaaaaattagccgggcgtggtgggcgggcgcctgtagtcccagctactcgggaggctgaggcaggagaatggcgtgaacccgggaggcggagcttgcagtgagccgagatcgcgccactgcactccaggctgggagacagcgagactctgtctcaaaaaaaaaaaaaaaaaaaaaaaaaggaaaggaaattatgatgttcaggtgaaatttttaaatatttataatatcatcaaggccaaacaagacatacctgtgggttatcagtttgtaacctctagttcagacatcaaacacatagacatctaaactgaatagtttggcaaatattattgagtgcactgagatggatgtagaagagttttttgttgttgttgttttgttttgttttgagtattgtgtggagtagcttggtaccagaaaaagaaaaccacttaaaaatccagtaatacgaaattgactaaatgaactatagtagctacattgaacagaatgcagtgtgtccattagctgtgatgacatgcatttggaaaaatactttggatatatggttaagcccagagcattttaataaagagcgccctcaccctaattccatggggcatatagatttaatctgtgtccccaagggtccctgttgactggacaatttctccctctcttcctctctgttattgacagatgtatagtgaactggagagcttagtctctttcctcatattggtaggtcaaccagttgtctggaaaattattgtattatggctagaaaagactttagaagaatctgtaccaaaatattaatgtaattatctgtgaatggtaggattatataataatgatttttaaaatccacttgctatcagtaattatgaactcatttactatttagaaagagtatttgtatattttagaaaataataaaagttttaaaagagacaattacattctactataatgatttccattttcctcaaat

SEQ ID NO: 72206 - DNA, 1034 bp, Homo sapiens
gccatactggtgaactgggtgaacttatagatacacaaattgaaacacatctgtaccagtaatataatttggaaatcaggtgctatctcaataaaatatttcttttgtgttttgtagttagcaaaaattgggagagatggacacgggggtggacggatgggtagacggatggaggaatggatagattgatgggcaaatggatggatggatgagtggatggatgagagggtggatgaatagatgtgtttattctttatcagaagaaaataataaatttaggggaaagaatctcaaccggtgaactttcattttctcttgtgatttcttttgccatctctttttatgtattagtagaagcagtagttgtagtcttgtctatgagagactgagggagttgaaccattagaaaatatttgtgccctttttattgttaacttctgacaaatagttcagttcatcttggacacagagagagagcatgggggggcccaatggtggctccttcccattgaaatgtaagctgcctttttatagttccagaggcttccagaatctcagcacattcagaggacatccaaatgcagaaatgcatggtggatgccatttatttttctttcatctgtgtcagtatcttctttaagaaacgaggaccctgaatagaatataaagctcttcttttaaaagccctaattcttcattctaagtgaagaccattccttatctctttgtacattctgatgccagttttctgtttccttttttatcttttttcttcttgtcttctggaggccaggatatgtttcctcatactatgggtctggatgatggaaaaaggttatacacatacagacacacacacacacaatatgttatatgtgtataatatgttatatgtgtgtacatgcatacagcatattatatatgcatatagaacacatatatgtgatataggtatgcaaatgcatgcatgcatatagatgtacattttacaggtgttttgttgatagacaaatgtgttgaggtagggattttac

SEQ ID NO: 72207 - DNA, 1036 bp, Homo sapiens
gcaaaaggctccaaatccactgtgtttgccttcccattgttcctggctccctgtgaagaaaacattagtggtttttggcaatgagaacatgaaccaatgtgagagaaagctgtcaggcccggggaccgttaaatgggagatggatggggaaagtgatgggtcctgacagcctgggagtctccggccatccatcacactctcaccatgaaagagagatgccattcagatgtacttaaattcccaaagagctgacaaaatgaatccagtggaggaaggctccgggtgtgaatcatggtccccttgacttcaaggggtattaaaatgcacatgaggaaatacaaaccagcagactcaatatttgctaaacccttagtaggctcaatttcctggggaatttggttctacttatgtgcctattcattctcaggtgacatataagaaagctgtaatgggttttctacctactatggccgggagtcccacaaaactaagctcattggatttatattgtttcttgaatttaaataggtaaaagctccttgtaagaattggaaacaatgtatcttgaaaactttggatttgtctgattttccacatgtccataggtggttgatctataattcataagtgttatgaaacattggagaaaaatacagaggaaagccaaccatatccagggggaagatgtttgtctctttgtacatgaattttgctttgtctgtaatgcgacggtaaagtggagttttttgttccttttggaggacagatgatggttctgttaagataaaaaaattagttgtattgaatacagaaaaaaacatttaagccaagcatcctacttacccctatgtgggatttaaagtgaatcagacatggtcctggccctgaatgaacttgttgtctacttagggggcatagagggggacagtcaaagcaaagagaggactgcatagaagatgcgtgaatgcaccgaagtggctgacaaagtgtcacaaagtggcacccaagtgatgacaaaggtcatcaatagttagtg

SEQ ID NO: 72208 - DNA, 1097 bp, Homo sapiens
cattgttttgtagcaagtaatacaccccctcttaggctaaggggatttgttgaagctttgtaggagaaatgaaagaagaaatatctaagacatttctaggttactttatctaagttatttgcaactgtttatctaaattcctcaaactacagtggtttttctaaccaaccaggggtttactggattactgatgctgctttcttttcctagaaagtttattccctattgtcttcgcatagtttttactttctccatgagcaggtcccatttcaaatgtcacctccccagaaaagctttttctggctactctctcaagcacttgttactagctgaaattgcattatttatgcatggtgtttgatttcaatgctcatctgtcccaagctgctggaagataagttccactagtagaattggtctgatttgcttactctgcaactcagaacctagccttgtgcttagtgcacaatggcaatgtcatgattatgttctgaattaatagttgactgcatgaagtaaaatgcaggtaccagcctccttttcggaaacaaatgcagtttagctagaagctcagaaaattaaacattctcagtgacctgtgttaaacatccagtgtctaagtttaaggacacactttggtaagttttctctcccttggccacagctgctttcctgcagaccatggctatccatgactggttgccaagtgcttttcaaatgagagaaaggcaaatggcccattgtgtttgccattaacttacccgtacatttttataaactgcaaggcattgttgccttgaaggggaggctgccctctcaaacgatgaccttcagcatttattttaactacaaaaatgtatttgactgacggttaaggggctgcttagagactttgtttatttccttcttgatggtggaaatgtgagatcagccccctcctatcccattgttttctgacttaaccagttgacggtggaaatgtgagatcagccccatcctatccctttgttccctgacttaaccagttgacggtggaaatgtgagatcagccccatcctatcccattgttccctgacttaccagtgccagctacctct

SEQ ID NO: 72209 - DNA, 1049 bp, Homo sapiens
gagctgggattcaaataaataccacttggtgaggccccgtgttctgtatgccagcccaagttgatttatgttacttccaaccaagaatgtcctggtgaatatgaagtattccatccagtgacgtgctcttattgtttaaccattcatagacatttagggtgctcctatgctgccttggtctagttaatcctgctctgagcatctttagcggtggaaaaagatactctcaatatataccctccagacacgcaagcctctctctgttctcgggagaagtgaagcttgtctctccctctgggtttttgcactaattgttcctttgcctggaacatcctgctgcttccatatcttcactcaaccgaccaacctttctcattcccagccctcacctccagtgtctccaatgagtgaaggctctgctgattccactgaaatcaccaccaccacccttacctgccgctcatctgtcatctcatgctattgtcttcatgacacgtggcagcctccacaattaagctgttggctgtctacctgtttgtgttccatttcactccattgcaatgtgtctgccttgctcactgccgccgccctcgcacctgaagtttgcatagcatacaggaggcgcacgatgtcgaatgcgtaattaagtgaatgactgtatcttttttaatttagcaaattatttcgtcagcatgaatccctacgaatggaatgcctacagggcatttgtatcctagatccttgcatacccaggagtggctgctgcccagaaaagcagcctgtatttcccccttgtttgttctaacaaaccgctgactcttccctcatgattttctgctctgcagggatgaaaagagtcctgtttgctcttgcttccttttctcagtggtacagcaatgaatcttgcgcactctgtcagcatctatgtcttctccattcctcaaagatgctaaaaaagataaatgatgtgggaggaagtccgagccaggagttgcctaaatgcaatgcagcttccgccctcacaggtccccaggacctgggctcaatga

SEQ ID NO: 72210 - DNA, 1041 bp, Homo sapiens
gcagtttgtgtaatggagagagcaactgctcctgaaaagcacgttgaatgatcaaattttattggtgcatgaaaacgtcagaggtgaatatcgttgtttggtggggcagctatttaagctcaggtctgggcaattgctttattcttgtctgaagagagaaagaaaaaaatagatgttttggattacattttgtgtgtaattatatatgacagatgtattaacttagccgttccagggtttttggaaatctgcctccaaactataaattttatttgactttttcatttgcaggtggcacgaaaccatttcatgtatatttcgtgggctccggagaggcaggaagtccaggaactattgtgatgctgtagctcattcattctgagagagacatgggtgtgtggttgggaagtaaatcatctgcgtttacgttttgggttaaaaatgttaacagcagatcgaagacattgaaagcaagcttttcatttggtgggggaaaatcactattagaaaggtctgagcaagtttggagtgggaataaattacttctccttggttttcaccttttaaagcataaatccttctatttggagaagttgcctcattgaggaagataaaggtgctgttcttttttgtgtatgtgcgtgtcttttgtttgtattttacctgcaactgtagaaagttttaaaaagcaattgtttgtaaacctagcaacttaacaaaattcatctggacgtgtgaattttgtactaagatcttcagtacaggactctctgccttgtaaatagcaccgtggacctgtgtttagttttggtatttccaggcttacttcccatgaaaagggaatatccttgagaataaattcttttagggagatgtcaacaaagaaaattgtcacaaaatactttccacaaacatgcatattttaaataatgcaagcagcatctataaaaaaataattactagacttgggtaacacatatgttactgcctggattacataattatttctggaatacattcctttaagtggcagtggtcaca

SEQ ID NO: 72211 - DNA, 1022 bp, Homo sapiens
tgagatgtgtgtgtttaacatgataagaaactgccaaactattttgcaaaatggttgaaccatttggcatttctgccagcaatgtgtaaggttccagctgttccacattcttgccaacacttgatattttcatattgtaattttattgtagccattctaatacatgtgtagtggtacttcattgtgattttaatttgcattcccctaattactaatgatgttgagtggcatttagtgtgattatttgccatctgtagatgtttttgggtaaaatatctgttcaaatccttttgatattttaaaatggccaaataatttgggtggctttactattcagttttgagaattgtttgtttattttgtagacaagtctttaaaccatatacatgatttgaaaatattttgtctcagtctatagcatgttgtttattttaacatgtcttttgcagagaagactttttatttagaagacatccagtttatcttcttttctattatgtaactgatattgccatatcttagaagtctttgccaaaccaaatgtcataaagcatttcttttttgtgctttttccataagtttaatagttgtgtcattttgggcaacatagtgagactccgtctctacaaaaaatcaagaaattagccaggcatagtggtgtatgcccatggtcctagtttcttgggaggctgaggtgggaggatcgctttagctcaggaggttgagattgcagtgagctacgattgagccactgtgctcctgcatgggtgacagagcgagatcctgtctctaattttataaacactgttacagattttattgcattgaggtctataatccagtcttggttaatttttgtgtatggtggggtgtataggtcaatattcacttttattgcatttgagtatccagttgctctggcataatttattgtaaagtttgttatttctcttttaaatcgactttacatttttgtcaaggttgtctgaccgtatatggtagatatactctgagctctcttt

SEQ ID NO: 72212 - DNA, 1040 bp, Homo sapiens
gtaaaagcctccacagttgcaaaagtacaattagacagttcctttaatcaaggagcttaacactaccatcccatagcccattaagagatacatttgcaataaaaaatactttttatcttaaaaggtatttattaaaatgtgttatatatgtatttacctttcattgttttgattgtgtaacagtcataattgtaatgacaccaatccaaagaaatttttgcataatgagaatcttacagtgaggagaaactttaaaaagtttaagttcaatatataaccatacatttttgtggtaagaagacataataaggtaatggacagttactttcaaggttattacattaggttaaaattctgtgaaataactggaatggaaacatgagttcaaggagaaaatggaacaaagtaacatttcttattagtgaagagtttttcatgggttttataagtggatggtcgtgggtgtcaagccattctgttatttatattccaatggatacatttaaaagagtgatgtaacagtttcattttaaaatgtcaagatttacaatacactagaaacttcatccttagcaactattgaaactggatgaaaaatattagataccacttttgaaatttgcaagtgggtacagagtttaaaaagtgttctattaggagttgcaggagcagtagtgtgggaagaccattgtttttacacgagtggttctcagccttgggtacacattagaatcatttctagagttttgcaacagtccagtcagcacctgagccacggtgtagaccaatgacatcagaatatgccaggatcagttccaagcattggtagttttcaaagctcccaaagtgattctgatatgcaatcaaggttgagaaccctggagcaggtccttcaagggaagccatctgttgtgtgtacaagggttgaggcagtgattctgcactctggctacacgttagactcacataagaagatatggtgagtggagaaagtcaggctaattgaagtataatttgcatagagtaaaattccctctact

SEQ ID NO: 72213 - DNA, 1033 bp, Homo sapiens
ctaggtggccaaaaattagcacgtaaaatgtttacgataagcctagcatatgacatattttgtgtattgaacttaagcaagtcagccagacagttcaaaagtgaatcagttctgtgtggagactttgtacagcaattagcagagtctgagcacatggtagatgattcaggattagtcacaatatgtcaaagaacaagaaaaaaatcaacacccctattagcaaattgcataaaatggaatttcatgatgcagatgtgatttatacattcagggacagggccattcttttcccaatgtgttcatatcacctccctctaagattctctgatcacttgaaagttctcacccatcttgcaatcaagtatggactatattgaaaaggattttaattgaaagtaaacacacagacacacacacatacacacataccccaaagtgcctcatttgtctggggctgattgaaaaagaatattatcaagtattaaatatctgtttccacatattatcatttctactgtattgtctttccaaataggaatttttgaatgaaacaaagggcagattttaataccaggttaatatgcttgagccttacacgtttatatttcataagcagaaaatgattagttatagaacaaacccaccctcttgtagatattttttaaaaacaaataaacataaagttttgttgcttgtatttctatgcccctgggacctaggaagtatggtatgacacacggagtttccccagcagccttgtcctatggcccctaatttttctggggaatggccttaaatgtttaaggtctagctttgctggcagcttgatgtagtttgcaatggtgctagcctgcagatgagctttaatgcattactgtgaactttatgggagggggcaggtgtatggagggtgggctgagaggaaaaatgggtgaggagattggagttgggcagagggcaaggtgatttttaaatacaaagtcaagagggttgccacatttaggttgcttgttacagtcctcacgtgcatcct

SEQ ID NO: 72214 - DNA, 1067 bp, Homo sapiens
aattctgttggggtcgaaggagggaggtggggtttgcctgcgcgcgtgttggactccggagagcaactcaggagcccgcgcggtcgtcgcctcccggcctggccatggactggcgggaagagggagcagggcgcccgggctgctcgggcccctagccgggcgctccctcgccaccggccccgctgcgggcctctaggggactgagacggtctcttgttcgcctggacggcgccggggagcggaggatctgcgctccgggtctccaggatgtgcccgtctgagatggggacgctgtggcaccactggtcgccggtactcatcagcctggccgccctgttttccaaaggtgaggacgccgcggccgccagggcccggggactaacttcgcctggagtgagtgtgtgggagtgtgtggaggatgggggcggccgggagagagggctcgtgtgcaagtgtgtgtgcgcgcttgtgtgcatgtgtgtgtgcgcgcgtgtgaacgtgcgctcgtgcggcagccaagctcctcggacgccccttggccgaaggtgcttgtcctggagcacttgggtgggaggccttaggtgagactactaaggagccgaaaggaaaggaaggctgtttcctgaaagccttttctgtaaagggagagggcgtggggacccttgagaggaaaggtggcctctggagggccgagccggctgtcgggggaggaggggattgagatgaccagggagatttctggaatttgggattgactttccctggtggcactgacctatttggaaataattttggagcactcctgttgtatgggaatactattttgtgtattataggctgccaaaaatatagcctggggggcggctctgaagaagggggatgggtttctccaggtctgccgctgtgaggtttgggcacagggtctggcgctcacccttccgtagggtgctgggagcagcagcggccccgcagggtgcacgtggagtttcagctacaagttgtgacccgaattttcccagcggagccctgacttgaagccatgtgtcaaggcaggaattcctcaatgt

SEQ ID NO: 72215 - DNA, 2165 bp, Homo sapiens
cgacaacccgggcaagttccaccacgtggagaagagcgcgtcgtgcgcgccgctctgcacgcccggcgtggacgtgtactggagccgcgaggacaagcgcttcgcagtggtctggctggccatctgggcggtgctgtgcttcttctccagcgccttcaccgtgctcaccttcctcatcgacccggcccgcttccgctaccccgagcgccccatcatcttcctctccatgtgctactgcgtctactccgtgggctacctcatccgcctcttcgccggcgccgagagcatcgcctgcgaccgggacagcggccagctctatgtcatccaggagggactggagagcaccggctgcacgctggtcttcctggtcctctactacttcggcatggccagctcgctgtggtgggtggtcctcacgctcacctggttcctggccgccggcaagaagtggggccacgaggccatcgaagccaacagcagctacttccacctggcagcctgggccatcccggcggtgaagaccatcctgatcctggtcatgcgcagggtggcgggggacgagctcaccggggtctgctacgtgggcagcatggacgtcaacgcgctcaccggcttcgtgctcattcccctggcctgctacctggtcatcggcacgtccttcatcctctcgggcttcgtggccctgttccacatccggagggtgatgaagacgggcggcgagaacacggacaagctggagaagctcatggtgcgtatcgggctcttctctgtgctgtacaccgtgccggccacctgtgtgatcgcctgctacttttacgaacgcctcaacatggattactggaagatcctggcggcgcagcacaagtgcaaaatgaacaaccagactaaaacgctggactgcctgatggccgcctccatccccgccgtggagatcttcatggtgaagatctttatgctgctggtggtggggatcaccagcgggatgtggatttggacctccaagactctgcagtcctggcagcaggtgtgcagccgtaggttaaagaagaagagccggagaaaaccggccagcgtgatcaccagcggtgggatttacaaaaaagcccagcatccccagaaaactcaccacgggaaatatgagatccctgcccagtcgcccacctgcgtgtgaacagggctggagggaagggcacaggggcgcccggagctaagatgtggtgcttttcttggttgtgtttttctttcttcttcttctttttttttttttataaaagcaaaagagaaatacataaaaaagtgtttaccctgaaattcaggatgctgtgatacactgaaaggaaaaatgtacttaaagggttttgttttgttttggttttccagcgaagggaagctcctccagtgaagtagcctcttgtgtaactaatttgtggtaaagtagttgattcagccctcagaagaaaacttttgtttagagccctccctaaatatacatctgtgtatttgagttggctttgctacccatttacaaataagaggacagataactgctttgcaaattcaagagcctcccctgggttaacaaatgagccatccccagggcccacccccaggaaggccacagtgctgggcggcatccctgcagaggaaagacaggacccggggcccgcctcacaccccagtggatttggagttgcttaaaatagactccggccttcaccaatagtctctctgcaagacagaaacctccatcaaacctcacatttgtgaactcaaacgatgtgcaatacatttttttctctttccttgaaaataaaaagagaaacaagtattttgctatatataaagacaacaaaagaaatctcctaacaaaagaactaagaggcccagccctcagaaacccttcagtgctacattttgtggctttttaatggaaaccaagccaatgttatagacgtttggactgatttgtggaaaggaggggggaagagggagaaggatcattcaaaagttacccaaagggcttattgactctttctattgttaaacaaatgatttccacaaacagatcaggaagcactaggttggcagagacactttgtctagtgtattctcttcacagtgccaggaaagagtggtttctgcgtgtgtatatttgtaatatatga

SEQ ID NO: 72216 - DNA, 1023 bp, Homo sapiens
agaataaggcaggagacaggaggggaaggaaggagagcaaatgggagggccagagagggacaggaatgggaggagaggagaggggatgagaggggagggaaggggagaggacatatattctaagaagaggtcatataatacaagcaagttcacaactatcttttaccaataacaataaattgtgtattttttgatgccagtaaacatagacctacacataatttttagtggctgcagatattactgctgtacatactgtaatttattccaacattctcctccgaatggacatttctgttgttttcacatagcctgttttaaggacatctgttttctatcattttagctggaggttgactcaaacacaactgtccctagagtgcattaataaaagccaaatttgaacagtattatcagttatctagctctcaactgttatcaactcagtttttaggaatgtattaatattcccttgatttaaatatgtcagatctccttgaggaacaaaacggattggcatagagaagaaataaacctaatccaaatgaaaagaataattatgagaatgaggctacattcgggaaatattctaagatcccaaatgtaaatgtaaaaaaaaaagttagatatatatctgtaaaattggtatatttgcatacattaataaccttgactttcaaacaatgaggtgccttcttcattatggtattacactcatcaagggtgtatttttaaactacaccaaaccaaaaatctagccatctgtctttagaaccaaagaatacatgtcagccacatgaattactttatatgaatctacaaatatcatatcattatattgatagactcaaacagactcatcgactatagagaattgtgtcaacatgatcgcaatgcatcaatttactatgcactgaaatatatgtgtattgatttaggtagagaaatacaaacacgtggacggggtctttgggcttaatcatttattaatcatttagctattaagaacatgcattgaggctc

SEQ ID NO: 72217 - DNA, 1069 bp, Homo sapiens
aaaggcccttagtggatgcttgcattatttccaaataattgaacatgaatcttcctcagtagatagcacatggtagtatttaaatatacgttaagcgcttaatagtgcttcagaggggtagacttttactctaatacgctgcaggacgacttcacctcgcttccctttacagctaagcatgtgcctgagttggcagtgcagcagcattcctctggccctacctctccagagcaactcttgccatgtgagtgtttagtattcagcaggcaaatgctgtaagccaaggggcttcaagcttgcttggatttaaaatcaaggtctaattctaatggaaaacacctagtaaagcatcccaaagtacacctgaagataccatctattccatctaatgtgatcatttgagctgcgtgcttcatcaacttagtattgcattggtataccaacaacaaacgcgtgttgcagcaacttctgtcacaggatgattgtgctttgaggaggagcatagctctctcgtaaggtagaggcagggttacttaaggaaaacacgttctggccactcgagccagtgtttggagtgttcagagccaacactcgatcacctgtgttcactactcatctgcttgaccttgggttaagtttctaaagtaaagcttcctatagtaaacatgtttgttaggttgtgctttttccaagagtggctaacaatgcaatatgcagctctctctatgtaaacacacagttagcttgttaagaaatatgttcccaatgttggcctttcaaatattcttaatgcaaatagtaggaaatgattattaaagatgatttgcttcactataaattcagttgctttacaactgagaccaagtaatattctaattatttaggtccaatagttttttgagacatatttctttgtatctttttttttttttaaccccacaatgaagccttaagtctaccacactggcccggttaaggtagcttaagttggtatctttatcggtatcttcagttgctcacttacgtgaaggctacattgcctgattaaggtgtgaaatgaacactcttc

SEQ ID NO: 72218 - DNA, 1031 bp, Homo sapiens
ggaagataatctgtagggtcgcagggtatgtgcatttttagttttgggagatttttactgagaactttccaaagaagttggactagttttctctcccaccaataatgcatgagagctcctgtttccatacaaagcatattgcctgcatggtctcacttgctggtccttcccacggtgggtgaacacactgcctgcgtgatcacactcagggatccttcccacggtgggtgaacacactgcctgcatgatcacactcagggatccttcccacggcgggcgaacacactccctgcgtgatcacactcacgggtccttcccgcggtgggtgaacacactgcctgcatgatcacactcacggatccttcccgtggcgggcgaacacactctctgcgtggtcacagtcacaggtccttcccgcggtgggtgaacacagggacattcatctttatattttttatttctttgtttgagagaagtttggcttgtctttctcatatttaaaagccacttatgttactttttcagaaaacatggatttgaggggagggtgaagtatttttgtacagagtgtttgttttttaagcccagtatccatagagaaaagggtacacatcacagccgtctcagctgctagattctcaccaggcgaatgcgcccgcacctgcacccgcaccatcagagacaggacacctcaggaccttgggagctctcatgccccgtccatcacctccccagtgagagaagtcaccgccttgacctctgacaccaaggattaactttcttgtgcaaacgtggatgtttaaaaaggcgattgtgagactaatggtttctccaagagaaaagaggttgtttcctagtaattaatgagtagtgggttatgtcctgccccgtggacaaatggttctctagacacaaatgcatggggccagtgacttttggttatgccaggctctgtactggataaaggggaattagtcaaatccagcgaactggaatcccagctttcctgatgataaatgcagggtttccta

SEQ ID NO: 72219 - DNA, 1056 bp, Homo sapiens
ctttacaacctgaatgcatcctctcgcagctctggaggctggaagcctgaggtcagggtgtccgcagagctgccttccccctggaggctctgtggggagcctggctccctgcgttccccggctgtccttggcatccttgggcttgtggccacatcactccgacctctggttccactgccatccgtgtgagctttcccgtgtctgtgtgtgtccttttctacctcttatgtggacactctcatcagatggagggtccaccccaacccccctggatctcatctctacccttaccttaattatacctgcacagaccctgtttccaaatggggtcatgtgggttttttggggaaggcactattcaactactacgacctcaccttaaagataaaagaatgagacatagtgcgcctccgacataattagacaacaaaataagcccatcagcttctagaaacatgacttacttataaaaatctttttgggacaaatgttttgctcatagctcggggtactcgtatctgaaagaaatacttggatgtgaacaatcttattagaaatttcagactcctgtggaaggctccttcccttgtgagcacggctttggccaatgagtctcgtcttcatcaattatcaccaggagcagaagtctgggaagcagagattgggcgctgcctcctaatgcctgagtgactggacccgtccctcacagctcagtgtcacaaagtgacacaaggaaatcgatcgtctgcccaccactgcacgcactccgtgtctgatatgttttgaattttttggaagatcaagttttacagcatacagctattttttaaaatttagctttttagcattcagcagtgacaacttttattaaacacccctggtgcgccgtgcatgatttgaatttcagttgctcacatccataagcggcgctggtgttagtcaggttaatgtcagctgcagcaaaaatccaggaactctgggggctcagcacagcccgttcatttcccccttgcagggaggtgcaatggtcagtgagtggcttcctccacgtggtca

SEQ ID NO: 72220 - DNA, 1051 bp, Homo sapiens
aagctgttattttggatccaccaaattcaggttaattgcagtgttatatgtgatgctgaaatgctggaagcagctttaacagttgaactgttaacaggaagggactggttcagttgattaaattatggagtgttcataggtcagccttttaggcaaccataggcaacctaaactttgttcatggagaattcttactgaaatatgcagatgtttgtgctagaattaagagaaaagggagatacaaagatcttctgtgtatgcccgtacatatgtatgagtacataaacacaaacacatggcacgagcttggctccataaaacagtatccacagaaggaaaggcgtatatcaaacagtgtaatggcagtgagactatgggaattttaatcttctctaaaagtatttattttcagattttctataagaagcatatattacagtaataactaggagaaatgtctgaaagaatcaaccccaagtggggatacaatctatgacacagatgcaagcttgtgcctgttacacggggtttcccatctgcccagtaacacagatagggagtgaaagcaggtgtggaaaggcccttctgagtgaaccgaagagttaatgcaattcttaataaatagaaaactcctctgggaggctgaggtgggaggattgtttatgcccatgagttcaaggctgtggtgagctatgatcatgccactacactccagcctgggtgacagagtgagaccctgtctccaaaaaaaaaaaaaaaaaatacacacatatatatgtatgtatgtatatattgaactctccatgtaaagtacgggatggatcacagatcacatgctctgtgatgtgcatgggtatgttcacactcgctctttgtctttgaataaggtcttctcgttatttttcaaataccatggagataagactctgttgctggttaggattcagctgaccaccaggtgaagcggaagcatttatatcaaaccatcctaagtaaatggtttcctcacttgtcctgagcctggtttcggatctgttttggctggagtcat

SEQ ID NO: 72221 - DNA, 1020 bp, Homo sapiens
gacctcaagaacccccaccccacggggcacagacaaggacaggctggccagcgcctggaagccgcgtgcctgaccacgtctgcccgagcgagtaccgcctcccacccgggaggcaggagagccgcgaccgtcgggccgcgcccaacgtctcccgctcaggggcgcgccgcctcgctttcagcgcatgcgcgcccgggagcccgcccggggcgtcggcgcacgcggtccccaccggccggcttgcgtacgcgctcccggctcgccctcccacgcggtccaccgcgcctcccgccccaccctaagcgcagcgaccgcccgagcggccgaccgaaccgcgttgcgtgcgtgcgcgcacgcgcgggccacgtgggcgggcgccgcgccgttgccccgccccttgcaaccccgccccgcgccggccccgcccctgctctcgcgccggcgtcggctgcgtctccggcgtttgaattgcgcttccgccatctttccagcctcagtcggacgggcgcggagacgcttctggaaggtatcgcgacccggcgggcccggcacggccgggcggggacaggggtggcggcggcgggataggggtcggagccggggccagggccggggcgggtggcggacccaggggcagcgggcggctgagtaggtgggtggtgcgggcccggccgggccggggcaggagacgggcgtggggtcggcgctagcccccgcgaacccccgtttcatcctccgctctcatccccgtcccggtcccagtcccgttcccatccctacacctccggccgccgttccccgggccccgccgccccggatgccggccccgcccgccgccttcccgctcccaggcctggccgccatggcgccgcgggcgggaggcctttgtggggcgggcacgtggggcgctgggggcgcgggagcggggccgccatgggctgcggggccgcgcgagcgctcgcctccgtcctctgcctccgcaggaacgccgcgatggctgcgcagggagagccccaggtc

SEQ ID NO: 72222 - DNA, 2664 bp, Homo sapiens
gccatcctcttacctcagcatcctgagtagcttggactataggcacgtgccactatgcctgactaatttttgtatttttttgtagagatggggattcaccatgttgcccatgctggtctggaactcatgagctcaggtgatccacccacctcagcctctcaaagtgctgggattacagacgtgagccacattgcttggcctatctggattttttaagacaggaataatgttttccagtatagccagccatttaaagaccttctgaagaatgtgtttccaggccctaccctcagaatatggcagcttggttatccagaatctcatttagcattaattacttcagatacttttttgggatgaggggagtattaatggtgaagtatatcagggagatttgatagggtcagctcatctctcttaggaggaattgtgtattaacatttttagaattgacagagaccttgaaagtgaggggagagatacaggtgactcgttgaggtctaagactataactagttgaatcctagtctctggttcttagcattcttcacttgtgcagtaaactgagtgtactaattcccacaaatgtttcttcagcccagtgtgccatcataatgtttgatgtaacatcgagagttacttacaagaatgtgcctaactggcatagagatctggtacgagtgtgtgaaaacatccccattgtgttgtgtggcaacaaagtggatattaaggacaggaaagtgaaggcgaaatccattgtcttccaccgaaagaagaatcttcaggtgtgtaaaattaaaacttcctgagttatttctcttagcggagattatatgtaagaccatgaaattaaccagtgtctattatatatggaaatgatttttttttccccaagacggagtcttcctctgtcccccatgctggagtgcagtgtcgcaatcttggctcactgcgacctccgcctcccgggttcaagcagttttgtctcagctcccctagtagctggattacaggtgtgtaccaccacgcctggctaatttttgtacttttttttctagtagagacggggtttccaccatgttggtcaggctgatctccaactcctgacctcaagtgatccacttgccttggcctcctaaagggctgggattacaggcatgagccactgtgcccggccggaaataattttgtcttttttatactactgtttttaaagaatgatagagattgggtttcactgttggcccggttggtcagctgaaatgtttgtgtatttatatatttgttgttcgagacagggtcttgctctgttgcccaggcaggagtgcagtggcatgaacatagctcactgtagccctgaactcctgggctcaagcaatcctcccacctcagccttctgagtagctgggctcacaggcactcaccaccatgcccacctaatttgtttttttgtggagttggggtcttgctctgttgcccaggcctgatcgtgtactattggcctcaggcaatcccacctcagcccccgaaagtgctgggattacaggcatgagccaccatgccttgccaagaatcttaacattttcttatcttgcaatgtcctagaaaaatcgtcatcttaataatgaattttaaaaagtaattttacctttcttttaaacagtactacgacatttctgccaaaagtaactacaactttgaaaagcccttcctctggcttgctaggaagctcattggagaccctaacttggaatttgttgccatgcctgctctcgccccaccagaagttgtcatggacccagctttggcagcacagtatgagcacgacttagaggtattgtggccactttgctgttcagattgttcggtttggcttgtttattcctggcagttttgatctggagtgttaacgtttttccatctcttcgtctaggttgctcagacaactgctctcccggatgaggatgatgacctgtgagaatgaagctggagcccagcgtcagaagtctagttttataggcagctgtcctgtgatgtcagcggtgcagcgtgtgtgccacctcattattatctagctaagcggaacatgtgcttcatctgtgggatgctgaaggagatgagtgggcttcggagtgaatgtggcagtttaaaaaataacttcattgtttggacctgcatatttagctgttttggaacgcagttgattccttgagtttcatatataagactgctgcagtcacatcacaatattcagtggtgaaatcttgtttgttactgtcattcccattccttttcgtttagaatcagaataaagttgtatttcaaatatctaagcaagtgaactcatcccttgtttataaatagcatttggaaaccactaaagtagggaagttttatgccatgttaatatttgaattgccttgcttttatcacttaatttgaaatctattgggttaatttctccctatgtttatttttgtacatttgagccatgtcacacaaactgatgatgacaggtcagcagtattctatttggttagaagggttacatggtgtaaatattagtgcagttaagctaaagcagtgtttgctccaccttcatattggctaggtagggtcacctagggaagcacttgctcaaaatctgtgacctgtcagaataaa

SEQ ID NO: 72223 - DNA, 1186 bp, Homo sapiens
ctcagtaatggagaacagttggtgaaacttttttttttttttaactaagcatttaatttatcttgcatattttccacatttaaaaatgaattaggtctattaggataattaggagtttgatcccatcaacactattcttgtagcagttaggaatcttgagctatttttttctcatacgattactatagtccagtttaccaaagttttctttagatgtctgataatcttgagatgattgcttaccttaaaaggtatagaaaggatcacttaaatatatggaaaaatgaaataagggtgaagctgaataaagttctacttactgtattaactggcaacagttgagtttcttaagatctgaattgctgtgtatgttacgctgtattcagaaccagtttctaaccagcctgtgagatgggaagttttttccccataattgggatgaaacctttcattcaggtattttgaattgaaggtgtatgtgttgtttgtaaccttgtggagattgcaagtggtgttgacattctggatcttctatgtaacagttgaaatttggaagtgacgtcacttacctgtctaacgtggtgtgggagagaatttacaagtcctttattgaaagaataattgttgcaaaatatattgcttctactttgcctggattttttgaatcatctctagtatttgctttaggaaatgctgaagagttagcagagattattatcttttgggggggcggcggggaaggggtcagttctctccagattgtacaaatgggaaaagtctgctctccattttttgaaatctcgtgtctaatgggggaagccttgaaagctttatatgaagttactgcaaaccagtaatagcttattagagcaaagtcattaagaaaaagcatagttagtgcataggtcttgtgtggatataatgtgaaactggtaaattagtagtttcaatttgtgtgagagccagtttttttaaaaaaccacatagaatgggattttttaaaaaattgtatcaatcataaaatgtctagaaaagatgagactccaaaatagcctccaaagaggactggtttcctggctaactgttcacctgaaggaactcaagtacagagaatttctggtttcttttgcaaaaacagatcagaaacacaaaaaattacctgctgagcaaatgggatgagggttgg

SEQ ID NO: 72224 - DNA, 1022 bp, Homo sapiens
cctcactcaccgcaccgggcctcactcactgcatggggcctcactcactgcaccgggcctcactcactgcaccgggcctcactcacggcactgggtctcactcactgccccgggtctcactcactgccccaggccttactgcatggggcctcactcactacaccaggtttcactcactgcactgggtcttactcactgcactgagcctcactcactacaccaggtctcagtcactgcactgggtctcactcacagcaacagaatcttactcactgcatggagcctcactcactgcaccgggtctcactcactgcaccaggatcttactcactgcatggggcctcactcactgcaccgggtctcactcactgcaccgggtctcactcactgcactgggcctcactcacggcaccgggcctcactcactgcaccgggcctcactcacggcaccgggcctcactcactgtcccaggccttactgcatggggcctcactcactacaccaggtctcactcactgcactgggtctcactcactgcactgagcctcactcactacaccaggtctcagtcactgcactgggtctcactcactgcaccaggatcttactcactgcatggggcctcactcactgcaccgggcctcactcactgcactgggtcttactcactgcactggggtctcactcactacaccaggtctcagtcactgcactgggtctcactgcaccaggatcttactcactgcatggggcctcactcactgcaccgggcctcactcactgcactgggtcttactcattgcactgggtctcactcactacaccaggtctcagtcactgcactgggtctcactcactgcaccaggatcttactgcatggggccgcactcactgcaccgggtctcactcactgcaccaggatcttactcactgcatggggcctcactcactgcaccgggtctcactcactgcactgggtcttactcattgcactgggtctcactcactacaccaggtctca

SEQ ID NO: 72225 - DNA, 1062 bp, Homo sapiens
tgggggaaatcgcttcgaatcttcagagcttgtctctcccagtgtagaacctctgcccaatgagtcaacagagatgagggcagtgaggccccagtgttctgagcctgccacaccctgcatactatgagttggaggaggaagggagtcccaacctttcagctgcttttatctggagtagagcttctaaagcacaaagttggggggaatgagaaatgcgggcagccttccccacctcccccagcctggggagataccgtagccctggactgggagctggagggagtggagccctgtcttcttgcccacacctacttggagcagagcctctctcacaccaagctgggcagggaagcaggttttggctgaagtgccacagactcagtcttcttaacaagatttagtagattttcttgagccagtttttctcaatttgctgtaaacccttaggaaaatgtacagagactttaaatgattatgttttttaaaacttttttttttcagtgatagctgtctctggggaggggtctgctgagcgacttgtgctgtcattctagaagtcagctccccagtgatgtggcttctttgctgagctttgcccttgcccatcccaaggggtcccagtgagcactggaggctctaggttgggctgtgcattgacacttagcattctcgcagttgttgtaaaacactgaccagacatgagggacctgctacttgtttcaaatacgtttaattttcacagtctttgttatgcaagtagcaggtaaacaggcttactttgtgctttgagttggcaaatgtaatttatctgaggattaagtggaggtaaattgtgctcccctcgtggctccctggggagactgaagaggccacttgggcagccacctccagactgcggctggtcatgcagggagctccccgagtcaccacggacgtcctccgtcctgcctcactgctcatgctgtatcatcacgaggatgcttttgcacacgctggtcctgaggcccgtgtcctctgccctccctccaggtcacgcatgacctgcttcttcaggcctctgtg

SEQ ID NO: 72226 - DNA, 1039 bp, Homo sapiens
acacacgcacacacactcacactctccataagccacagaaaagacagctgggtgaacgaaaagtgtctgcaggatttgttgctagagtgagagcaatgtatgtagcggggctgtctgtgtcgccgataggatggggttggggtgtgtgtgtttgacagacagagaatctaagccaaaccaatccagcctggaaggatgttttatttgatctgcacaatgctggagggaaaaaatgaattatttgccaatattttaagattgagggattttacacaagattacaaagttcttttgaaaaatgaggagatccgacgccctgagtttatattcctccttgacaacagtggccagaactgtgtggtttctgataccaatgcagccccagtaggagactgagcttgtagtccctgacacagctcttgcaaatggagcgctggctggttctgtgagtcctgcaacctccatctatctccctgtcagctttcccttaattaatttcatcaggagcccaagaactgtgtctttcattccaaatggattggagctggctacaagctgaagtcgggggggtctgcaggcagttgggctctctcgaccttcagtttttaattaaggagctggaggcccacccagagcatggtggggggagcccctgggaggtggcttcttcctgcagatttcatcctggccttactctagtttttgagcaatattattttttggaaactgaggtggggtgggggggcatcaaatccacaccttaccttaaggtgttgttgactgcgagacttgtgctaggaactctgaagggagggacagataacctctgtcctcaaggagcccacaaggtagccaggagggcagagtgacaagcattggagagtttacacatcactgaagcagacaagaaactctgattgcaaactcagaggtgaagagaatgtaactcgttttatttttctttattgcaacttagtttcttttgtgagctcctgttcctctagggacaaaacttaatcttagttccaggccccccctt

SEQ ID NO: 72227 - DNA, 1031 bp, Homo sapiens
tttgtagtcgagtgtgggtgtaccatacagcaaggcatggatgaggatgagtgaaatggagtgaggggggccaggcctgattctgtattatattttcatgaaatgtcagatttgtgccactcgcagccaaagtcccccaccgcaccgatgcaggattggaggccatggtgagccgctcctcctcttaggaagccacagcaaatgtatcatcctgataagatggaaaaaatgtgcctggaaaatgaaaccagactgacccaggctaaaagaaaaaaaaagacccagcaaaatctttggagaaaaaggaaagatgatgaattctgacaagtaataatgtgatcagcttaactgttatgaaacacttagagtgcatcttaacgcaaagcggtcaagataaagtaaaggacttgaaatctcaaattaatcactcgtagtgtttcatgttggcaaaacattttgctgcaagttgatcatcctttcggtggccttgtcagaaaagtctgggaacagtcatgtgtgcatctttcagctttacagctgagaggtccggggcagaaccacgctttatagcctccagaggcaaagcaggagtgatgatgagacctctgagctcatgtgggtgttggttgtgatgggaccctgagctcagatggggtgttggttgggttggttgtgatgggaccctgagctcaggtgaggtgttggttgggttggttgtgatgggaccctgagctcaggtggggtgttggttgggttggttgtgatgggaccctgagctcaggtggggtgttggttgggttggttgttatgggactctgagctcaggtgaggtgttgattgtgttggttgtgatgggactctgagctcaggtggggtgttggttgtgttggttgtggtgggattctgagctcaggtggggtgttggttgtgttggttgtgatgggaccctgagctcaggtgaggtgttggttgtgttggttgtgatgggattctgagctcaggtggggtgttggttgggttggttgtgatgg

SEQ ID NO: 72228 - DNA, 1031 bp, Homo sapiens
gcgcctggaggacgatggggactcaggctggacctgtgccctccctgagccagaccctgtagagggggattcactcatatgaccgtgtgactgttcagttagcacccccaaaccacagggctgaaagctggggaggctgtccctcgcagggaattcaggggctttgtgaaaagcagggcgtgggtaccaggcagctgacattctgtactgttacttcagccaccgcgtatctgttctgatgtgaaagcaaaagtggcaaatatgtcagcagcgaatctatgagagaattagtctgtaatgaattccaaacaccataaattaacctgacaagaggctgcagcctccttgggctgttcagctcctggaaaccttcaagggttgtgccccgtgcgagaagagatgctcgtggggtcagagatcacgtcctttcctcttccattgctgagaccaggatggtctcctggacctctcatggcctggctggggagggacctgtcccttcctcaccccagccctcagctccccaggccctcacctcagcgttcagggtcagccagtctgttgccagcttgtctccagcaaaagctcacaatcccctgtctgagccccatgaggccactacttccactgtcaccagaacacccctgtgcacctgccccgcacctgtgcaccgccttccatctctaccccactgcgccccatcctcccatcagtgcccacccaggaagcagcttctgtccactgcctttgcttctccatggaaatgtcctccaagcgacaggctggcactgtgtctgcagctcttgtgaaggctcgaggtagcgtgccccgggagagcatgcccaggtctttgcagggcacagctgaaggcattgcccatccttcccacctgcgtctgcacctggcagcccagggatgcgtcccttccggggaggtgcaggcaggcatctctggggacagaccgctctgggtccctctccattgtgcaacccagcacatttcccaatgccttcagctcctctcctttgggc

SEQ ID NO: 72229 - DNA, 1030 bp, Homo sapiens
atggtggccgggcagaagggctgcatgatcacaaagcccagtgaccccttgatcgcaacgcccagtgaccccttgcaaggcctgaggtggatcccggtggcaggaaggcagtgcagccatggaagcccgcccgcccacccgcctgcctgcccaccacgcatttgtttatttgcttctctctcacactcaccccgggacattcattgctgagtgtgaggagcccagcagaggccactccacacccagcttccctggcctgcgatacaacctggctctgccccacagagcagcgatgcacagctcagctgtggagccagcagctccgactcatatttccaaatcccaacctccctcgcacatctggttccggagttgcaccggcacagactcctctggttacggctgttgcagcctctgaaattgctctcacgatcccttccccgctttcaaggtgagagccgccttcaagcacaaaaccaaggtctggtcgctcacgagcagctctgcccgcacctccaacgcgaagcccttccactcggacctcgtgagtgcagcctccataaaccgagggtcccagcccatcctccttccccaggctcggttgtcagcaggatggggtgtgcaggcagcagaggtggcttcgggtgcccagcagtctttgtccccctctcatgcctgcaggctgcacgtgctctgggcttgtgtcccccacacagtgccctgtgtcctgatgaagtcaccacagccctaccccttgaccccgaagagtcagggcttcttgtgttcacttagggatggaaggacttagagatcaactgaccgtgaggtggcccatccccgccgccctccagagcccaggcaggcccccaggcagtctggagcaggccctgttagggttctcactgtgccgctgcttcccccctgctggagccctgctcaggtgtcccatcctcaggaagtccttccccgcacacggtgctcaatgaaggcgctcccacccattctcgcactccgcccccgcccgcagctg

SEQ ID NO: 72230 - DNA, 1050 bp, Homo sapiens
tgctcactgcaaggcagattgagaaatggagtcagctctggtcccaggagggaaaatggacttggggaatagccagccacgtctgcccaactgtcttctcatcagggtgcttcacaaacctccctgaggtcacctgttggtttccaggtctctgtgcctctgtgccacgtgttcctatgtcttcaacaggaaataggaaaattcagaaaactgctcagagatctcaggtgccaagaaccccaggcctatgtactttgtcctctgcatgagttcagtgtggactttcctagctgagaatctcattgctgagatttgccgtttgggagccacatgggtgcatttgagggcatggactgaattcttcatgtttttcctgatagttgagtctcaggctggcacccaccagtgtgggtaacactttgtggtacaggaagttcaggacttgaatctgctactgggaaatgcagtctcctccgcgtgggtgaggtttctgcacagactcgggcatgtgggtggaaggatgttaagtgcccagagctctccagagacggaagcagcagaagtcatcattcgcagcacaggttttaaaattgcatttcttcctcccagtgcccttgctcaggatgagcgctgggtggagacgtctccttggtggagtgagaacctcccggaggcctgctttctctgctctctgacagagcgcagctgggcccggtcgttgaagggtgattttctgcccagcactgacagcccctctggagggaggactgagctgagaccctccaaagtcatggtgccgtgggtgacaagggaaggcaggctccggaggtgctgcacaagctcgaggccaggcgtcttctgcgcatttgttgaagttacagagccctcgtcatgatcccggggtggaaagtgatgctcctccactctccatttgtggttgttgtgcagtgacttggtaacaggcgctgctggtggggagtggagggcactgagattgaggcagatggagatgggagcagggtctgcccggttcatttccagcacacatta

SEQ ID NO: 72231 - DNA, 1056 bp, Homo sapiens
aaaaaaaaaaaaaagtaggagagaaggatattcctggactgactgatactatggcgcctcgctgcctggggcccagaagagctagcagaatccgcagacttttctatgtctctaaagaagatgatgtctggaaatatgttgaaagcccttaaacaaagaatgtaagaaactgaggaccaaagcacccaagactcagtgtcttgttactccacgtgtcctgcaacacaaatgctggcatcttgctctgaagaaaacagtgcactacgaaaaataaagcagaggctgcagagtaggctacacgctggccatgagaatgaaagaggccaaagaaaaacatcaggaacagactgccaggaaatgcagaccctccagcggtgagcttctacttctaagtctgcatccagacaaaagtaagattttttgagtagcaaataagatcagacccttccaaaagaaaatacttgtagaagatgcagaaaagaaaatgagaaagaaatcaaagcagctcaatacaaaaaacaaaaaacaaaaacaaagaaacacaaagaaaggcagcaagagaggaaaagaggaacaaataattataagacaaacacaaaacaacaaaatagcaacagtaagtccgtcccatcagtcattaacttaaacataaatgggtgaaactccccaatcaaaagacatggagtgactgaatggataataagatgcagctatatgctatctacaagacactttatatttttttatttgtacaaattcatagggcacatgtgaaatgttgttatacatatataatgcatagtgatcaagtcagggtatagggtgttcaccacccaagtacaatatacttttgttaactatgttcaccctactctgctatcaaatattgaatttattttttctatcttactgttttttgtacccttcaaccaacttttcttcatccttcccctatccccactcacccttcccagtctctgttttccgtctttccactctctacctccatatcactttagatataaggacatacacaggttcaaaatgagaggatgg

SEQ ID NO: 72232 - DNA, 3812 bp, Homo sapiens
cctcccctgtccccacctcctcctggtgttctggtggggagggggacggtgaaacctgccctaaggcactggctggaattgcgtgccgcgtccgtctccggagggatcgtctctggtcccgcagcccctctcgacccctcaccctgtcgctgggctgcagttggcgattccgcgcggtgaaagcagccagtgcccagggtcttttcctgagtgcacctgggcctgccgcccggcgatgccatggggtcgtgcgctgcttttctacttgccgcgctctcactgctcggtgtactgggagggtaccctgggaggcgtgcctttattcttccgaaccgccgctcactgagacagtggctagaagtgtctcttggacctgtgagttagccttaacctgttatgcccccagagccctcagtggagcgcccgtactttgccggcatgacgtttgatttcccggtgataatccgacgagtttgacagattgaggtagtgagcaaagttgcccgtcagttggtggccacttgacttcgtgcggaccctggccttgctcttggaagagatagtgttcttagggctggtttcactgtctcttaagactgaagggtggagctgggatatagatgtgttgtttcttttcaaatcaaacctgctttaggtcgtcactcgagggtgtctagcgattatgggcagtgggggcctgggattagggatttctaaaggcgtttgatttgaaaaggataacattacatgatgtaggtggtttgctcccctctttcttcccattttttcaatcccccttcccctcgtctctgggttttggggttgttgtggggtggttttttttcttttttgcctgttcggctacttctggggcccggactgaaaagctaaccatgaccaaccattaaactgtggaatagtctctccacgtgaagaaagcccatcgtttgagaccattaaaactggattcttcatagccctggagcatgactgtagggatgacctctgagctggccagaatggacacattaatgaccaaataggcctttttccatccctgacgtttccttttggaattagagctcgaaaacgagaactggtgaagggagggccgcggaatcagatcatgtctggatctgatggctccgtgctgtgctcaagcgtgctgtgccttcacaccatggtttatattgaatgtgtcgcctgagttgtcaggcttgcttttccaaagtgtcacttgtgttatttatcattaaagtttggtaagcaatgaagtctgagctctttgtacagttttcctatcattctgtacatgatttgagttaggtcttccaaaactggtggggagcaaacgccgcacatgtacatgtataatatttttaataataatctacatttgtaagttaaggaggtttacatcaaaatccaattaattttgaaatttaatgaaatgcagtaacttgactaccttggaattttgggcctttttcctgtaaatgtcttttttggtctacattaatatttttggttcccattacaaaagtcagcattaaaaaaataagcagacttttgtttgtttctctacatttgtttttgaaaccctaaacctgagtgttttaagtaaagttcactaactcattcatttattatctgacagttacacgttgacagcatcctcattgaatcctttatgttaaaagcatagcagaaagtgctcccattacttatttggccaaactactgtttggtccatgcaagagaaacatggaagtgtcttcatgtatgttatttccttgagggtataaagttcagaaggaaatattgataccatatcttctaatagttttgctctgttcccagtgaacctccttaaactgcatgtatatgtcactgttccaatgtatgtgtgtctctctatcacgtaacccagcacttatttcctcagccaagtggctagggggcgagcctagccaagattttacctccaatggacgcaagtttctttggtgaagatctctcctgagagttcgggactagcagaaagaagcgaggaaatttcgaccgtttggttcttacggataggtatttatgtatttggtttgtgtgaatgtaagctatgatatttaacttttcagaaaaaaataataattttttgcaagtggcattgaatggttgaccaaaccataatggtaagaactgccagtgaagtgggtaccatttttgctattaatggattgtttgcctttagttataaatgttatcttactgtggaaaggaatttagagtttgttaagataacttgagtttaaaagtaggtgagatatgactatccaaattaaatataaatctgggaagagtttttatacttgttttaatatttttgtttattttaatcggtaagtatgtgtgtgtatatatatatacatatataaaacatcacacacgcacaccagtctagacgttaatttccttttattgaccagcttgttcacattacagatatgatggacgtggtcacctgcatgacctttctgagtacgatgctgagtattccacgtggaacagagattatcagctgtctgaagaggaggcgcgaatagaggccctgtgtgatgaagagaggtatttagccttgcatacggacttgcttgaggaggaggcaaggcaaggtactgctcaagacaaacttacttcagcaacaaactttttaaaatttttaagtatttaaaaatttactcccattcatttttttatactcactctttctgatattatcttgacagtacccagtggattggaaaaacaggagtctttgcgttctgagaggacctcaggatagtttatatatagagccacaaagaattttcccagcttttgagggcagactgggatttgaaaaaaacaaaaaccaaactctttaactgttcttctttaacagtatcgtataaataaaattgatgttcttgtctttgccgtaacagtctttaatacagttcttaatcccaaaattttctcagcaggaagaaattttccacaaaagacgtgtattcagctgtctgtgggtaaacatgtactgacaaaagtacataatgatagatataaagtgtgaatttttaaaactattttacctcaaaagtaggttgaaaaaagtatgttgtatgctttactgatagctacaactttagaaatatataaagtttttctcagtaattttctatttttgttgataaaattctcatttttattcaagaggaagaatacaagcgattgagtgaagcactagcagaggatgggagctacaatgccgtggggttcacttacggtagcgactattacgacccgtcagagccgacggaggaggaggagccttccaaacagagaggtgagtggggagctgcctggactgctggtgtagggctacacgtgtacgcacaggctgcatgcaccgtggtccagtctgcagaacacatctctggcactcatgatagcaccactatgaccacaggagaaaacgggagtgatattccttcttttggtaaaacgaagttaaaaactagaatgattaatggaggtggaaagtgaatgcgttggattatttatttctcattgattcgggtaacagaattactcattcaggattatttgtttctagattggtaacatgttcattaatatcctcagggattcattcttgaggcagtgaaagaataggtgttaactgggataagttaacatcaccgccctctcactgacctgcttccccatatccctccacaactgagacagtgacacatgcccagtggaaggacaca

SEQ ID NO: 72233 - DNA, 1125 bp, Homo sapiens
tatatagaaaaatgttgacttggtgcacaaagaagtcacctcccatgggtctgtaccatggtggagtggcctgcctcagctggcgagctttctcccctgcaaaatcctgtcaagatttggagatgaggagtccgaacagcctgggctcttccagcttaaagtctcgtatctcttaaaattgacagtaaaaccagagtcatttctatgttttaatgaaatcacgtggccggtggacaagaggacaaatgggtgacgtgaatatgtgtgttttcccgtagccaccaaccgctaaaatgcacgccatcatcgagcgcacggccagcttcgtgtgcaggcagggagcacagtttgagatcatgctgaaggccaagcaggcccggaactcccagtttgactttctgcgcttcgaccactacctcaacccctactataagttcatccagaaagccatgaaagagggacgctacactgtcctggcagaaaacaaaagtgacgagaaaaaaagtaggtcccactgcgtctgttccgtccagactttgggcctgtgttgtgggggcggcaggctgggtggttctgggaaaagtgtgaagatacacattcttacagatgcatggttgaaagccagactcgaatttctagaatgtgtctgaaatcctgcagctaaggcgtgatcgttacccctgctggtgcacctttattaaatctttggttaatattttatagataaatgaaatataactaaatattgatgctgtcagaacataatcatctgggtgggaaatttttgccctcattttgcccacttaacatttcatagagaaaacagttatatatcctctcttggattattcaagtaccacagtgttcagggctgtatagctcaattatacatggccacaaaagtgaaaattttacttggattatctattttaagctattatttttataacagtgtctctattttggagttcttactgccaaagccagttagctgtattttgaataaagatggtattttgacaagtctattcatatatatgtatatatatacacacacacacacatcttccattgaatttttttttttttaattggcgacagagtctcgctcttgtcgcccaggct

SEQ ID NO: 72234 - DNA, 1855 bp, Homo sapiens
tcataggcatacagaacactgtgcaggtctaagacttaggagaagacggagatttctaggctgttggaatgttattttgtatatgcgagtttgggtagcttaataatagagattaaataaaagaaatgcagacaaaacctacaatggagtgccatttttcagctgtcactcaagcagagaaaaggtgacagacgtttattgtcggtgggggtgtagatttgtgccagcgatgtggtacttgtggagggccagcgggcagtctatcagtctaaaacacacgtgcctccaacccaggatgtctgctctcatttactagtatatgggtgaacatagccacatagatactcatcatagtacagttttagtagtagcaaaagactgaggcgacgcacatcctcggtggaggactaatggagtccctctggtgtgctctcgcggtgggctgcagagctctgggggtgggccagggcccgagcgctgcagggccacccaccggaatggctcttcctgagggtggaggcgaggtgactcaaggggagggcagcacgaggcagtctgttcacgtcagaaggggagggaagtgtctgtagtgcttctgtatcggcacctaaaagggcaggtaagaaggaccagtggccagcacagagaggggaactggaaggacgaggtcgcagacaggagtggctgactcacctgcccgtttgcgctgcttgcattttttcagcgtgactcgtcaccctctcaaaacatgcagattgacgtggtacttattttgagactaaactggtatcctgagttaattccttacaactctgtattttaataatacgtgcttttatcattttgtttcatcagctcagtgtgtttttgtttaggcggaagtggcccccgtaacatctttcccccgtagagacttgcatacccagtactgctgtgtctcgtgggaggctgctgggtcactaagcttttctggctttcatacgctgggtatttaataatcaccttaggatatactcagtcgttctttcttatttacttcctactgatggagattttcctacattttggcagcctgggaagaaaagcatctatttttttccttaaagtccagcagaattttatatatatataaaatatgtgtataaaataatttttctagaagctcattaaatatagatgtgtaaaactaacaatttatttcatttattaattttcctgacaatgaactacttttcatgctctttatttttcattacttgtcttctgctatttagctataaatccttatagaagagtataaataaataaaagtaattatgcaggaggcagtcatagtgaaatgctgcccactgtgatagcctgtgggttttttttaataaaatgccaactcagtttttcttaatattctataaatatctgaagtgaaattaaaccattgcgcatggctactatagatattttcttgcttctatccctgttttttaaatgtgcctttgctgtttatggtatatttttcctgcacatcatgactttgaagttctttacttactttccaaacccatttttaaaaatggttttattgtatgtcaagagaagaaggaagaaagcaaaaatgttacccaggattccaccatccagaaatagccattagtgaacatcattagcaaagtggaaaacactgaggtcatcgtgctaaataaaaaggaaagaaagaagcttgttatctgtggaacacaaagatcatctttatgcacgaatatcaattaaaatgttggatgtgtctctagaaatacttacgttaaagtggaaataaacttaattttacttaaacagaagagcctgcaatctaaaaatg

SEQ ID NO: 72235 - DNA, 1053 bp, Homo sapiens
gttatatagacaccctgacatttttgtaaagccagttttggtgaggagatgacatgggccttacttctcaggagatttcttcagacccttatctccaatagcccacactgaaagaaactgactcctctgtaggtgatggggataatttggtatttttaaagaattctgagtaatcagtgtccaaagaaaagatactgaaaattggttcccaaggcagtattagggcttcaaagagtatagtgttttttcagacaggagaaaatcttccattcctctttgatacattccattgtaagaaaaaacagcagatctggatttggaagtctgttcccagtgctgcttgggcagtaatgtacaattgccgttgtccagtgaaacatataccgtatacatctctctttttttaaaatttctgtataatttcctgctgacagtttatagtgacatttaatctctaggctgtgtctgcaccagaagaggctcccacagactctgctcccgagaagccaagtgatgctggggaggatggcgcgcctgaagacgcagccgaggtgggagcacgggcaggctcaggcgggaagaaggaggcatcgtccagtaagaccgtcccggacgggaagctggtgaaaggtatgctgccacttgcatgttggccttgcacattccaccataagttggcaagcgtaggatcctcggtgacctcagactcagcgccctcacctgcaggctggggtggggttggcggccccctggaggttgctgtggtgaaacctctgccttccatgctgtgtcatgcttgcctcgcgtggcattggaggtaacgtgagtgtgagcagcccttaggtatgtgtctgtttaacagtctgttcagtgtactggacatttgtacagaaagtttcaaataatcctttgtactccctgggacttctgaaactatttatatgcaaactgttgtaccagtgaaattcatttattaatttgtcaaagcagattccttgagaatctctaccaggcaatacttcactcactcgatttcagttactttgttatgtt

SEQ ID NO: 72236 - DNA, 1023 bp, Homo sapiens
agggtctgggctatcacatgcttaactgtctacttcacatcacacgcgggtttggagccataaaatgctaaagcggaaggacctccgccaggggccagccaggtagcccaccctgtgctacagaggtggcatcacaaacataagttgcagcccttccagaagcggccttgtttacccagaacccacttccctctcagtcacctggtttgcggtgcacttagcatccccttcattgtgggtgccttgaatattcttcataaataacaactgatggttttttaaaatactgtatcttattgcaaccagttagctcttgtcaagagccatttatcacagcatctgaaagagaaagggactctgtgttcattgagtggtggggcgggaaagatgattttttctttagggcctccatatttcccttaaatttaagccttctggatattctaagaggagggattgcttctaaacttctgtcacgctgggtttgacattttcttacaggtgtggaaaatggtctaacataatgcctgtcacaaagtaggtaaaaatgtttgctgaataaaggcatggattctgtaatttttgctttgtaagaaaaggctattttttatcatggggaattttttaaagagacctgtttatagtggagtcacatcatatgcctcctgaagcaaatttagatatatgctgagccatgaatttttttttttttttttaaagaaaaatgaggccgggcacagtggctcacgtctataatcccagcactttgggaggccgaggcaggcggatcacgaggtcaggagatcaagaccatcctggctaacatggtgaaaccccatctctactaaaaatagaaaaatttagccaggcatggcagcgggcgcctgtactcccagctactcaggaggctgaggcaggagaatcgcttgaacctaggaggcagaggttgcagtgagccgagatcgtgccactgcactccagcctgggcgacagagcgagactccatctcaaaaagaaaagaaa

SEQ ID NO: 72237 - DNA, 1121 bp, Homo sapiens
taaattgcttttcctgtatacacacattcagatcaagcaacatttgaaagaggccaattttcaggccaggcgcggtagctcatgcctgtaatcccagcactttgggaggctaaggtgggtggatcacctgaggtcagaagttagaaaccagcctggccaacatggtgagaccccatctctactgaaaaaacaaaattagccgggcgtggtggcacacgcctgtaatcccagctacttgggaggctgaggcaggagaatcgcttgaacccgggaggcagaggttgcagtgagctgagatcacgccattgcactacagcctgggcaacaagagcaaaaactccgtctcaaagaaaaaaaaaaaaagccatttttcaaccacaatccaccatcaagaacttccattgtgctgtggtgttctccctaagcaaacttgtactcatgcctgtacatctgaatctgtccttcctgtgtgtaaactaaccaactgtcggatcatttggaataaaacacttatagagtattcattgcctggtgtgaatattttggatatatgctgagagccactctgaggttttcattattccagctttcgttagtgtagagtctcaccaaccttctaactctgaaagtaaaatgtccaaaaaagggcacgttataaactaattctctcaaaatttgatttgtccaatgtatgtacctattcagaaactttaactaactgcattgtatgacacttttgcaacctgtgaaaattaagatcagataaaatactgtttgctctaaacttctcttttttctttgtttattccttaagcaaagcaaaagctggaagatcgcctcgcagctgctgcccgggaaaagctggcccaggcgtctaaggagtcaaaagagaaacagcttcaagcagaacgtaaaaggaaagcggcgttatttttacagaccctcaaaaatcctctgccggaagcagaagctgggaaaattgaggagagtcctttcagtgtcgaggtatagtaaaatcccacattggtatctgcggggctgtgtgatacatagaggcagggaggatgtgtctccctccagctgccctagtctctggcctgagtgagggatatgagctccca

SEQ ID NO: 72238 - DNA, 1210 bp, Homo sapiens
cagatgcttgggaggcagaggcaggaggattccttgagcccaggagatcgaatctagcctgatcaacatattctctatgacaaaagaacaagaagaagaagaagctggtggtttctcaccataaccttttcttgtggaattctgcctcagctcttctgggaacagtgagtgcgtgttttatttagtaggattgcatttttctaaactggctgcaaacctgcctcctccatccaagctctgccagcaataatcatttccagggatccaagtggctttaaaatgcaagttagaaatgggaggggtggtgatctcctcagtaatatgaattattggagtataaaagataactaaattttaaccaaaatattgaaagtgttaatgctgttgttatcagatagaataaactgttacaaacgcagcctccactcagaatggatcggacttgtcacttgggcctgaacagacctaattgatcatttttcatgactgctgccagcccacagtagaataccgcagttgttaatatttctaattgggtaggatgctacatggaatgtattttgttttatatattaaattactaaaattctatataaaatacagaaagttaagattagaaagccttcttacagcacaacgaatatttatttaatggctatactgttcctgtggttgaagtcccatgtatttagtatgtctaagttatgggcgactctggatctccaaaggcaaattagtcatggaagaatctttagttttggaaaatcactatgttgcttctcaaaaagtatactagttacgacaaggtagtatttagtgtcttttacatcaacattgaggctggcacggtggctcacgcctataatcccggctcttaaggaggctgatgcaggtggatcacctgaggtcaggagtttaaggccagcctggccaacatggtaaaaccccatctctactaaaaatacaaaaatcagccaggcgtgttggtgtgcgcctataatcccagctactcgggaggctgaggcaggagaattgcttgaacccgggaggtggagattgcagtgagccaagatcgtgtcactgctctccagcctgggcaatagagcaagactccgtctaaaaaaaaaaaaaaaaaaagattaaagtaaaatacttttattgtctgttttcatttgtattttgatattgtatctggttctctatgttaatg

SEQ ID NO: 72239 - DNA, 1543 bp, Homo sapiens
agcgatgactcatctcctaatcctgccccttaaagggggaaaccagatgcttgcagttccccaagtggtagtgttgatcatgccaaggtgaggaccgtcgttccatcccttgcaaagtgaatcaaagtgaattgtagccaaacacagataagaccagagggtgtctgcactgagcagtccaggaaggaggggagctgcagtggctgtcaccgggctgggacacgaggaggaattgcaggtgaaatcagatccagtttcaacttgaggaaaattcagccccgggagctgctggtagagcccagaccttgatgctgagtcatctgcacagagaattccgtgacagaaaggccgtgggtagagacgtgaatggaggaagtggagtagatgaaatggttaaatgttggagaaaagaggctatttatgaatatgaccactgtcattcagataaaatttctggactgttatcattgaaaaaagtctcattatgtttctatttgaaagcaaaccattatgcttttttgaggaaaaaaaaaaactgtgagtcacgttatgcttgcaagtgtttaattcagaccatttcatctttaagaaggcccctggtcacattatacggatgatttgcttattaaatggaactcctgtttcttgcaccatgttgtggggtcaatatgagaagcctaattaacagaataaaaagcattaaagcttctttagctaaagtcaaacttagagaattgtctaatggtatgtagcccctcgttctaagatgggcgttttccccagataacttgaaaatctactggtaacagccacttccctttaaagaattctattactaatagccatgacaaaatggtattgtatttcaaagttaagaatttgcaggccttaaaaactaacttatttttcctgattattgagtttattgtagaattctacgtgtaagcattccccagccgctatagctttgaataagcagagcttttttcagagttctggtagcgcccagcccagcaccttttattctgaatgtgaagtgtgtgcctccgtgtcacagagtcacagcctccccagggacgctgcgcgcggagccctgtcagagcagcgcgtcagtgacagcggcagccgagccaggaagttatcaggcagcctcgaccaccaccagatttgactccgcgagctcttttgagggaaaacctggtaaaacgtcaaggtgtctaactgacctcgcctttatcatctgttctgtaaatcttaggaaaggtctgggaaaaaatcaaaacgattctgtccgttaaagggcagccactcctggccctccaggatgccggggtctgagtgatcccgagctgatctgcagaagcacagcctgtggcatttgcggtttattgtcatgaaaatgattcaacgtagaactttttcaaatggcaaaatcaaaccgctcttctttatattgtttttgaatgagttgtcatggaaacaaaatggaaataaatggtgttttttttccagatttgtgctcattgcaggtcttcccaaaata

SEQ ID NO: 72240 - DNA, 1045 bp, Homo sapiens
gaggtcaggagtttgagaccagtctggccaacatagtgaaactctgtctctactataagtacaaaaaattaaccgggtgtggtagtgtgcgtctgtaatcccagctacctgggaggctgaggcaggagaataacttgaactcgggaggcggaggttgcagtgagccaagattgcgttccagcccgcgacagtgcaagactccgtctcaaaaaacaaaaagaaagaaagaagggatactcttttttaaaaaatagatgaaggaacacttcccatctcatctcttgagtccatcataactctcatacctaagccagataaggattctgtgtttgggggagggggtgtgcacatgcacccttgtctgttcacagatcagtactgtgtgcacccgtgtgtgttcacggatcagtactgtgtgcacacgtgtgtgttcactggtcattactgtgtgtgcacccgtgtgtgtgcacagaccagtacagtgtgtgcactcgtgtgtgttcacggatcagtactgtgtgtgtgcacgtgtgtgttcacggatcattactgtgtgtgcgcccatgtgtgttcacggatcagtactgtgtgtgtgcacgtgtgtgttcacggatcgttactgtgtgtgcacccgtgtgtgttcacagatcattactgtgtgtgcgcccgtgtgtgttcacggatcattactgtgtgtgcgcccgtgtgtgttcacagaccagtactgtgtgtgcatatgtgtgtattcacagatcagtactgtgtgtgcacccgtgtgtgttcacagaccagtactgtgtgtgcatatgtgtgtgttcacagatcagtactgtgtgtgcgcccgtgtgtgttcacagatcagtactggtgtgcatgtgtgtgctcacagaccagtactgtgtgtgcatatgtgtgtgttcacagatcagtactgtgtgtgcacccgtgtgtgttcacagaccagtactgtgtgtgcatacgtgtgtgttcacagatcagtactgtgtgtgcgcccgtgtgtgttcacagatcagtactggtgtgc

SEQ ID NO: 72241 - DNA, 1059 bp, Homo sapiens
gaggcatatggaggggccacttgggtggcacccgcagcccctgtggttggcaggacttggccagggggtctggatgggaagccgatttggccaccgtttgccccaggccccgaagccatctgggagggtgctggccactgtccctgctgcccgcgtccaggtgcctgcaggtccccacagtggcttccttccagccaggcagcctgtgaacttggggtgcccccctccacctcctcaagacccttttgtaggtgcggatctcccggatcccccactgagaatcacgccctgggggcctggggtctccagctgtggagggaggtgaacccaggcccgccttccaggtccgagggtgccgcagaaggggccggggcaatgccagggaaggactcaaggtggggcccacacactcaggaggatggacccccggccgagccatgttggctgatcagacccagtgcggtttggaagtttctcgccacccacctgcccccctgcccggagagagtgggtcaggcgccctcctctcggctggtacctgcgcctcggtctctcctggcaccccgggggtcacccgccccgcgccctgcgacagcaccgagcggaggatgtggctccccagcctggccgggggcagtgagtggggccccggtgtccagccggagagggaggacgctgcgggcagccccctgcctggagccccgctccgtgtcgggcccggcctggcgtggagcctccgtcctgccgcggcttcctgctcacactggcggtgcggggcgtcctctgctggccctcggggaaccgcgggccgagctcaggcccaggggcgggcggcttccccgcggggagggacgaggaggccgggatctgggcgggagcggggactcctcctccgcccgctcgccggaggcgctcccggagtggactgatattcaggtctgggcgccagggacgagaagtgctcctttgtctcagagctgcagacagagctgcacccagcagggctggagccggggctggaggggagggcccgccccggagcgccccccgtatgcacgt

SEQ ID NO: 72242 - DNA, 1055 bp, Homo sapiens
tggcgctctgtatgctcagagcgtagatctcggcccccgcccgctgaagcggtggacaggcacccccgttttaatttgcctttagcagacctctaggcaaggataggggctccacacaaggatgcctgtcccatgccgctcaggtcaggggctctgccgcaggatgccctgtcccgcgctgcccaggccccgcctcccagcccacctggctctctccctgcaggcccaggaaggacgtgccccacagatgcagcactcactttgacgcggtggcccagatccggggtgaagctttcttcttcaaaggtacctccagggttcccgtggcggttggctgagggccatggcccactctgggtgcagaccgtctctgcagcccggccctcccctctgtgcccccaggcaagtacttctggcggctgacgcgggaccggcacctggtgtccctgcagccggcacagatgcaccgcttctggcggggcctgccgctgcacctggacagcgtggacgccgtgtacgagcgcaccagcgaccacaagatcgtcttctttaaaggtgggtgggcctccccgtcgcactccgggcttcccgggccctctgtccgcctcatggagggacggagagggtccagcctgcgtgtaagccctacgtctgcccagaggctggtcgagcacagagcagctggtttgcttgtgcactcagcagatgcactctgagcacctactgtatgccccgtcctgaggcagccgctgtaggcacacagagggcaaaacgatggaaagccctgccctcgttctagtcaggccacagtccacccgcaagtcaggaggagctgatgccagtgccgttcggtgtggtcagaaatgaaggacaatggggagaggtctccttagggagatgctgtacaagcagaaactagggaacagtgttccagcccggggaacggccgtgcgaggcaggagcagccctgccgagtcccaaaaacatcaaaggggctgcagctggagtaccaggggcctggaggaggctcgggacagaagcgtgaggggccgtgg

SEQ ID NO: 72243 - DNA, 1026 bp, Homo sapiens
ggtgaaaccccgtctctactaaaaatacaaaaattagctgggtgtggtggtgggcgcctgtaatcccagctacgcgggaggctgaggcatgagaatcgcttgaacccaggggcggaggttgcagtgaaccgagatcaagtcactgcactccagcctgggtgacacagcaagactccgtctcaaaaaataatgatcataataataataggatggcatgtcgtgggcctcggtttggcccgagttgttgtttccatcggtaaaggggtggccggcagcgtccacaggctggatgggatggcccggactgggcacagtaggtgctcactaagtatccatgtggcccctgtgatgtggggtgattgcagtgtggccgctgtcccatcaagcccaggtgaggggccagggcaagggcggctgacacaggagaaggaaaggcaggagcctcctgcccttcggggtggggccgagccccggcccacagctgtttctctcgcccccaggagacaggtactgggtgttcaaggacaataacgtagaggaaggatacccgcgccccgtctccgacttcagcctcccgcctggcggcatcgacgctgccttctcctgggcccacaatgacaggacttatttctttaaggaccagctgtactggcgctacgatgaccacacgaggcacatggaccccggctaccccgcccagagccccctgtggaggggtgtccccagcacgctggacgacgccatgcgctggtccgacggtgagtgccagctggggggacgggccatgcggccttggtttccccaccaggagaggggcatcactacagggcagccaagaggttccctgaaaggaggacggccccggtcggtgtgggctctgagggtcccagcccctcgcctggagctgccgaccctgcaggcgtccccgagtcgctccccgaaggcctggcccacgagctgcccttgttctccccgccctcagcactccctcgcccctgctgctcccccagccacgctcctgcccca

SEQ ID NO: 72244 - DNA, 1150 bp, Homo sapiens
ccccgcctgtcccgggacccccccacgcctcccgagagccccactcgactttccaggccgacccccaccccaggatccccaccccgcgacccccagcccgactttccagttcagactcccgccccgagatccgctgccgggctttccagcccagatcctcactccgagacccccagcccgactttcctgtccaaaccctcaccccgggacaccccgcaacctggtcccacagccggctttcgaggctggatccctaccccaggacccccagcgcgatcctcaacctggctccccactcggccttccagtcccgggattcccaaccgggatcatctcagggccccacctgtgtggactggggtctgggggaggcctgcgaggggcagccctggccttgaaggtgcacgtttggctttcagaagcacgatttggaggtcgccgtcaagtgcattaacaagaagaacctcgccaagtctcagacgctgctggggaaggaaatcaaaatcctgaaggtgagccagtgctgggggagggggcgtgggcgtgggcgtgggcaagcccccctccccacactgataacaaacttgggtttctgtcctaggaactgaaacatgaaaacatcgtggccctgtacgacttccaggtaaggcctctgggctgcggtctgctggggaccgggctgggggactgtggccccaggtgctggatcccctggtgagcactggtgttgagcctgtccaggctggggtctactgggcccctggagactccaccctgggtccaggcctgggctggtgctggctcttgctgtgacttccccagctgtgagaccggggagggggtgtctgggccgcagggcgccccagggcagggctgagttctcctgaacaggcatcccctccccgccgggcgtcagtcctaggggccctgcctgagtccggcgtccccggctggccctggcagcactgccggcctggcccacctgtctaggccgtgtgtttgttgacattgctcctgcggccggcattggccggcctcgctctgcgtcagacggggcgggggaggggccgccggagactcctgctcgctggcagtcagggccgggccggggcacaggcggctgccgctggctggccaaggagatgacctc

SEQ ID NO: 72245 - DNA, 1002 bp, Homo sapiens
gggaccagctggctttcgtgctgcctccgtgtcccggggcccagggcaggcagggctggggctgtgggagccagggtgccgtcctggggaccaggaacctgaggcgggagatccgccccgccaaagtgctgactaatggctctgtgacctgtttactgagcccagggcccagcccctggctgagggaagggctggcaggccgtgttttggtggcctcctccgtccgcctctcagagctttgctgtggccttggggaccgaggcttgtcacaaggtgccgggtggggggggcccaggtccagcgagtacctggaaacccaggcacactgtgtcctggagctgggccatccctcctgctgcttttcccgccctcttcccaccccttttctccctgctttcctccctcccttcctcctctttcctcatcctctccatgtttggaagcctcctgcctggaccacagcctgcacatgcgtcatggctctgggagccagcaaggagtggacagctgtccctggccaggcagcgactctgagggactccccctccaccctgggctacactgcctgctgctcccctccagggctccccaggtccagtcctgggcatctccaggccaggccctgtgactgtccgcacgacccccgcagacccgggaccagtatccccaggcccagctccatcccagtcagccacacacacctggttgtgggcatctgccacttcctccagtgttggcaactctgcggctttctctactcaggaagcacttggagccgccagctgcaggcgctcctgtctccgggcaccgggctctgctggagctgcagcttagcctgccctcgcccccacaggcgtggggattgttgccctgtgtcggtaaggcaatgtttgaggcaggcacccaaacccaggaaaaaataactgggttttaaaaatggacaatgaacgatttgggtgataaaagaaaatcctcaaacattacgggagggagtgcggtcga

SEQ ID NO: 72246 - DNA, 1271 bp, Homo sapiens
cttggggaaggttctgtgctggctcaatccatatcagaaagtttacccctcggccaggcacagtggatcacacctgtgaccctagcactgtgggaggccaagacagaccagcctgggcaacatagcaagactcgctctctctaaaaaaaagaaaaaaaaagaaaaaaaattagccaggcatagtggcatgtctcagctactataaaggttgtaggaggattgattaaacccaggagtttaaggctgcagtgagccgtgatgttgccaccgcgttccagcctgggcagcagagtgtaaccctgtctcaaaaacacaaaacaaaaccctcaaaaagtttacccctctctgttagaggtcaccatctgtaagcacagtggtcgagagccaggctgacgctgatgaggggcccagtcctggctgccatatgtgcacacacagcttctttagtttgcggtcctatttcttcctctgtgaagcagaaagcacgggctgtgagggctgtgtgagggaggagggagtgctctcgggttggaggagccatcgtggaggtgctagctgctggcctgattgggtctgccgtggtgattttcagccatggcgtgcctgttgcccgagattccataactgatttcaccaaggccctgtaggtgggacatgaggttattttgggatgctggtacatcagggtggttgtgactggatccttagaagtagaatccttgggtaggagggatgctggtttttaatttgggtagctattgccaaatggacctccggagaggcaatgccactggtctctcagcctgtctccaagcatgtgtctccctaggtccttgccaggagggtggctctcagaggtttccatcgtggctcatgtgagaagtagaaaatgacatctcttatggttttgcttttcttttttttttgagactgagttttgctcttgtcgcccaggctggagtgcagtgacacaatctcccctcactgcaacctccgcctcctgggtccaagcgatcctcctgcctcagcctcccgagtagctgggattacaggcgcctgccaccacgctaggctaatttttgtatttgcagtagagacacggtttcaccatgttggccagcctggtctcgaactgacctcatgatccacccacctcggcctcccaaagtggtgggattgcaggagtgaaccaccatgcctgggcggttttcttttacattggtgatgaatgagcttccctatccgagcatgggaatgttagaaataccacc

SEQ ID NO: 72247 - DNA, 1208 bp, Homo sapiens
gtagtcccagctactcatgaggctgaggcaggagaatcgcttgaacccaggaagtggaggctgcagtgagctgagattgcgccgctgcactccagcctgggcgacagagtgaaactctctcaaaaaaaaaaaaaaaaaaaaaaaactgttgtggttgtgatggcatcttgagtatgttaagtctttagaactgtgcctgccactttgtaagtgctctgtcaatgttcttgaaaggtaggtgtcctttatatatgaagcaaagtagcttctttgtgataggttacaggtattccccgccatgttgtttgttgactgttgaggttgttatttttgttcttattgtgttgggttttgtgtattgggtttcttttttagccatacaaaattgtgaaaatgtgagtgcctgggaagtgtgtgccttgggtcacgctctttgagtccaccacagccgctgggaggcggctggagcacctggggagcacctggcctccttactgagcatgtggtgtccctgtctggacttgcctggccccaggagtgcggccaccacagaaatcagggtatagggctgtggagccaggctgggatcctgcccagcatgccctgggaggagggctgatggctactggccttgctgatggtggcccccctggccagcacgccatctgacaggttccttgcagctaaaggtcttgctgggccacccaggtgtgactcactcaggccctgcagacagagccgctgcctgtgagttacttgcagtggagacctgagtcaagaggtgtccagccctgcttggggtcctgggagaccatgggtccaggcagtccagcccagcatgagactgtaactccccatcccagagtgaggagggggctgccaggcctggcctggtctggccggggggctgtctgcagtgtgagttggggcaggatgcaggccgagtagaaacccgtggggtgggtacccagctcctgggcaggggcctgtgaaggggctcccagggcccaggcagttctggaattacctccgaagttgtgtatatctttttttttttttttaactttgaaaacaatgggatgagactgggcacagtggctcacgcctgtaatcccagcactttgggaggccgaggtgggcagatcacctgaggtcaggagttcgagaccagcctggccaacatggcaaaaccccatctctactaaaag

SEQ ID NO: 72248 - DNA, 2259 bp, Homo sapiens
tggtatcagtatctgtccgcgatggctgggggtcaggtctcagccacctgaaggacagagctgctgggaacagtttttactggggtgtgcgccaactaggatggccgggtctcggggggaatgtgaggagttggcgtcttcctgagggtctctgcagcttacaccccctgcaccccccaactcgcactggggttgtttcctgctttttccaagcaaggtcgtgccctcagaagggttgggccacccacccctgcctcactgcatctagggacctgcctcaaccccctgcggctggctcccggattgtccagacccccaggcccagcaggcgggaggctgcagaggtcagccttgggctgcagccccaggaggcccatacacaatgggcggctgcaggtggttccccagggccagagggtggcccttccttcttagggtggagccggcatcccttcccttttgggagctgtccaggagccccgcctgggggtgcagagtggttctgtccagccacagctgtggcttttgccactttccggagccagctctggaggtgtgaactaggtcagtgcctgctcaccaggcccagcccaggatcaccagacaagagtagggctggcagagggtgggagcctggatcctattaagtaaagcaccttagcaccccaggggtggggcagcctcctacgtgcccagacacccgtgccaggctgcctgggacacctggctctggccggccgtgggtgcgtgtgtgcagggtgtgggggccggcctgcctggggagtgctgtcccaggtccctcaggcatgctgcctggagacagtggggtgttgatattgctgtctttttgaagtgttctgagcctcagatgcatgtgttgggacttttcagggacagccctgtggaatggtcagcagccgttccctgtttcctccctttaaataggcggcaagttgggacccacctcccggggtgggggtgatggtgcagggagcctggtgtgtttgattagggcatgggcggtgtggccacaactgtgtgtgtcaccacgggacggacccccggaccctgtcttgggaggcgagctgctctgcctggggtggccggtttcctcccctggagcccagggaggcagttgtggccctttctggtgtcttaactgggtgacttgattctgggagcttgcccggtccccactgcccagggtagcttgtgaaaaccaaatgtagctgcgaggcagacgtggagcccgatgccctgtgtgggttctgcaaggcagagctggagcccgatgccctgtgtgggttctgggtgggcccaggggaggtcagctgtggccggtgaggctgtgctctcacctgacccccctcaagagccctagagagagtcgctgcctgtgggaagggtggacaggcccagctgggggcccccgtcggggggtgttgtggcgcagggcctgggcctgcagctgccctggaggagctcccccagccctggcagaggtggtcctgggcttgtttgtcctcacttctcatccctgactctgccagggttggagacagcaaggctaggtccttccggggacacagagggtgactggcttggcattggcactgggcagagtgaggacaggactccagcccacctgcttgggctgtgctgccatttcccagcctgggcacgcctcccaacctctggggcctcagtgtgctcgtatgggaagtgggctggttatggcctgctgcctgggctcctgcagggctggtgtagttcaacttcacaggaggctctcggaggcacgggaaaggccctggtgtgccccgatgcccagctcagggagttggatgcccacagccctgagggcctgtctgaagctgtcatctgtcccaggggagttgggaagacccgaatgcctgtggtgaggtggatgcccccaccctaccctgcagccccacccccagtggccttgagtcacctgctggagaggaccttttaggagagaggctgagcatgggccaggccttggtttctgcaagggaccatttgaagtgcagggaagaggctggaggtgcttcggtcccacagccccctgcccactccctcctgggagctggtgccccctgaggttttggggacagaggagggctgccagcacagtggggagggcagaggggtctctaggaaggtgacctagggggtgacatctgtgactctggggcaaggccaggggtctagacgtgtcagtagcgaggtgggttc

SEQ ID NO: 72249 - DNA, 1054 bp, Homo sapiens
tctacctggttatggaggtgagtgccttgtggtgccaggacaagtgcaggctgatggccatggccctgggagccccacagggagggacatggctggggggagggtgatgagcaccttttctttttttttgagatggagtctcactgtcgcccaggctggagtgcagtgctgcgatctcagcttactgcaacctccacctccgggttcaagcaatcctcctgcctcagcctcccgagtagctgggagtaattacaggtgtgtgccaccacgcccggctaatttttatacttttagtagagatggggtttcgccacgttggccaggctggtcttgaacctcctgacttcaagcgatctgcccaccttggcctcccaaagtgctcggattacaggcgtgagctgccacgcctgctgagtatcactattgatgtcttccagcagggactgtggggacacctgccctgggctgggcaggtgcctgcgggctcagggagtagtgtccaagtgtgaggggtggggaggctgggcagggctgggaggtgggccctgggccctgctgcagcctgatgcgtgtctggtctcttgcagtactgcaacggtggggacctggccgactacctgcacggtgagtgcacagctgcgccacctgggctgccagccggtcccacagggcccgcacccagggccacactggcccagtctgggaggcagcctggctcgagtgggtccttggctcattgtgagattggctctttcttgtccccctgggcctcttgaggggatgcagggagctgagctgctcccggctgttaaggatgcagtccctccgctggcctcccccttgcttgaggagacagctgtgaccagaatagcccgaggggagccgcacaaaccaggggtgggggctgttgtcttcatagtgtggctggaaggcggctcttggcccacccaaagttgagccctgtggcggatgggaggggatgtgctgcacggggcggggcggggcagagggaaggacagcaggggggcggccgcgcccgtctgttcccaggctc

SEQ ID NO: 72250 - DNA, 1113 bp, Homo sapiens
cgggaagaggggcaggagcgggacccgggcggaaccgcggtggcactgaggctgggcttcggcggcctcccgtctctggagcagctgcagcccggggctgagtggtggggccggcgcgccgggctctgcgcaggagcttcaggtgcgccctggtctcggcggcccgtggtggcttgtgcccctcctgacccggggtttcctcccggcctgcggccctgcctggcgctctccatccgtgtggcgggaccggcctggctgcgcgggactcacccctgggggaggaaacacggcccccaggccctgagccgcctctccccgcagccatgcgcacgctgagcgaggacaccatcaggctcttcctgcagcagatcgcgggcgccatgcggcttctgcacagcaaaggcatcatccaccgcgacctgaaaccgcagaacatcctgctgtccaaccccgccggccgccgcgccaaccccaacagcatccgcgtcaagatcggtcagcccgcgggcaggcaggcgggcccggcggggaggggctccggggccggcgccggtcctgacgcttctctcccgcagctgacttcggcttcgcgcggtacctccagagcaacatgatggcggccacactctgcggctcccccatgtacatggtgtgtttaccttggccgggctgtgccgggtgggcgcctctctgggcttgctggttggttggctggcgtgtggtgcgctctgctctggttggctgtggcctggcgggcaccttctgtggttggcgtgcgggggcctcacactgacccgacttctggtcccgcaggcccccgaggtcatcatgtcccagcactacgacgggaaggcggacctgtggagcatcggcaccatcgtctaccagtgcctgacggggaaggcgcccttccaggtaactgggcttggccctgctccccacgccgcaccgtcagtgcaagtgtccgccagctgcggtcagacgccccctgcgagccctgcccgcgccccacgagctcccctcgggtcctggctggcggggcgggcgtccaggggtccagtggggaaggggcctcggtgtcccccagggagggcggcgccgccggcggtgact

SEQ ID NO: 72251 - DNA, 1601 bp, Homo sapiens
gcaggcttgggatggggatggggtgttggaggggctggtgctgccctgtgacagtcatagggtggcccaggagggagcctccctccttcctgctggtcggggtgtagccggaagtggaggggatatggttgagcttgtccagtctgtgggttggctcgagggtgaggaggagacaggaggatggcccagactgacctatgcatgtttatctcagccccacccgtgcctgtgccctcgtacccaagctcggggtccggcagcagctccagcagcagctccacctcccacctggcctccccgccggtgagttgccgccccaggggcttggcagcttctccctccactcagcagtcaggggctccagccctgggcccccgcggggacgtgctgtgacttctgttgtctgtgtgagtcacgaaagacatggatgagttcattctgtcagatgttgaagccccacaaacgggtgacagcccctcccaacacccacagccctcaggtcccagaggccgatagggcggctgtttggtctggtcctgtctttggttttgtgctgacgtggacagaagcagcgtgtggccttggcccactgacacctgcacccctggcctccctcgtgtcttccattggactcaaagcatgagtagggttgcagggtgatggccccacatgatgatggcactccttgtgtgacatgggaggggtctgcagagcacctgagtcggccatgaacccccgtccctctgtccatctgactgggagcctggctctcaggcatggtgttgtggctggtggtgatgagttcatgtctgggctctcctggcctggccccctgctctgtgaccagggaccggtcctctgaccttggttgtctgcctgtatcatggccgaaagctcagatgtggcgaggggagcgtggcagcgccctgctgtagggagctgtggcatccgcagacctgccctggggcacttggggctttagccaccaccgcacggatggtgtgccctgggccttagcatggtgctggcctcagagcagggcccaccggggtggcagcctctccactggacacgccttccatggtacctcgttctcttggctatgccgatggaaaagtgaggtgcagagggcaggtggtgaacaactccccaaaacagggcctcccagagcttctgggagctgagggcttcaacccacccaggctgcatggtgagagtggctcgtcggggggcctgtccctgcgaggtcaaagctggcctttgagtggagtgctctggaagtacagagaagagcggagcacaggaagaaagacgtgcccagcccttctcagccccagcgccccgatctttactggggctctgggccatcccaggagggggaatttgctcccctgagtgtgtaggtccctgagacctgctcaccagcccctccgttgactctcagtccctgggcgagatgcagcagctgcagaagaccctggcctccccggctgacaccgctggcttcctgcacagctcccgggactctggtggcagcaaggactcttcctgtgacacagacgacttcgtcatggtccccgcgcagtttccaggtcaggggg

SEQ ID NO: 72252 - DNA, 1499 bp, Homo sapiens
gacctctctccaccacagccgggctggcccgttctccagcagcaggtgcggcgcctctgtccccatcccagtccccacgcaggtgcagaactaccagcgcattgagcgaaacctgcagtcacccacccagttccaaacacctcggtgagtgtggagcccccaggtagccaggcgtggctggggccttgtgtggcaggagcccttccacggctcccatagagggacagggtcgtcatccatgtgcagttgtgcaggctgcgcactgcgtaactcagcaccaccatttactttgttgatgtcttgggtttctagagttattttgacagttttctgatcagtaaaatctctctagtttataaaatcaatattgactttggccagttttaacagacagaagtaaatggtgggaggaaagggtacctttcttttaactcacagaaggctgtgtgggccagtgggtgtctggcaggggatggagactttagggtgagggtgccttgggttggcaccccgggcaggaaagctaaggggccaactcctcccacacacccactgtgtggccggttacctggacagagtgcattagaggatgagccatctgtcagcactgtagccacttggcgtggcatggggtcctgggctgctggggcctcccctcctaatacctgccttgtccccaggtcctctgccgtccacaggtcaggcagggctgctgaggcctcccctcctaatatctgccttgtcttcaggtcctctgccatccgcaggtcaggcagcaccagccccctgggctttgcaagggccagcccctcgccccctgcccacgctgagcatggaggcgtcctggccaggaagatgtctctgggtggaggccggccctacacgccatctcctcaaggtgcgcctgcaggctggggcctgggaaggggcgtctgtaggcagtgggtgaggaggctgtctctgtcccagctggaccctgacagatctctcttttccccaagttggaaccatccctgagcggccaggctggagcgggacgccctccccacagggagctgagatgcggggtggcaggtcccctcgtccaggtgggtgcagtccggaggggggagggggtgctaggctgacctccctcgctcacgttgtcatcctggtctaaagcccttgctctttccaagtgaaaaggagtgggaaggaagctggtggaacagaagccaactgcctctccacctcctggctgtgtgggctggggcaagtttcttatcccctctgtgccagtcttctgtgctggctgagggtcaggtttaagagtggcgcctcagctactcgggaggctgaggcaggagaaccgcttgaacctgggaggcagaggttgcagtgagccgagatcataccaccgcactccagcctgaatgacagggcgagaccccgtctcaacaaaagaaaaagagtggggccttggagtgcgtctaccccaaggggctccgtgtggtagcagt

SEQ ID NO: 72253 - DNA, 1068 bp, Homo sapiens
cctgcggggctcacccaagctgcccgacttcctgcagcgaaaccccctgccccccatcctgggctcccccaccaaggtaatgggcactgccatgtgtgcaggggcacagagccctggggaagatgtgtgggaatggccagtcctgaacaaagaccgaggaaggcagctctgtaccttttgacccccgcctgggctcatgctcaggctgctcccacatgcctgccagttcctgcggactcggccccttccccaggcaccgggccccagggctgcagacctgcggggcagtcttcaccccatctctgtcctcctaggctgtgccctcctttgacttcccgaagacccccagctcccagaacctgctggccctcctagcccggcagggcgtggtgatgacgccccctcgaaaccggacgctgcccgacctctcggaggtgggacccttccatggtcagccgttgggccctggcctgcggccaggcgaggaccccaagggcccctttggccggtgagttgaggggacaggccttggacgggcttctgaggggcagcctctttcccctgcattgttctgctgggtacttctggggggtagaacaggaaaagcccagccttgcccttctgtgggtgcccagtgtggctgggtgccagagagcctggcccacctgtggctggccctagacccacagcaggtccccgtcctgagcctcgccatgcccgcctgtaagctggggtgacaggagcgcctgcctctcgaggtgggccaggagaccgtgcatcatgtgtgtctggcctgcagagggacctctcgaggtccagttagggtggggtgggccgggcacccagcacagccctgcacactcccacaggtctttcagcaccagccgcctcactgacctgctccttaaggcggcgtttgggacacaagccccggacccgggcagcacggagagcctgcaggagaagcccatggagatcggtgtgtgggtgggtggggctcggaggctgtgggatgggggtcggaggctgtgggatgggggtcggaggctgtgggatgggggtcggagg

SEQ ID NO: 72254 - DNA, 3798 bp, Homo sapiens
gggtcacctgccagccccatagcgaggatgggggactgccttgccctttgaggtccttttgggccttgggcccagctgtggggcacagtagcacaccaagccacgcacctaccccattccagacagtggcagctgccctcctcccaggcagatctgggctgggggtcgggatacccagagggtcccttggtgggcaccgcagcccttggcctgaggtggggagctggggacttgggggttgtggtgagtggcaagaggttgaggagtggctctaggggcctgctgtgcttctcctgttggagcattgggatataacaggtgtaaaccgaggcagaggcacattgggccctggaggtgtgggagtctgtgggggatggatgggggccacggtgtctgctggtcctggtgtgcccctcatcgccctctccctgcagcgggccccactggctctgccagctcttctgcccgccacctggtgcctgggccctgcagcgaggccccagcccctgagctccctgctccaggacacggctgcagctttgccgaccccattactgcgaacctggagggggctgtgaccttcgaggcccccgacctccctgaggagaccctcatggaggtgagggctggagtgagcaaaggttcccattctggctggagggtgtgtggggtgtgtggggtgtcgggtgtgtggggtatagggtgtgtggggtgtcgggtgtggggtgtcgggggtgtggggtgtagtgtgtggggtgtagagtgtgtggggtgtggggtgtcgggtgtgtggggtgtcgggtgtgtggggtgtcgggtgtgtggggtgtagggtgtggggtgtagggtgtgtggggtgcagggtgtgtggggtgcagggtgtgtggggtgcagggtgtggggtgcagggtgtgtggggtgtcgggtgtgtggggtgcagggtgtgtggggtgtcggctgtgtggggtgtacggtgtgtggggtgcagggtgtgtggggtgtcgggcgtggcacatcccagctgcccgggctgcagcaggggagggtaccctgccctgcctccccaaggcgtcatcggtgagtctgaagggagacaagccccttccaagcccgggcagcacttgccgccctgacggccgcttcctgcagcaagagcacacggagatcctgcgtggcctgcgcttcacgctgctgttcgtgcagcacgtcctggagatcgcagccctgaagggcagcgccagtgaggcggcggggggccctgagtaccagctgcaggagagtgtggtggccgaccagatcagcctgctgagccgagaatgggggtgggtgccgccagggctggggtggggcgggtggtggcctgggggccaggaccaaccggcctcctctgatctgcctgccgcccccagcttcgcggaacagctggtgctgtacctgaaggtggccgagctactgtcctccggcctgcaaagtgccatcgaccagatccgggccggcaagctctgcctgtcgtccactgtgaagcagggtgagggctgcgaccgctcagcccacatgccgggttggggaggaagcccaccttgcaactgcctgggtgacagggtaacagggaggctgcttgagtaggcccctgtgcagaggtgcagaggccccggggcctggcccagtgtgcagagcacagaggccattgggtcggacagcaccctggagcccagtatgcagagcacagaggccgtggggtcggatggcacccgggacaaggtgcggagcctggccacaccctcaaggccacggggagccagggctgtggcagggagggagggacgtgctcgctcagtgcaccgggcagatcatggccactccagccctgccccgtgtctgctgcaccctgagctgaccaccctcgtcctttgcagtggtgcgcaggctgaatgagctgtacaaggccagcgtggtgtcctgccagggcctgagcctgcggctgcagcgcttcttcctggacaagcagcggctcctggaccgcattcacagcatcactgccgagaggctcatcttcagccacgctgtgcagatggtacgggacagacagacaccagtggggcaggggccaggaacttccaggcccgccgtctccactgggacgggaccttgatgcccacagcgtggtgagactttggggggtgtcacttctggaggtcttgaaatgacagcattatgcacccccagcctcctgcaggcgctcgcagctcggctgggtgcatccttgattgtacgggtgccgtggcccatgtgcatcctgcctcgccccgactcagtttccccaattgtaaaatgagagacttggtcttcaggcctcgtagtcaggtgtcagcctccagaagcagcacctggtcccggacaacctgcctggaagtgtggtgcactcaggtggtaccacgggcaaagactccctgcttgggctctgaagagctccctctgcctctgaggtggtgcccccttttcgtttattttttgttgtttttttttaagagagggtcttgcactgttgcccaggctgaagtgtagtgtagccgctaactcctgggctgaaatgatcctcttgcctcagcttcccaagatgctgggtattacaggcaaaaactcatgagtgcctgagtctccttttttaagaaaatttaagcatgtagtaaaaatccagtctgaacaaacatgggaaaagtcagcctccctcctgccccccttcccgcccaggcaggccaggcagcagcagtaatgacactgactgagcggcgggcactctgttgtcctggggccgggctgagagcgctggccagggtcatctggttccaggcagtgtctccccttggccctgtgaccatcccctctgcacagcaggctgcaccagcacttatgtctccacgtcactgccctgagcgcctatctgccacccctgggccgctgccgtgggtgcagggcagcccttgctgggagggagtggggtgagctggccctgtccagcctctgtcctcgcccccaggtgcagtcggctgccctggacgagatgttccagcaccgtgagggctgcgtcccacgctaccacaaggccctgctgctcctggaggggctgcagcacatgctctcggaccaggccgacatcgagaacgtcaccaagtgtgagtgcccggctgggctgggggctggggactctgggcgtctccctcacactcccctctccctccacaggcaagctgtgcattgagcggagactctcggcgctgctgactggcatctgtgcctgacctttctggcctggctgggccccccgtcctgccgagccctgcagagtgggctctgtgtgctggctggactcctcgggacaagcccatggcgctgatcgctggtgctgagccctgccctgggccccacggacagtcagcctgccggcctccctgcagctcacggggcagaaccagcacatctggagccacacagcttggggggtgtctcccatcttttacaggtggggatcacagaatttctgcccctccagctgcctggctcagcaggcgtgggtgccaccaccctctagccccagggcagccccggaggacaggcaagggcctgagaccactgccgactcaaagccaaagcgagctcctgcttagggaaggtcagcaggcactgtgcccaggaagagcctgcggcctcggcgtcccccagtctccaggagcctctccctccgagatacccacccagctttgtcaatcacccaagcactttatgcatatagagacagaa

SEQ ID NO: 72255 - DNA, 1139 bp, Homo sapiens
ttgacagtcagttttgatgtcagctcctcggcagggtaggcctgatgacagccctgtccctccctgcctctgccttgcccaaggccacggagggcatctgcagagaggcctgccttccggattccaggcgggcatgccctgcaaaccccgcctgggcctcccttggtctgcccagccctcgattagccctgcctgaatcagtagatacttgaacgagtccccagtctgcgggaggcagtggtggggccatggacccatgcggggggttccagggtcacacgccacataacagacaaaaatacacacacgtgtgtttttctttgcaatacttgaaatattgccactgtgcttggacttagaagaagaaaatccccgtgacttcttcctcatcaccttgatggctttattctcaccttgtggggcatgtttgtatttattgcttcatggccgactggaatcctgagtcctgggaagctggcactgcggggatcttgcccggtgtcctggtcctcttgcttccgtcgcggccgcatgtgcgtgtgtccaagcaggtcctgggcgcctcaactgctgcccctggttgaatgttctcttgatagtgctggaccctttgtctattttaaagcgaattttgtgtgatttcctgccctttgcgttatattgtataataccaacgtaaggaaataaacctttggaattgttgggctggtgtcaccacttgtcttcgttggcttgtcactgttttcagggttctgtcattttctttctcagccgaggcgcaggagcccagggcccctccacaggtgcccacaatggtcgacacagccctgggagcagagccccagggcagaagctggatgtgttgagggacaatgcaaacccctgcgccacaggaagcctctcccgccaggctgggggtcctgcacagggtgaagagagtccagagggcagggcatctgccttggtatagctttgggcacctgctttgactcctttgggggatacacctaggaggggctttcggggccacgtggagctgtgtgttaacttccaagaagcaacacggttcgttcactgcagcctctgagcagctgggcctccaaggccttgccgtgtggttttgatttgcatttccccga

SEQ ID NO: 72256 - DNA, 2087 bp, Homo sapiens
aggaattgatgcaaaaacattccatttttaaaccccaaatgtcagtgagctatcagcaataaaattctaacaaaattttgagcagttgtaaaaattatgttgcctttttttctcaaaatatttcctctcaggtaaaggttgtgacaggaaaggatgggcagactgggactcccgttgctatagcaacccagcttccgccaaaggtttctgctgctttttcatcccagcagcaaccatttcaggtacttttcgatggttctcaaatgtagtctcatcccaaacttttccttcatccagatattttaaccttcgatatactacttgctcttcagcattttttttccagagcccatttcttatttttcaacagtaaaaaatcttcctgcgtatacaattataaaattaaattgcatgagttaatgatgacacagatcttagtgcattactttctttcgtatacttgtaatgcggtagtagctttagcatgcatgtcatctaatagtcctgttgaatgtatgctcaggattccttgtgtgctgtgttttcaatgttggttctttcttgtgtcctttattttgagaacagtgcaaaacagaataagaaaaaaaagattcaagtagatgataaattggtattttccatagctagaggaaatgctgaagtgaaatacacttctgaaatcatcaggaccacaggcttctaaacggatattaagtgaatgcaaactgattatttttaattttttgcaaattcactcagtgttaaattagtaatgccaataatttaaaaacacaggtcactcacgcctgtaatcccagcactttgggagactgaggtgcatggatcacctgaggtcaggaattcgagaccagcctagccaacagggtgaaatgctgtccctactaaaactatgaaaattagctgggcatggtggtgcatgcctataatcccggctactcaggaggctgaggcaggagaattgcttgaacctgggaggcggaggttgcagtgagccgagattgtgtcactgcactccagcctgggcagtagagcaggactccgtctcaaaaacaaacaaacaaacaaacaaaaaccaaacaaaccatcaaatttctactagctttggaatagatagtgttgggttgtgaaagcagtttcatccttgggatttttgttgttactttaaattttgatttaatttcaaatgtacataatagttgcaattaattattttaaaaaccccttatatcctttaccaaatttatcagttgtttttgccccatttgcattattttcattctcatatatatacacatatctaaaacatcatatcctattcttttatctgtaaatacttcagcatgtattagataagaatgtttccttacctaatcacagtacagtgataaatatcaggaaattgtacagtagtacaataatacattctaatccatagtttatattcaaatttcatctcttgtctcaaggatgtccttcatagtgtttctttccccctagtccagtatcaagttgtcatgcctctctggcctttttaatctgggttggtttcttagtctttcatgaccttggctttggcctgggcctgggcgttaaaaagtacagaccaattattttgtacagtgtcctttgatgtgggattgtctgatgttttcttgtgtcctctttggatcatgtatttttgagaagattgctatagaagtaatgatatgtccgtttcaatgtgtcttatcagaagggtgtgatgtcactttgtcctataactagtaatgttaactctgaccacttcgttaaggtggtttctaccaggcctgtccagtggaaatttatttatttttccttttttaaatgatgagtaatttgggggaagatactttgagactatgtaaatatcctgaatctccttaaacttttacccactagttctagcatctgttggtgagtcttgcctgaatcagttattactataaagaatccatgctgggttttctaactccatcattctgtctacatttattagaatcagtaggctgtaatatatcactatcagtatttatttgcttatgttt

SEQ ID NO: 72257 - DNA, 1036 bp, Homo sapiens
tggtcccactatgttgcccaggctggtctcaaactcctgggctcaagtcttcttgcctcagcctcccaaagtgctgggattataagcgtgagccaccgcgcccaactgtctgtcaatatatctaaaggaaaaacgcctagaaatgaaattgctagatcaaagcgcagatgtagttaagtaataatggtgctcaattgcccaccaaaaggacagggccagttttcactgccatcaacaatttctggttctttcacattttgatcgttttattaggtataagtcatttaatcctcattgatctgatgggtgaaacattccttgttctgatatgggtttctttagttttgagcacgctgtgcagcctcattccctgtgtgctgggcatttgtgagtctgctccactgcccgctctccatgctctcgtccgtgtacttgtgatgctcctcatgtgtgcctgtgctttctgagtgctaagcaagcccacctctgcccgtcacacacgttgcagtgttgcctctcaggttgttgcttgtccttggccttttcatgatgctttttcttatatcggcaacattttaatgagaaattgtatttatcagccttatgttttatggcttctggattttagttcatgtatagaaaggcctcccttttccaagatgataaaaacacacatgtttttttctactacttctctggttttatttttacatcaaactgcaccttttttgaaaattattctagagcagtctaagaggcctcgccttgaagtgggtcaccaaggggtagttttccagcacccaggggcggacgcaggcgttcctctccagcaactaatgccgaccgcacaaggtaaggcccagcagcagagccagctccccgctcaggagcaggcagcacactgcggttccagaaaccagcaccagactcagacttgggcagtggaggtagcgtgtttgcagtggggtgcctgaaattgagatacttctctgagtcccagtcgatatcatatgcaaagcccctggagacatattct

SEQ ID NO: 72258 - DNA, 1048 bp, Homo sapiens
caggcgtggtggcaagtgcctgtagtccaagctacttcaaaggcttaggcaggagaatcacttgaacctgggaggtgaaggttgcactgagctgagatcacaccattgcactccagcctgggtgacagagtgagactctgtctcaaaaaaaaaaaaaaaataataataataatagacaactgttattattgtcactcttagtaccaggggtccctccttactcacccatatgttgtgtgaagggcatggtgtcagttatcccttatgatctgcctagcaaccctcaggtaggtggcagcgacccattctaccagtgtggagacacatactcagaggttctggggctggccccaggttacatggcgatgaagtgatgagcggggcttgaccctagctccatgtgagtgcaaaaccatgttggacaccacccaccagacgtgctccctggacgcctgctttgctgcttttgggatgctatatgctctgcaaatgtgtgtaaggtgttactgatccagcttgatacacatgtgtaaggcgttactgatgcagcttgatacacatttcaggtagttaaaatgcccctcctcctccactgattaattttacccagtgtgtttttgggatgtccacagtaaactggtttcggttcctaaggaatagcgaaatgccacagcctcggtgccagccgtcaacagggcactgacagggaggccggggaggactctcagcccccttggttctccactgtttgatgcacatcagggcgtggggagcccactgcagagagtcttcccttccttttgccttctccctcactaacaaaggaatttcctaggtgggctttaagttcagggtttttgtttgtttgttttgaaacagggtctggctctgtcacccaggctggaatgcagtgacacgatctctgctcactgcagcctctacttcctgggcttagatgatcctcctgtccctgccccctgagtagctgggactacaggcgcacaccactacacctggctgatttttgtattgttgtagagatgggatt

SEQ ID NO: 72259 - DNA, 1122 bp, Homo sapiens
tggagtacagtggcacaaacatgactcactgcagtctcaacctcccaggctcaagcagtcctcccacctcagcctcccatgtagctgcgaccaaaggtgcacaccaccacacctggctaatttttaaatttttttgtagagatggggtctttctttgtcaaagcccaggctcatctcaaactcctgggctcaagcagtcctcccacttcagcctcccaaagtgttgggattactggcatgagccactgggcatggcctaaagatagttcataatgaaaactcctatttggttttgtggaagtgggaggatgtattatttgtggacacgttagtgttgggctgtggatacgatgtgatttgtctgcttgcatcgtggagcggaaggtgctggcagtgcgcgtctctggtgctgtgggcgctcaggtatttggcaccgtgggctgccccgacatcttttcttcaccttgctccacttgtgccctgcccttacagatggtagcatcgacaaggctccctgtggaccctgccccgccctgcccacggcctctgcccacctcttctacctcgtccctcgcgcctgtgagtggctccggcccaggaccctcccctgctcgatcctctccagtaaatagaccttcctcagccaccaataaggcactatctccagtcacttcccggaccccaggggtggtggcatctgcccccaccaaaccacagagtcctgctcagaatgccacctcgtcccaagacagttctcaggatacgctgacagaacaaataactctggtaagcatgcttaagaaagttgtaaaatgtactccagttggtgaagcacatttagttttaattgtcaagaatgtgatggcgtaaaaccgaatgcctggtcaattcagcatggcttgggaatcagtagacacaagatgaaaaccaagggttagccttttctgttggaagcagactcatgggggcagtctgcgtttttgtgataaagcctgcagtcttgggctgctttcatatgggcagtagacgagggtgggagaggtcacgtgtagcagttaggcggagagggacaagcttgagcgctggggccctgcaggctgtgaggtccctgcagccaccagt

SEQ ID NO: 72260 - DNA, 1334 bp, Homo sapiens
ccagacatcctatggtttcccatgtaaacactttggtagaaacatgaggttttaaagttttagtctgttttatagagctggggcaggactattgctccagcttcttctaaggctcctggaagggtcacatgctcctagacctctcctagaaccactttgacctttgtgttcgaatcttacctttgatattaaactgggaccttgtgctttctctctttcttagtgcctgactgagccttttgcatagtagggcttcaaatttctggggtctgagttggtggaacacactcatcacatgccgaccccaccatcccccatgtatcatctacaggagaaccaggtgcatcagcgcattgcggagctgaggaaagcaggtctgtggtcccagaggcgtctgccaaagctgcaggaggccccacgccccaagtcccactgggactatctgctggaggagatgcagtggatggccacagactttgcccaggagaggaggtggaaggtggctgctgcgaagaaggtgggttggaatgcgtggagctgctgtgctgtgtgcgttggtgggggcttgagtttgcagtggtgtaagtggtggggaggtctccagacccactttttttttttttttttttttttttcccccagacagggtcttgctctgttgtccaggctggaatgtccagctaattttgtgttttttgccacattacccagactggtcttgaatcctgggctcaagtgattgctcgcctcggcctcctggagtgctgggattgcaggcgtgaaccactgtgcctggcagattcactctagaggccttaacctgtgaagtctgggaaggatacttccctgttgtttggagaataactgtgctgtgtaattaagtctctgaggtggtgtcttcagagcccagcatgcgttgttgggatcaagcctgtgctcagtgctcacccactaagcaatgatgtggatttagcttcattttgttgcctggctttgcctggcagttggagttaggatacctgcagtgccacaggttcaggctggtggctggggctgttcagggagctgagaggctaagagttagaaggcacctggtatcagtcaagggacagcaaggggctgtcctaggctttcctgcctggccacacggcctcctgcccttcctcctgggcttctagtctagctttctctttaattttggctgagaatttatttttctcctaactgttgccaaagcaggcgcagagtccttggaagactctggaggccctactgctaacactagaaaagtgagaacaagtggtagatttctagaaaccccaggcctcagtggg

SEQ ID NO: 72261 - DNA, 1118 bp, Homo sapiens
gttttctcatcttaattctctccacccatttgaggttctgttggtgggtatgtgaagtgtctaaacttttggaaagcagtttgacaatttaaagcaaaagctttaaaaatgtgaattatcgcagcccaataatttctataactggtgcagcattcatgaaatgagatgccgacccatgtttattgaatggagagatgttaatcatctattaaatgggaaaagaagattatagcacaatgtggtattctagttttgaggaaaataatgtgtatttggtgaaaagtataaaaacactttctagaaaagtcaagctaaatattgatggtggtttttgcttatagtcatgtttctcctaatccaccctaagagcatacgaggatgtatatgacagtgaattgtatgtaattttagtctgagaagatttaaaaaaagttacatatccttttttttccagcatgacatagagtacaacatacaattcttgcacttttattcaccagctcgttagaactgtggtgcgccatcacgaggagaagcagctccgtgaagaaagggggaagaaggaagagcagagcagactgaggcggatagccgcctccacggcccgggagatagagtgcttttggtcgaatattgaacaggcgagtgctgccgttgtcatggggtcgtaagaatcagtctgtcggagctggtgaggccacttcccgagaccagagctcgggcaccttgcttaggaagctttcgagcaccagagtcagcaacgtgtgcactctcctgggctgttgcttgttggcctttgaatgagctgctcgtgcctccgtctgtcttgcacaggggatgcacctcagctgtggctgccctctgaggtgcttcatgccgtggaggggctctgggcattgtttcagggttagcgtgagtcaccaccacggttacttctagagcggtcgctcgctcacttgctttccttttttgaaattttaattcttacctcaccacctaatagaacctgggcaggatgtagttagtatgaaataaatgaaaaagcaccaaactgacgaggctggaaaacactgttttcagactctgcttatgtgctttagtgttttgtatgcagaacg

SEQ ID NO: 72262 - DNA, 1060 bp, Homo sapiens
cccaggttcaagcaattctcctgcctcagcctcccgagtagctaggactataggcgcacgccaccacacctggctaattttttttttttgtattttagtagagatggggtttcaccgtgttgcccaggctggtctcaaactcctgagctcaggcattctgtccgccttggcctcccaaagtgctaggattacaggcgtgagctaccgtgccccgcctattactccctttcattatagactcagtctactttgaaaataaactggtgctttatagccttagtctcacgtggggtgttaatttggcagtgacagctgaacacagtgagcattgatcatgtcctcgctcccccgctgccctgccccgaccccaaatggaggctgagggcagcctagcaggcttgccccggggctcccccaacctgtcccatggacactgctgtcttggtttcccattctgagtgtttggatctcatgcttgtggtttttctttcttttctttcaggattcaggaatgtctggaagaaaaagaaaagctagcatatctttgactgatgacgaaggtctgttccccctcagcactatctttgtcatctccagggctgctgatgagatgacacagagctgcagcgacttggggtttagtcttgtcatcttcagctggttggaaagctcaacctttgtatttatccagatgtctctcagtgtatagagtactttttgtatctctagaggacttgggatgttttctggagcaacatggtcgtatctgctttttgaggtttggaaacttgggtgcatcttggagagtgttggggccccatgctcctgtggcacagggccaagcctgtttctgtccttgagaggtggccctggtatgtcctctggtagacccatggttgccagccattgggatttcaggagaaactcatgtgaattttagatgttggagaaacctggttcagatgagaacagatacctgagcactcagtgtgtgagctggggacagcccacggccatgacctatttccaaacccatgtggattgagtacagaagtcctca

SEQ ID NO: 72263 - DNA, 1070 bp, Homo sapiens
tcttttctctgccaggagccaagatctctatggcgagtgaggcgtgaggttcagggctggagggctgaagagagcggagtgggcttgggttggtgattgtggaggacaggagagtcaaggagagtgttaggctgatgtggctgggcctcgtgagatgggcgatgatgacttcacggtgatcccagatggcatgcctgtgggctttccacagtggggctctgcaggaaggtaggagggttgacagcattccgtatgttggcctgaagaaggtctgccatgtgtggaaaaaccagggctgtcattcacagcctgaagtggaaggggaaatacacttccagtttcctgcccatttaattaaatttaacctgagaagtttaaaagctcagtttcaatttctgtaatagctatgcaaaataatttcgaagccttatagtgtgtaatgagtaacagacactcaagtggtgttgcctctcagtgacacttgctgataaccattttagtggacgatgaagaggaaacaattgaagaggaggaagcaaatgaaggcgttgtggaccaccaaacagaactttctaatttagccaaggaaggtaggctgttgctaccttattaaacattcagtaagtaaaaagaaacatttaaaacatgtgagatgtgaataataatatattgagtaacaacagcagcagtgcctgttttatggaaaacagtccctgtgtgcctcctgctgctctctctcctgacctggaggtcctggccctcctgggttgtgtgtcggacactgccctgactgtctttcttccctgccacctgcgtgtgtctccctgaatgtaccgttcatcttgagtgtgtgagaacttcatatgaatgaatccaccacagcttgactgaatgtgccgttcatcctgagtgtgtgagaacttcatgtgaatgaatcccaccacagcttgactgaatgtaccgttcatcttgagtgtgtgagaacttcataccaacgaatcccaccacagcttgactgaatgtaccgttcatcctgagtgtgtgagaacttcatgtgaatgaatccacca

SEQ ID NO: 72264 - DNA, 1005 bp, Homo sapiens
gtcacaacctcggtgaggcgctaagctttcaagtgtgggatgggcctttgagagacagagcacatagcttagccatgagaaaagcttttcctcttcccagtgaaatggtctatcccaactgcagagttgtcagaaaaagcaattcttcatgtgcctgtagtcccagctactcaggagggtgaggcaagaggattgcttaaggccagatgttcaggcgttcaagaccagcttgggtgacctagcgagactcgatctccaaaagaagcaattcttcctcttcctgttttctgtagatcatttttgtggctttctaattggtttatcatgtgactgttgatttcagttttgagaaaaagtttgggtgattattttgacgagctgtcattcttttatttgttcatcactgcaggtcaagtttaatgctccatctttgttgtatggggctctcagagattatcagaagattggcctggactggctggccaaactttacaggaagaatctcaatggcatattggcagatgaagctgggctgggtaaaacagtgcagatcattgctttttttgcccacctagcttgtaacgaaggtaagagtttgctagtttttttaacaatacctatttgctaggacttacctataggccagtgtgtttgatgggagtgtggggacttggctatcttatctacttctttgctcctatctgttgacctgagcaaattgaggctcagaagtattcattttatgaatgaataaaaaactggttcacagttaacatccagtaacaattagtgaaaatctaataaaatacagagactcgtcaggctatgactgaaccttgtgactccagggtcaggtcactgtgcagtgtgtgggcagcagagcaggtggtccacttcccatgctgcttctagactggcatgaacccgccgttgggctctcagccgtgtggggtggtttgtggcatgcatcttggctcactgtatccttttcatgttatcatgtcc

SEQ ID NO: 72265 - DNA, 1517 bp, Homo sapiens
aagtgctgggattgcaggcatgagccaccgcacccggccttggttgggttctgtggtgcgtactgctgtcatggtagcttctgtcacctgcacttgagctgacccttgagctcctcacgtccggcgtggcagaactgagctcgtgttttcccaagcctggctccctccctggtgttcctgttttagggtgtgcgccaccatcgaccaagttgtttgagttggaaatttgccattgctctctcctccctcctcttcccacaagtctgccatctccttcctgagtctctctcccgaccagttacctgtcgtcactatcaccccggtttcctccctcaggccgcctggtgcactgtgctcacaccagagagctactccccaccatggtcccatttcctgcccagccctggtcccagtgtgcgttgtaggtccttctgtctgcccccttcactgggtggtaagccgcacagggcatggacctgggtcctcgtctacccccgctcactgcctgcagggccagtgtaggaccaggcgtcagagctgccgagcgggtgtgtgaggggctttactctgctgcgctcaccctgcccctcactttgctcatcccccttggatgcccccacttctctttcagagcactcggtatgattgtgaatgaagtggagtggctgtctttccgtcagctctggtggggcggatgtcattctcaatggggatggcgaacaagtgcagaggggcctgcctgggatgtggacttgaatggccactctgtctaactcattaagcggacctagaaaatctgctcctgcctgcctttctggagttgggacagtcgatggtgagggtgggactatgtccatgtgccgtttggattgaatgcttcgtgtttctttctccacgggcagcactcaggaggccttgaagagcgggcactttgtcaacgtcctgagcatccttgtgcggctgcagcgcatctgcaaccaccctgggctcgtcgagccccggcacccaggctcttcctacgtggcggggccactggagtatccgtccgcatctctaatcctgaaggcactggagagagatttctggaaggtaagtggaggatccagaaagcggaattactgttggatatcttttctaggcacattatagataaaaccattcttggaaatgggttctcaaccagctcttctgcaattgcaattgcagctccgcgatacatggcaccgtctagcagcactgatggcctgccaccccttgccggagtgttccacctccggaaatttacccgagggagacaggctcacagagtggaaagatgcagagggcaggctttcttggcgttgtgtggattgtgggctgtgagaagtagctgagcatgcacgctcatcagcagagcttcaccaagggtgtggcagcacctgtgtattggcacggaggagggtctgcttgccgagtggccgttagagggggcgcgtctggatgcccacgttagggccctgccatagaaatcagttttg

SEQ ID NO: 72266 - DNA, 1053 bp, Homo sapiens
cgtgcgacccagaggcagcggggagggttggctcccagggcccccacagctgacccaggtctatgcgtggtgaaaagaaaggctgctaatgtagttaggttatctgctgctcttgggaccttgctggtgtccttggctgtggtatgcctggctctgcagatgccttttaggctgtgtggtgcagtgcaactgcttgcctccctgagcagcaacctccttgatcgtctttgcagcagttttagggtagggtgggtgtcagggctgcatttgacctggtgcctcgtgtggtggaggctggtgtggccgaaccacacatgtgtcgtgagtgtggcaggcagaggactccacccccacggtgatgtcattgtcttaacaagtgacatgtgagtgattctgaagtgatgcttttgcgggtgtcatgaggctgggagggacagacacgttagatgattaaaacgagatataaatgactcatagtctaaatctagcaattggaaatatccaaaatcctatgcttgggttaaaaagaaaggaaaggaaaggaaataggtatttggagatgaaggggccagctctgcagacagtcttgtgatccttgccattccaggagttctgcagtctttcttgttggcacttctgtatttggcttcactggggactttgagtggatcaccgtcccctcatcagtaccagaggtttctgcttagcttgaggactcacgacccagcaggctgctcctcagagagcctgcagccatcagttaaatgaacagcacccattccagtgggtgctagtctgtctttttaaaatggctttttacaaaaaagtttataaaagtttttaatagagacagaggtctccctgtgttgccaggctggtcttgaactcttgggctcaagggaccctcctgccttggtcccccaaagtggtagaattacaggtgtgagaccacacgcccggcctaaaaatggcttttgatggccgtctctgcctgttacattgtataggggttttgaaaatggccaatatagttcccagcttaaagtgggcaca

SEQ ID NO: 72267 - DNA, 1743 bp, Homo sapiens
tctttccccttccctctgtaaactgcactctgggtgctggtccctgagctggcttcctatgggcagcggtgaaccccggctccatgaggtggcctgtcctctctgtggtctgatgctctgtatcttcttgcctggaccaatgggcatctaggttgtttcagcctgtgcagtatggccagaagcccgagggtcgcaccgtggctttccccagcactcacccgccccggacggcagcccccaccacggcctctgctgctccacagggcccgcttcgaggacggccgcccatcgccacgttctctgccaatccggaggcaaaaggtagacttcacgtagttgtctgctctccgccttatggaggtttttgtgggacaagttcatggcactttcttctcgcgcctctggatgcggtaattgtccctgagtgggaacaggcaccacccgctggctttctgaaggtgccttgtttagttcttgatgagttttagactttttgatggcttgtaatggatgttttccctattgaagaagcttcactcctaggtgataagtgttgatctgatgctcacagccactgggcaggctgtttctgttgacagaggtgcgtgcgtgcagtcgtctaggagactcctgagaacgtctgctcatattgtattttgtgctgtcacttgaacttaattattcttttgaggaagggtagagtagaaaaggccatcaaaagagttaaaagtagtatttcaccacctggccaaaggggccctccacgccatgtccatccaggttttctgagctaaaaataaatgctcagacctgcattgttgccagcattctctatagaaatatgagtggaagctctgttgatgttttctttgtgtgtttaggaaatagtttctaattgatactaatgtttggttgggctgacttctaacagtttctgtttactctgagaaatgtaccgcgtagcgtactgtagctcgaagtgaagataattatcaacaagtaaaattatatttctctcaccctgtaaactatatggcccctctttttttccttaagaggggacttctcatttgagagacggtgtgaaatgtttattttatttctttaaaattcagtttaaaatattgtattttattaagaacctctaacagctttgcacaaacaaaccttatcgattgcagcagcagcagccccgtttcagacctctcaggcttccgccagtgctccacgacaccagcccgcctcggcctccagcacagccgctagcccggcccatcctgcgaaactgcgggcccagaccacagcacaggcctccaccccaggccagcccccgccccagccccaggccccctcgcacgcggccgggcagagcgcgctgcctcagaggctggtgctcccctcgcaggcccaggcccgcttgcccagtaagtggcctcacctttccaggtttctgccatctctctaccccagaggagttgtgttaagaacacggggatgtaggaggagccttgctgtccactcctttgtctttccccagccccatgcccggtgctgcctctcaccagtgcagctgcctccggcatgagtctagcagggagcgcctctgtggaggccacatccggccttctcctgtctgtgctctctctcctgaccccgccatccagctctgcttttctgctgcactcactcactgctttggtgctgtggacggcacttcccagtgttagccccggccttgttcca

SEQ ID NO: 72268 - DNA, 1018 bp, Homo sapiens
cagaacattttgctgtgtccagtgggattagtatgttttcaaaccttacatgtaccctattcattctgtggtggaaattatcctgacttaaagtattatgttatttctcaagtgccacctcaactccttttgttgttggtatagccaaattatgtggaggcctttctggaaagatgcagatgggagagggagtgatgcacagagacacttgagttcaaactaattctctttccttacaagtctctctctcccattgcccaaaaataaagaggaattgtcctagttaagtgccctaagggagaaagcagttgcatattttacatcttcatcaaactagacactgtcttgcgtgggatgagagtcatgttggtggttgccagaggagctgttctttgggagatctgtgaagtgagcaaaactgcttttcctgtgggtcggtcctcacctgtgtatggaacaaggaggattgttgagagattgacacttctatgcacaaatctctgtcttctgttttcattttcccctccttgttcacggttattctgtgggcaagatatctctagacatttttctagcctcttactaactattctttttatcatatcactaataattctggcatggatttctcgggaagaacatttagattcaagtatcaaccattgggaaataagtctttaaacctgttgttcagttgtagccggaaggtagtacctttttgagttgggggcaaatgaccacatctgagttatgttttttcaaaaaaagtgttttaagcaacgctaagttttactttttttttttttaaacagtaaatgttatagattgacgcttaccatctaattcaaattagtatgaagctttatatcttaaagctttatttatgtatgtgatttctttatgtatctagaggcattgctagatcttgtagacaccgtggctcacacctgtaggcccagctgcttgggaggctgaggtgggaggatcgcttgaacccaggagtttgaggctgcagtga

SEQ ID NO: 72269 - DNA, 1052 bp, Homo sapiens
aagctagttatttttttatatttgtaaagatataatctctctttgtgagctaaattggacaggtacttttcacatttttaaagttctctaaagtttaggttcatatgtgagtttccaagtgtattacaaatacatttctgctttttttttttttttggagatggagtttcactcttgttgcccagactggggtgcaatggcctgatcttagttcactgcaacctctgcctcccgggttcaagcaattcttctgcctcagcctcgtgtgtagctcggattacaggcgcccaccaccatgcccagctaattttttttttttttttttttttttttttgcatttctagtagagatgggttttcaccctgttgtccaggctggtctcaaactcctgacctcatgtgatccacccacctcagcctcccaaagtgctgggattacaggcatgtgccactgcacccagctgatttctgctatttttgttgtttcggtagaaaagtaaaatgttccttaatagcttcgttaataatatcaatatctgatatctaaaatcccaaccaattatggttaagtaaagttaaccattaaaatctgacattttgttttctctttttaattaaaataattatttttaagaagtggtagaaaacactacctgataaacatttctgtggtgcttcagtttatgatagatggtcattatatacaagaaacgactgtcaatatgacactcccaaattttttccaaaatgatctgaattcaccttttcctctacgtttcaacaggtggagaggtagtgaaaatagctcagctggcatccatcacaggaccacagagccgcgtggctcagccagagacgccggtgacactgcagttccagggcagcaagttcaccctgtcacacagccagctccggcagctcacagcgggccagccgctgcagctgcaaggtaaggataaggatgagagagcactgatgccaaaaatgacaaaagcgcctcaccatgagccctgctgcccacgggcctgccttgtgcatttaagtgtcaggct

SEQ ID NO: 72270 - DNA, 1109 bp, Homo sapiens
cccacagaggctgggtcgcttggtaacatctctgatggccgccggtttattcatagagatgacctgggaaactatcttctccagagtaaaagaagtcagaaagatgtagtcacacaagatccaaagtggcagcctcgttaaacagcagcagaaaagccacaggcatctgggctaaaaacagggttttgttctatttcttcattctccttgactgctgtgatctgggagtggggatgtccgcctcagtacctcgaacagcatggcaggtcctcagcagctgtgtgtcacccaccttccatgagggacagagggtagatggccttttcttgacatggagcaagataccttgtctcttagtgtgtcgtcatccactgtcggtgatgggttgccactttcctcacagtaactgaactttgcattgatttttttgtgtagatttgattttcagtttgtcaacttatttttgtactgtttggaagtgcctggagtgtgtggctgtgatgtacacatgcctgtcattgacacctagtggacctatgattgcaggcagcgtcctccagatcgtgtccgcccccgggcagccctaccttcgagcccctggccctgtggtgatgcagaccgtgtctcaggcgggcgctgtgcacggcgccctgggaagcaagcccccggccggcggtcccagccctgcacccttgaccccacaaggtagggtgctctgagcaggagggagacttggcttggatgcttctttctcttccatctaaggcgagtggaaagcattcatgtgtctttgactgtatctcagaacagcacagtctagtgtgtggccatctctgatttctatagatgtgtcctagtgtcagcctgatttattttctttttcttgtgctttcaaaggtattggttggatataaccagcctccactgtccttaggtttttgttttgtttgtgttctcacaagaaatttggaatcatgagaaatcttgcttgtttgtatatcgccagtgtgctccgtttcccctgggagtgggagtgtgtggccgcccacgcagggtctggttctttgtccggcccgagctgccactcctcatcctgtctcgccacctgc

SEQ ID NO: 72271 - DNA, 1051 bp, Homo sapiens
ccgcggaagcgcacactgtcacacgtgcagcagcaccttcttgtgaaccaaggtgggtggaaatgccatccccactttttttagtggttctcagggtgattggaatccaggcgatttttgttttgttttgtttcttatgcttttatgtaatcaaataatttatgatgagcatgtagtaatataatcaagaaagagtagattttcatttaaaggccaggaaagtcttcccaggtggtggtttgctgttgatgaagttgtccatccactatttccctttatcacgtatttagttcctttgtttgtgtctgggttcacgtcttcactttccgtgctgttccctatgatggtttctctttaatatttaggatccttttaatttggaattttctgaaaaaaattttgttttcatctctgaaaatcatgctgttaaagttgtttaatgtgagcttttttgaggtttagcatttagcattttacaggcagatgagcctcatgggaaggcaatagactgcatggtctgttctgtgtccccagtgatggaatcttgaggaagccttgtgtccctgcactgggggtccgtctgtccagtggggtgacatctgcagctcacggtcgtaattgaacacctcttgtgggtctggtagtgtaccggggttagaaagagaaaaacgcccataattacatgagaatgaggtgtctcatgagtgttaacaagccagtctgtgaagtgatcagttctgcctgttgggctcagtgaaagcttcagagaagatagatgctggaggtacatctggaaggaccaggtgggacatttccaggttgagactggtgggagaaaaacgggatggcgggtggaaggatgaggtggcacagcgaagagtcttccggaggggcctcctgtcagctctctgggaggcgggagagctaagattggaggggctggctgagagcggcctttggtgccccacgaaggcatgttctgagcaggggtagctggaggagggacgtggattcgttgatcaccatctgcatgctgtgcccacctgttgtc

SEQ ID NO: 72272 - DNA, 1014 bp, Homo sapiens
taaaaaccatacctccatgtcagatgtcttttgcccacatctgctagtaactatagatgtgtgttcctagctgtttcagcagatgaacagtggcatctcgtcattctaacttgtgtatcttgcactgtggtaaagctgtcttgtatgttcatagtcatccatgctacatttcgcggtggacttgctccggctgctgtaacgttgggctgtccgtctgctgtctgtttcctggacagcagcctctgtcctgctgtgtctgtcaggagctgtgggcagtggtgtgcatcgggtctgagatggagcctccttgggcctttcttgttctccaagcttccttggccctgggtgccctggcacgctttgcctgcatcagtgctcagctcttccatggggcctgcctgtccaactcgatagtaaggttagcaaggcccaggaggtttcccactcattttctgtattccctaagtgccttatcattttcacctgtaagaggacctcagggaaggagtggattacctttatggagagtgggtgattatagtggaggcatctccattaactttacatgggatagctctttttcaaactaccctcatttaaaaagtctatcaaggcaatctaaacatagactttcctcaggccctcaagagtattgagtatctggaggaggatgcccagaagtccgcacaggagggggtgctgggaccacacactgatgctctgtcatcagactctgagaacatgccgtgtgatgaagaaccatcccaattagaggagctagctgacttcatggagcaggtttgggcatgttttcctttacaactacatattttaaaaatttgacgcttctataaaatatttattgtttactgcaagaaaaatcactttttgattcaaatgttggttagtggattgtataaggaacttgacttttattaacttgctattaaccctattcaaaaaatatacttttggaacagcttacaccaattgaaaaatatgctttaaattacc

SEQ ID NO: 72273 - DNA, 1435 bp, Homo sapiens
gccatgtgaccttgggcactttgcacacctgttttgttccctctccctcttggggtgattatggggcttacgtgagagaacacctggaaaggattagcatggactggagagtgtcacagcagtcggccgcgacagccacttaatgccgctgctgttgggttatgcctgaacttggaaagaaggcccaggaaaaggaagtttgtgttcagccatggggagtttagcctcagattcccacccagtgagccctgtgtcccacgcagccgtctgtccatgctgcctaattcagatgcactctcgtcaatttcattgcagagtaaaaacaaccgtcctctccgtacgagccagatctatgcccaggatgagaatgccacacacacccagctgtacacgagccactttgacttaatgaaaatgactgctggcaagaggagtcccccaatcaaacctctgtatgtttcctgagtgctcattttatgttcattatgactgagtagattgcgtgaagcttggttttgatgtgtttttaacatacccttcttcagatatttcctttatttaataattgctgtctcactgtctatacttcaggcttggcatgaatccctttcagaagaaccccaagcacgcgtctgtgttggcagaaaggtatttctctattcgtgacacatttgttactgtttggaaggatttcattccagtgtcatctaagttcagtgagttcagcaaatcgttgtgcacttagcgtgttcaggcatcagctggacgtggcagtgcgcagaacctgcaggagagaggtgcttttcctgccgtgggctagggtatgcataggacggcccctgccctgtctctgtgttacagggattgtccttgctggccctcagtggggaaagacgctgacagatgtgatgagtgtgccagggccatgtggccaaccacaaggggctttcttcctcacaccccacctctcaggcactgattttgttcgccatatcttaagaacacaccacatttaggggtgtgtgtacctgccctgaagttatacaggggaaaagaggaatgaatgaatggatgggtacagaagtgggtagatgcaagaaagtaaatggggtaatggatggtggaaccccagtgtggaaccttactgccaggcacatgggtgtctgtagcgtttctgactgtcggactctttccataaaatgttggaaaggaggtctgctgggatgaaatgatgtgcatctggtttaggcactgttgtctgtaggctccaaccctacagggtcggtgggtttctccccgtgtgcggagacgagagagcgtagaaataaagacacaagacagagataaaagacagctgggactgggggaccactactaccaagacatggagaccagtagtggccccaaatgccaggctgcactgatatttattgga

SEQ ID NO: 72274 - DNA, 1049 bp, Homo sapiens
aaatggtaacttaagagaaaatgcgggacgggaggctgaggcagtcattttgaagtgagggacaggctgatgtcgagtgctcgctgaaggaacaggaagtgaaaagccttctgtgggaaaaacgggacaggatgcggttactggttcaggagatggagggaagtgaaggtgatgtcccgtgagatcactgacatctgaacgcagcagcatgtgtgatgagcctgcaggtcttgcgggagcttcagaagcgcgggctgacctgtgacttgacatttccctgcggcgtgcagatctctcagttttcctttcctgttgggccactttaaactttgttgatctttgtaaattttctcatggcatgacctcttgtggagaagtatttggaaagacataccgtgtcctgaatttctctggactctcccattatttctactgtttagacccgggttcccacttctcagctgcaggcgcaagggcagatgcagacccaggcaccccagccagcccaggtggccttggcgaagcctccggtggtgtccgtcccggcagctgtggtctcctcaccgggagtcaccaccctgcccatgaacgtcgcggggatcagcgtggcgatcggtcagccacagaaggcagcaggtgcccgccccagcacaccctcccgtcctgggcttgagcctggtttcacaggcctctctggtggcagtggtcgccagcgacccgtgttctttcctcacacccacccacttgagcgtgccatcacgtgttctagcacaaacgtgccttggcgctttccaggcgcaaggctgggtcctcaattgaactgttaacattctgaaatttccgtcttaatttaagtgtaatttgtgaacccagaaacattttaatgtagttaagggatggcttacttgtctccatagagtttcatagtttgttattttctgtagaggtgagtcagttggaacagagcttggcgtgagcctcaagctcttttcccagtgtgctgactaaggggcttttgctgcctgcaggacagaccgtggtggcccagc

SEQ ID NO: 72275 - DNA, 1060 bp, Homo sapiens
tgcgcatggacaaggatctgcatctcacactcatcattgccgctgatttgctcagaggagtaacctgcctggcaatgatggtaaaggaaatgcctgctgccttaaaaaggagaaataacgcccatgccgcatctccccttaatagaggcaagcagctcttgctggggggtacagcggcctctgctccatttgcttaaaagggggaggtgcaaggaatgaggctctaattaggtgtcttaaaaaattaacacatgaggcgccgatggtcgttgtgggagtcggtctcggtccggcaccccagaactccaactggcagacaggcatgtgtgactgcttcagcgactgtggagtctgcctctgtggcacgttttgtttcccgtgccttgggtgtcaagttgcagctgatatgaatgaatgctgtgtggagcaagcgtcgcaatgaggactctctacaggacgtgatatggcatccctggatctatttgtgatgattatatggcaaccctttgcggtcctccttgtactctttgccaaatcaagagagatatcaacagaaggagagtcatgcgtactttctaaaaactgatggtgaaaagctcctaccgaagcaacaaaattcagcagacacctcttcagcttgagttcttcaccatcttttgcaactgaaatatgatggatatgtttaagtacaactgatggcatgaaaaaaatcaaatgtttgatttattataaatgaacgttgtccctgagcttagctaaatggtgcgacttagtttctccctgctttcatattatcgaatttcctgtcttatagactttttaaattacatttgaaatataaaccaaataaaagattttactgataagaaaaaaaagttaacacatggcagaacaactcagcaacttctagaatgagaaatttagaaaggtttgatgcaactcactcaagtgagttgtttcgagtttggtgaggcgaaggtggctgcctacctgccgctttttgcagctgccttatcacaacactgatcccgttgcgttgatggaagcactgtgaccctgg

SEQ ID NO: 72276 - DNA, 1018 bp, Homo sapiens
aaggcctctgtggggtgggggtgcccactccagggtcagcctggggctctctaaaaggtgcttccttctgcaaattggcttcctgtgccccagccccatggcagccagttcccagaaaggcctgagctgccccccgcagggccggtgctgccacggcccctgctcctggcacgtcgggcccacaatgctgcgtgtcccggcaggctcatcagcacggacgccaccgcgcgaggcatcgacgtgcagggtgtggagctggtggtgaactacgacgccccccagtacctgagaacctacgtgcaccggtgagcgctggcgcagcggccactggggggtctggggctttgtgagctcctgggcgttgatgtgggaccgtcttgactggcgtggggtggggttggtgtggagagaagctgtcgttccgtcagactcttgaaggctcaggggccagtctggagatagctgcgtttgattccagggttgggaggacagctcgcgctgggaaaactggacaggccttcacactgctcctgaaagtgcaggtgaggctgcgagggtcttgggagtttctgctgttggtgggtgttaaggggctggcccaagaacccccttccaccatgagcttctctccaggagaggagattcctccgaatgctaactgaagctggggcacctgagttgcagcggcacgagctctccagcaagctgctgcagccgctggttcctcggtacgaggaggccctgtcccagctggaggagtctgtcaaggtaagggcaccagagtccggcatgaaaccctctggggagggcgtttgcagagagggcgtcgtcaccacacgtggagaaaagagggaaaaagaggaaagcgagaaggcaacagagggtcacacaggttgtcctcgagcttctggcccaagggcggggagcccctgggcaccagtggtggaaacacgtggcaccagggagggctgtcagcggggccagggcctggtttctgcatgcacagggcttcctgtcc

SEQ ID NO: 72277 - DNA, 1127 bp, Homo sapiens
ctggactacgacgacacccgctaccacaccatgcaggcagccgtggatgccgtggcccgggtcactggccagcaccccgaggtgggtgatggggtcctgtcgccagcatcatgctgttgcctcccagggaggcagggactggggggcggcgtccaggcactcaggccaggctccgcaggtgccccccgccttttggaacaatgccttcacgctgctgtctgccgtgagcctgccccgccgggagcccaccgtctccagcttctatgtgaagcgggcgggtgagtgtgctgagagtcaggggcggacagggctgagccttggtctgcctcccctgcgggtcaggtgacctttgccctcgctttccctgcagagctgtgggacacctggaaggttgctcacctgaaggtgagttgcttctggagagccgggcaccctcccgggtttgggggtgtgtgtggggtgcatgtgagaccccatggaggctgccgccttcctcaccagaggaaactcccagggtacaggtggcagcttgcacggccaccaggtcactcgaagtgtgggaggtgacgagacctgtgaactcgggaccctcccttgggtcagaggccaccgccgcctcttggagtcaagcctctggtgccacctgtgggccccgtgggctgttttgggcgcagcccccctcttggccatggtcttgccaaagctgctttcttggctgttctgagactccagcctcgagggcaaggcgtacctgacttgaatggggacaggaagaaggaaggcagggtcagaaaagtggagagcaggcttgtgttggctcaggctgggcttcggggtgccctggcagctgctcgggctctggtctggggtggggagggcggcgagtgcagtctggaccccgttgcaggagcacaggagggttttccaggccatgtggctcagcttcctcaagcacaaggtaggggccaggccggggagggggcgggggcggcatccgggtctcccccagggcggaggcctcaccccgacccgccggcccccgcccacccgcccctcacccccacctgccggcccccgcccagctgcccctcagcctctacaagaaggtgctgctgattgtgcatgac

SEQ ID NO: 72278 - DNA, 1001 bp, Homo sapiens
ccagcatatcgctctgcctggttcaggacgtgctagggagcagtgctggatcttagggaggtggtgataaaatggatactccgcgggccatcccgttccctcctcccttcgagggctctgctgagaaggggagaaggagggttaatctcaagacccctcttggtgactgctgcctgctgcatggttaatagattggccaaaaatattgcttgtctggctgacggacagtatttgctgagcaaatactgctcctcttacatgaactcagctgagcagagaaggaaattaaatgctgtctgagagttggggcaggcgctgtctccccaggactggcatgggcaggaatgctagcaagttgccctgcaccagggccgagacccgcccagcgaggtgtgccccgtgcagcacttactttgggggaccctcatctgctggactttgactcccagaatcaccccatttccaacccctctcacttttccaggggcttgggagcccatggcctgggatcccccagtctcagaagctgagctttgggaaaaggggagatgcctactgcaggcccctgaagcagcaagtcctcttcaagttctcatccaaactctggggactgtagagagccttgggtcagggccggtggccagggaagtggccccagaacaggtgccgcatcgtgtcccgagtgcacagtcagagctggggcttcgtgtcccaagtgcacggacagagctggggctcctgtgggcccaggacggggtgggtggtggccaggctcatcacacaggctggccatcctctgtcctgcacattattagatggctccagggctggcacacgccattgctctgtgctgggacgggatggccctggggctgtcttctgccctctcagtggtgataatgacacagactgtacgtgtactgagcaatactgcaagccaggccctgcgctcggctcctgcactgcagctgagaccacgaggatgcccactttccagagct

SEQ ID NO: 72279 - DNA, 1016 bp, Homo sapiens
tttctgttgtcttcctctaaatctaaatccaaatgacttgcctttccttttattcttttcgttattgtgaggaagtctgtttgtacagagagtgcatggacgggacatatgttggttttgaagaggtgacctcccgggtctgagtgatgcgtcccactcagtgtgttgaccaccatcctgatgcgtcctcatgccccaacctgcggcagccccgcatttccttagggacagagggggcagctgcctgctttcccccacctgccagcaatggtgtggtccgtccttctgggggcccttctagaatccttggcagaccccactggtggccggggcaggctccagccctttgtcacctccctcctggcaaactgccgccctgggccatcttccctggtgccacctcagccctccacccccggcccttatggccacccagaggaatcctgcggaaggcctttggtttgaagggtgagactgcgggccacagccaggtgtgatccgtggtcttccagtaaatcggagctggagggaggaacgtccgagtgcacagcaggactgacctccaggcctggcacgtgacagtggcctcccagtcgggctggtcagagggtgactgggcagcctctttcaccctccaggctcagcccctatcagacggttctccaggcgtggctggactggaaccctgggataaaaccagggccaagcagtagctccactgcagtcctcacaccagcctgccccttacaccatcccccacctccctgcttcaggcctcgagcccgctatccccatgcctgcctgtccccgccccctcctgtccccgccccctaccgtccctgccctctcctgtccccgccccctcctgtccccgccccctcctgtcctcaccctctcctgtccccgccccctcctgttctcaccctctcctgtccccgccctctcctgtccacctgccgtgccccctgcattcacacccgtcctggcaccactccatcccaggcagcactgctgtt

SEQ ID NO: 72280 - DNA, 1310 bp, Homo sapiens
gtcccaaatccacagacccgtctgggagcactggccagaacccctcaggccctctggaatatggtgtcacctgggggagcacttcctgtgggctgtcacctgggggagcacttcttgtggggcctgggtgtcccctggagaggctcctgtggtccctggcccccactgcagggcactcgctcttgaaaggtagccctggtctcagcagggaggggcagtcctgggcagccctgggctggcctcctgtgaagcttactggagactccctgctggactaagctttttctcgtctggccccttcgatggctgagccctgggaaactcccatcccccatcccgcagcagcatctcacctgccatcgtccttcccctcccatcccccgtcccacagcagccatcttcctttccctctgaggtgcccctcccaagtggggaggctccttcccaagagctgctcaggtgggtgctgtcctgggcccaaggccctggggtcccgccaattaactggcgtttccctgtctccctgcagaaggatatggccctgaagccacatgagcggaaggagaagtgggagcgtcgtctcatcaagaagccccgggagtcggaaacctgcccccctgcggagcccagtgagaacaggcggcccctggaggcaggcagccccgggcaggacctcgaacccgcctgcgatggggcgagaaaggtcccactgcagccctccaagcaggtgagcaggtccctccccgaccggaagctctgcggcgggtcagtgctcaccgccccagggccatgccagcacctggacaccacgccacgtggcccccgggcctgcctggcagcgcgcccatcgttgtcaggcttggggtgcaggacacgtggacagggctggggcctagcagaggcaggagccggctgggtcacggaggggccgtgacgtgcccagggccacagcaggagaggtgcctgtctggggcagcaaggcgcgcgttccgggctggggcgccaagctgataggccggccccgtttccctgccgtgtccatcaggctccgccgactacaggtgtccagagtgtctataaggagggggtccaggctcattgccgagggctgtcctgtccacacgcagcgccatccgctcacgtgtgcggcgtggggaagggaatacttggtcccggcagtggctgcaggcacgtgactgtggtcagtggtcaggtgcgtggcccagctgggaacagggctctgcctgccctgcccaggggcctcctgcccaggaggggctgtcagagcaggtgggggcttccccagcgcg

SEQ ID NO: 72281 - DNA, 3226 bp, Homo sapiens
atgcaggtgtgctccccagaaggggggccgctcccagccagccactgggaccagaacggcccggcccagcgccagcaacagctccagcccagccagtccagccagccccaggggtccctcccagccccgtcggcactcccggaccctgggcagccctgccagccctcccagcggccactcctgggtcagcgcagctggccccagcggtcacttctgggcctgaaacagccctgccagccccggcggtcacttctgggccccggtcagccctgccggccccagcggctccttccatccccagatcagctctgccagccccagcggtcacgcccggcccagccctgccggccgcattgggcactcccaggccccaggcagtgctgcaggcgcctgcggtccctgctgaccccgtgtcaccactgccggcgcctgcggtccctcctggccccacggtccctcctggtcccctgcctctactgccggcgcctgcggttcctcctggccccaaggcaccgctgcaggcgcctgcggtccctgctgaccctgtggcaccgctgccgacccctgcggccgtgggccagcccgtgtcactgtggccagcccggtagggcatcctcaggacagcgcagccggcccctgtggtcgctgctagcccagtgccagcggtaccagcccccgcggccactcctcaccctccgaccacgccgacggcccgccagcttcctcccaggacagtgctgctgcccccggcgggccttcctagccccgtgtcagtacggccagccccgaaggtccctgctgggccagcccagccgcccccggcggtcgctgctgcgccccaggcagccccagcggttagtggaagccccagagcagcccggcccactcacgccttcactcctgggcccgggacggccgaggcagcagaagcagccgctcatgggcccggagcagccctgcccacccaagcggccgctcatgggcccagagcagccctgccagcccctgcggccgctcatgggccccaacaagccctgcaaaccccagccgttgctccccattcccgatcgcccttcactcctggggcagccgggcccaccctgccggcctctcctggggctcctgtgccagccgcggcggtccctattggatctggtgccggcccgtcagccccggctctcgctcctggccctgggccatccctgccggcccctgcggtcccggtggacccgatcctgtgcccccgggatggcccgtcaggccccatctgtgagccctggagcctgatgcctgcaggcacctccccatatgggttttccagcccactccagtgtgatctgcaccctggcagggccccaagggccaaggccgcattgcccttcgggctggagatgctttgccggactagcctgaggccttgtctagacagggctgagctgtttgtcgttggaaattgaggctcggccagaggcgggagcccctacagtgccacgatcaggctgaggctcaccacaccaggaagagagatgaacccgcgtctgcctgccgccccgccatgctccctctccccccactggcgtcacagtgcccccacccgcgttgctgcctgtggtgtgcgtgccctgggaggggaacacagcccctgagggcggggaccttgctgggggcccctcagcgtctttctgtgcctctgaattgccaatactgtccttgcatctctgagtctacgtgcacgcttgcccctggcgtgccacctgtgcggagcgcgtgagcctggtgtgtgcgtgctgtgtgtgcatgtgtgcgagagggtgtgagagtgagtggcgtgctgggcatgaaggatctgtggggtgctgcagttcctgcagagtggcccagtggcgaatggtgaaggtgtgggtttcagtccaggccctccccctggtagtcaggaggtgctggtgtccacctccagggcccccaagctacagggggcacatgggcccatctggtgggtcaggacctgcaggggacccggaggctcccacccccacctctcaggactctgcctccaccacccccgtgggcatgcactgaagggttgcctgcagggtctccaggcgagggggaccccacagggtgggcagcgccttctcccggcttccccacagtcccctgcagcgtcccgtctggctgttgacctacatgtggtcgggcacacctcacactacaaggctacccctgggcccatccctgccccttccacggcccccacctgtggtcaggtgttgccaccccctcaggacctggtctcaaggcagccccactcgagtcttctggagtccaaggcacgccactcgcccaaaagggagggggtgtttgggggggctttgactgtctccagacctcaggggagctgggcaggctctaaccagtggtcctccagagagcagcgttgaccacctggacccctgcgccacgtgacaggaggctctggtcctgcaggcctggtcttgcccagctgggctgcctcaggtgtcaggaaggggatgggtgtccctggctcccaggccaggcagctgctgacctccagcaccccgcacttgctcatgaggaccccacccccgcaggccctcccgggtcctgaccagcctctggtgcagcatctgctttggcctccgggccccctcgctccccacccacccgggccccttcctccggtgctcacctggggcctccatcccagaagcgcagggcttatttttctgattaaagaaaataaaaagtgccgtgccactattttttataacagcatcagcgtttgtaatttaaacagacgagcatgtgtcttacgtgatttattcccacaaagggcttttgtgctgggcttggctcgggattcattgcactctgaccgaacagaggggagacctggagcatctgttcctgaccttcctgcccacccatctgaggcctggaatgggggtttgtactgtgctcagcatgggggcaccggcctccagatccccccaccgcaaggctactgtgtgggccagtgtgacaggggtcgagacccccctctcggctcatgcctggggggcacccatccccgggatcagtgtcctggggactggtgagggagggtggttcagctcagagtcctctgcatggcctgggcacgcgtgagggagcatggttcagcccagcatcctctgcacagcctgtcaggtgcttgtgttctgct

SEQ ID NO: 72282 - DNA, 1052 bp, Homo sapiens
gtgtccgggggagcgggtgtgtttcagtgtgtgctgtgcctccccgtgggtgcacgggtgtgtttcagtgtgtgcctgagagaagcaggtgtgtttcagtgtgtgccgtgcctccctgtgggtgcacgggtgtgtttcagggtgtgcccgggggaagcaggtgtgtttcagtgtgtgccgtgcctccccgtgggtacacgggtgtgtttcagggtgtgccatgcctccccgtgggtgcacatggcacggtggagggctccttgcacatgtgcctggacttgctgtgggaatggcctgggaggctgggcgccgacccctgccccccggacctggaggcccagcaccatctccccggcccccatcaccactgtcccctgccctcctcatgactgtgtttcattttcccttaagtatcaggaggaacattaatgacaacataaaacccagagctccataaaagccatttctacagattgacggcctgctgggctcgtgggagggtgggggcctggactctgcccaccccatccctgcagcccccgaaatttccaggccgtagaggctccctcactaaaccacagcagctttttatagggtgtgtaattaaaccaggaatgacccagtgtggccaggccagaggggacacagcctggtggggacggccccccactgtctctgtcccacagcttctgctggtggcagagcaggaagcggcaagggagcggcatgggcggcgcggccacaggccaggagtggaccccaggatccctggacccagcctcatgggcaggaattggccacttggctgggtcacagcaggggctcagccaggccctttgcacccccaccccagctcccctgaggctgccctttcacctgaggttctgtctaaagccctgggctcagctctaccatcctgggctcttctctgccaccctgggctcggctctgccaccctgggctcttctctgccaccctgggctctgccaccctgggctcttctctgccaccctaagctctgccaccctgggcttggctctgccaccctgggc

SEQ ID NO: 72283 - DNA, 1033 bp, Homo sapiens
aaatgggctaaggccacctggctccggctgctgggaggcacctgggtcaagtggggtgtcctgatgcagactccatgggcaggaggactgtggcccccacataggtgccagactgtgagtgtcagtgacatctccgagtgctgggcaggactcctgtcggctcactgtgggtcagggggagggccgggtcttaagctctggaaggtgggctctgccccctgttgctggtgaggtgtgcacgtggccacctcctgtggccaccccagctggtctgaggtccccagggcacctgggtctctctgccctgagccactgggtgcccttctgcttctgggtctccactcattattcaagtcttctccccagagcactctgtgtttcctgagaaagcccgttattaacttgccagctgcttgcagcttaacccccacagccgaggcacacaagtgacagatggcggggtggggggtggggctggggggtggggggagggggaaggggggaggggctggcctgctgcactggggatggggttcccctccaagccgcaggagcctgggaggaccctgagggctgcagagggtcctgtgcgtgtgcactgggccccagcacacacatacctgtttcagaccctggtgcatacagatgggccctgccatgtgcaggtgtgcacccggggccttggtccagtgtggccctcagttgcccatgctgtcagccctgcgggccccttgtgtccagtgtgggggggggggtgcaggtgagagcccggggtgcaggtgagagcccaggctccaggcagagagcagggaggtgcctggcctccttggaagtgctcttccccggcactgaggactggaggcaggtggaggccagaccaccccaggggtggaggaccaagaaccggtcccatgggacgcatgcccaggagcaggacaggacccaggagcaggacaggacccaggagcaggacaggacccaggagcaggcgaggggcccaggcgagggtctggattgtgctgaagcctgggac

SEQ ID NO: 72284 - DNA, 1039 bp, Homo sapiens
acagcccccccaggcccttcctgtccccactggcaaggtcctccatcagggtcacagatgcccaccctgcacaaactgaggtgtggagaaatccgtccccttgcctcccctccagcccatgtgtgctgagcgtgtccatggccgggcatgcacacagggagaaagatgggaaagacctgggtaagggaagccaaggagtcgctgtcccaggcggggtgttaagcgcagtgcaggagggtgggagggggggccaggccagccgaagcaggcataggtttgaacagaggggccggtgagaggccctgaggcccctgaggaaggagcccaccccgtgtgcttgggggcatgcctgggacagggaggctggaggtgggtgggaggagcagagacccagccaggtgggacactgcagatgcccaccagccgctggggtcccgctgccctcgctctgtgccagggcccgatacaggcgctgtctttacaaggcaggtttgtgacactcattacggggctccttgggcctcttctgagcagccacaacttgtacagaagcaataaaaacccatcagcctctccctggagtcagagagccacggtctcctcccaacccagcctctccctggagtcagagagctgcagtctcctcccgacccagcctctccctggagtcagagagctgcagtctcctcccgacccagcctctccctggagtcagagagccacagtctcctcccgacccagccacagtctcctcccgacccagcctctccctggagtcagagagcctcagtctcctcctgacccagcctctccctggagtcagagagcctcagtctcctcccgacccagcctctccctggagtcagagagccacagtctcctcccgacccagcctctccctggagtcagagagcctcagtctcctcccgacccagcctctccctgtagtcagagagccacagtctcctcccgacccagcctctccctggagtcagagagccacagtctcctcccaacctctgagcatagaagggtcttt

SEQ ID NO: 72285 - DNA, 1019 bp, Homo sapiens
ctgcactgtgctcactggggtctcctggggatggtggctgggctgggtggagggttcagggtggctttgctgacgtgcctggcttctgggccttggtggctcaaggcccaggcagctgtggccagcccttgcagagccttagccaggctggcagcaccattccagcacattctgcaggtcagagccccccagcccagcccaggttctaggggaggggttggaccctggcctggaggggcctcatgagtgccgcctttcaccccacccacagctccctgcagcgctcccaggtatgggggccacagccatccaccaggcaggacagccccacagggcagggagatgcctgaccaaggagggtggcacaggcagtgaaggtggcggcgcacagccctgctggagagggccaggccagagtctggggtgcccatcaagctgaaatccaattatgagaacaggccgggctgctgtgacacgggggttaggaattaatgttaacactgtttctggttaagactttttgtgttgataaataattcatgaggcagttagcactttgagcctgacaacacgagaatatattaatacggtcggctccaagaaaggtcagccacgtgcttggggccagggggccatcttttattcattccctgacacaggctcattaattattctggcccagccggagctgtgctcggagggacactaatgagaaaaaggagagtggatttgagatccacacgccatccgctgtggggacgtagagggagagatggaaagaaacactggtgaggcctctgaggcgggatggggcctgcagcctggctccctgacagtgctggttgggtgtgaagaggtgagcggagctgatccgcaggtgtgtggggcactggctgccacatcccagctctcccagagagatgaggaacaggagcagatgcagccagtatcagagagcaggaggtgcatggggaagtgaggctgaggctgtgggtgccccaagcacactaggcccagcg

SEQ ID NO: 72286 - DNA, 1055 bp, Homo sapiens
ccatgccttcccatgatggcaccccctggccacccgctgcgtaacgatggcagacgcagttacagtgttggtttctgaaccgtaagctctggataaatgtgcctctgaacaccaccgtcaagtccctaactggattatgtatatttggcctggaagcctgatacttaatatcagcctgctctccggtgaatgcctttcttcccccggataatctattcccactccgcttccttctagacttctaacctcactacatctttcatatcagagctactctcctttctaaacaaaacacagacctgcccctggttctgagtctagtttcacccccaaactggggcgcagggctgtggggcggggctcggggctcggggctgggttttcggccccgttgacccaggccaggatctctgcctgttccaggatggtcagtgctgaaggcggcctcaggactgaggttagaaagtggggttggaagcctcgtttgtggcaggaagatggcttctcctgtgattccagtggtgaggtcccaagagaggagccggccacattgagactggccgtagcccaattggagctggccagttgctgcccctcaattccttcttcctgctcccccaactccccagccccctggggtctccagtcagcagggagagtgggcacagcttggcgggaccgaggcctgctgggcagccgcttcccgtgccctgtacccagagaaggagctgatggcagcacagcttctcagggggctgaggatgcactggatccatctgtgccgagtccccagagcagggcctggaagaggggactggggatggcatcctcccagggccaggcacgcaggaaggggctgagctagggttctgcctgagtctgtcttctctcctcccctccccccgcccgttccctctctgtgggcctcaccatctggaccccccatggacagaaatgacctcgtcacagggccccttcacggcctttgtcctcacggcccctcctggctggctttgcccaggccagcaccctgggcctgaccttaaccctgactt

SEQ ID NO: 72287 - DNA, 1115 bp, Homo sapiens
agcaccagctccacgcggccatgtttgccgcacccccgacactgcccccgcccccggcgctgccggccagcagcctggtcctcccaggacacccggccggtaggtgtctcggccacaatctcgcccagggcaggggttggggggtgcggggacacggccaccggggaggggcgcacagcctggccctccacctgctgtggtctctgcggaccctgcgcgcctctctgagtggttcccccaggtgtgcctttccccaggagtctctgctgggccacaggccatctgtgtgcggggacaggcaggacacgtgcccatgcacgtacagacgcgtgttcacactgagacgggcgcacgggcctcccctcctggggccaggcctcccccgcagcctgctgggtcctgagccctgggaggagggggccgcacatcaagcaggcgccatcccagtggaaccccgaccgcgaaggcttcctccctcggcccccaggcgcttcctgaggctccgagtcagcccggcccaggctggggacggccccgtgtcccgggatgggaccaggatgctggcctgcgggtggctggaccctggctcccggggaggggctcaccgtgttctctcttgcctctagatgccagcctggcggtctcattcagccagccaatcatgtattgccagcctcattcgggaattctgattggtacttggtcacaggctcctctcttacctgcacccctgggcccgcacgtggcgagcggccaccccggcttggcctgccgaccccgggagtgccaggtgactatccgcctcgccccgccgggagcccgcggccaacgtgcctctctgtctctctctctttttctcttgtagatcacgagctgctcaggcaagagctgaacacgcggtttctggtgcagagcgccgagcggcctggcgcctccctgggcccgggggctctgctgcgggcggagttccatcagcaccagcacacacaccagcacacgcaccaacacacacaccagcaccaacacacattcgcccccttccccgcagggctgcccccgacgccgcccgccgcacccccgccggtgcgtaggcccgcgtgctggcagggggcggg

SEQ ID NO: 72288 - DNA, 1328 bp, Homo sapiens
ccacagaggagggcagatcctgcaagaggccggcggtccagggagagggcgcacacagggtctgcccagccctcacgcctgcccccacgtagtgccagagtaccccagcatcatcatggccagtgaaaccaccccagtgccagagcacactgcagggaccaggaggggccggcccaggccagcctgagtgcgggtcagaggcaggacaggcagaggcagcgcagtcaccaggacagtggggtcttgtttggctacacccctcctggctctgggcccctctgctcccatgggagggcatgggcatccccagtctccacccaagcctggccctgcctcccacagccgcctggcagcgtgggcacctgaagtgtggccagtgcaggtgaggggcacatgttgtagtttcatataatttttaacacatttaactttgaaaactgataccaaattcagtcactgagaaacttttcagcatatttggaacaacttgggcacgtgagcatgctttttcagtttctttttttttttcttgagatagagtctcgctctgtcacccaggctagagtgcagtggcatgatctcggctcactgtaacctccacctcccggcttcaagtgattctcctgtctcagcctcctgagcagctgggattacaggcgcccgccactgcgcccagctaatttttgtatttttagtaaagacggggtttcgccatgttggccaggctggtctcgaactcctgacctcaggtgatccgcccgtatcagcctcccaaagtgctgggattacaggcgtgagccaccgtgcctggccttaacttttaaaagaatctaaatacaaaaaaagtaagttattttccatgacagcgtagcatcccagctgccatgtgccaagtacgtaccacagttcagaggacgtgagctctcccgttcagcttttttgctgatcatgtgtaacatttccgtcatcctgagtagagaatacacccttgaaatccatcccacctgctccccttactggactggctcacacccagtccctgtggcccctcaggcctgggctccctgtgttcagggccagtccccgggcaggcggccctcacccgttctatcctcccaggagatgcagctggacccccacaagctggaggtgggtgcaaagctggacctgttcggcagaccccctgccccgggcgtgtttgcaggcttccactacccacaggacctggcccggcccctcttccccagcacaggtgagactggagtcgggccaggtggggggcacagaaacctcccgctcgtgcccagctgagcctgccttcctgtgcc

SEQ ID NO: 72289 - DNA, 1165 bp, Homo sapiens
tctacagattccaagaacactgcaccatccacacaaacgtccacagcatcgcccttgcggctggagccggccagtcctgaagcccacaggagccgcccaggagtgctgttctgctggcccaggggctctgctgggggacccaacccctccacggacccaggggctgggaggtcgctggcggaaccttcctcccccaaccagcagagccgccgggaagcgcttgcatagttgaaggaaagttgctgccattaaacttctgataatgtttacagccagcagcgcctgggtttttgtgaccatgttagacaaacaaccagaggggtttctggaaacggtttttataaagtctatctagattaagaatttagtaacgtcatatatttatatcaacagactatttacacgtttcgtttgcttttaaaaaaacaaaccaaaaaagaaattacacttctgcataataaggcaaaaaaacaaagttttgtacattattattttaatataatctgtaacttcggttccaagtaccaagggggggccagggctggcctgagtgggggcctcacagtgcgctggacaaagtgaccggtttttctccataaataagacaaagaaaccctggggatctggagaaggatctgaggccattaaactgcaaatcccaaccgaaaacgaagaagcaaaagtttcttttttggttcttttaaacgtctaaagagcataaaattaagaaaaatacaaatccattacaaacacttctcatctgtggggggaaaaggtacaaacgcgatttttttttcccaacagccgaatcccaaactcggaaaacaaaagatcaccctcagaaaagccgacacccaagtccccgcctccgcaggctgcgggtggagaggcggcgccgccccaggatcggcgggagctgtgcttgagttctaggaactgatggagagacggacagcggtgcgctccgctcggagaggcgtctgcggccccggggctaccgcgcctccacctccgggggatttcgggacggggagtagtcgcgcgcctcgcccggcccgaggccccccagcggagtagtccggctccgcggcggcccggggggcgtggggggcccggccgccgtcaccagggggggcggtgcgccgagggcggcggcggcgggcgg

SEQ ID NO: 72290 - DNA, 1047 bp, Homo sapiens
ccgggcgaggcgcgcgactactccccgtcccgaaatcccccggaggtggaggcgcggtagccccggggccgcagacgcctctccgagcggagcgcaccgctgtccgtctctccatcagttcctagaactcaagcacagctcccgccgatcctggggcggcgccgcctctccacccgcagcctgcggaggcggggacttgggtgtcggcttttctgagggtgatcttttgttttccgagtttgggattcggctgttgggaaaaaaaaatcgcgtttgtaccttttccccccacagatgagaagtgtttgtaatggatttgtatttttcttaattttatgctctttagacgtttaaaagaaccaaaaaagaaacttttgcttcttcgttttcggttgggatttgcagtttaatggcctcagatccttctccagatccccagggtttctttgtcttatttatggagaaaaaccggtcactttgtccagcgcactgtgaggcccccactcaggccagccctggcccccccttggtacttggaaccgaagttacagattatattaaaataataatgtacaaaactttgtttttttgccttattatgcagaagtgtaatttcttttttggtttgtttttttaaaagcaaacgaaacgtgtaaatagtctgttgatataaatatatgacgttactaaattcttaatctagatagactttataaaaaccgtttccagaaacccctctggttgtttgtctaacatggtcacaaaaacccaggcgctgctggctgtaaacattatcagaagtttaatggcagcaactttccttcaactatgcaagcgcttcccggcggctctgctggttgggggaggaaggttccgccagcgacctcccagcccctgggtccgtggaggggttgggtcccccagcagagcccctgggccagcagaacagcactcctgggcggctcctgtgggcttcaggactggccggctccagccgcaagggcgatgctgtggacgtttgtgtggatggtgcagtgttcttggaat

SEQ ID NO: 72291 - DNA, 1034 bp, Homo sapiens
tttacacacacacacacacacacacacacacacacaaaatcactgctgtgtgttttcttccgcctgaggcatcagcgtcacctcggtgtggtcgtcgcctcccaggcccttggcctggcctcctctcagtttgggttttgccctcacccacatgagcccccccatgccctgccccccttgcggccttttgtgttccccgatgtctgggctgtgtccctgccgggattcccagccttcggggtcagccgtcgagccacttgctttgctcagttctgtgtttcagccacatttccacggtggaccctgtttgttttaaatattctgttcccatgtcaatcagtgacgataaatacagccttgatttggatgaaactgtggtcgcgtgttctgtggtgttggggggccaggctcacccaggctgacccctgcagccgtgcgtccctcctgcagcaccttgggatgctgggcgcctcggcggccccacgctgtccggtgccatcgccccggaagtgaagcacagcaggtcccagcttcccagccctgctgccaccccggctctgcccagccccctcccccagtgccacctctcccggtggaaaccccagctcctggctctgccggatgccccattgtgctccttcgttcttgggggtgtcacgcggcctcccgtcgtcccacccccagcgaccccgctggccgccttccctcacatccacggggttttctgcatagaaggtgctcttagttcccgcctttgtgccagagagttctggccccgcagggacttgtgggattggctttgccctggctgtgcccgaaggaacaggagctcagagggcaggagccaggtgcagaggtggcagcccccaccctccagtgcagtgagcgccaggcccacctgccttgagtgatggtcaggaaagctccaggtgcacacctggccttgacctgagtgtcacccccaccctgtccctgccaattcactcctcactaaggggccccagggctgcaacctaagaaggaggcctcgtggg

SEQ ID NO: 72292 - DNA, 1510 bp, Homo sapiens
gcactgaggggcccatggggcagctcaggggtactggtgggcgtccagtgtctgaggcacaaggggtgccagcagccagccccatggccagtgtcaataattcagcaagcgccacaccggatgggttgcgctgatcgcatttcttttcctctgcctgagcggggccagctggtcaggagggaggagggactggtcccctgtaccccaggccctctctgtgcaggtgggagcccaccctggccccaccctgcctgcgcttgccctgccttgtgtgcgagctctgtgaagctctccccagccttctccacgataaagcccagcttgaagatggggcagtagaggtcggaggcctcgtggaacgtgcagcgcttcaggtacccgtctgtgcggtcggcgatgttgcccctgaggaggcggcaggaggcgagacctgcaccccaaataccccattcccagaaggcagccctcaggctgggccgtcaccacaccccgcggctcttacttggagaagtggaatttggggtagtggatgctgttcttgatgaggatggtgaaatttggggccatcgtacccagaaattggctgaggaggcacagaagggttgtttagtcccctcttcccgcaaagcccccgcctggcattggcccccacccctccccagatcttgtcactcctgccccgcccgtttggcctctggtcaggggaaaaggatcagaggggaggctgggccccaggccggggcgcaggtgcacctgacagaggccccatcttccaccgggcaccagccgaacacctcgcaggtcttggagggcccctggtaatagggcacacagcgcccagtcctcaggcctgggaggcagaggtcactgaggcattagcggggacgcagccctgccccacccgcccagccccagctggcgcacaccgaccgtttcccagcatgtccagctccccagccacgcagtcggcgtcggagaggcaggtggcgttgtggacccttatgctctagggtggaggcggcccagtcagggaccccgcaagggacagctggcccgcctagctgaggcggggtcccccagcgccgcgggatcccctcacctcggggcaggttccctgggtctgggagtgggtggcctcgaccctggtgatgatgctgaacacgctgcccccctgggctcagaaagagggggcggtcggccaggcggcagccgctgccccctccgcccactagggtagggtgcacggcggggcggggggcagggggcggcccgcacctcggggggcttcacgtactcctccacgtcccacactttgtgctcggacgtggtgatccccttgaccttggtgatgatggagctctcggggcccgtctcgctctcctggtagcttttctgcacgatgaatacgtacctgcgggcaggggcggcgccggctccggaggcgaccctgggaaggctgagtcccgcccgcaggcacggcaggggccctcccgcgacccgggtccgctct

SEQ ID NO: 72293 - DNA, 1042 bp, Homo sapiens
cagtggctcatgcctgtaatcccagcactttagggggctgaggcgggtggatcacgtgaggtcaagagtttgagaccagcctggccaacatggtgaaaccccatctctactaaaaatacaaaaagtagccaggtgtggtgcgcacacctttaataccagctactcaggaagctgaggcaggagaatcacttgaacccaggaggcggaggttgcagtgagctgagattgcgccattgcactacagtctgggcaacaagaatgaaactgtgtctcaaaaaaaaaaaaaaaaaagggtaagtgccaggtgacaggcccggagtagtttttggagaagcttgctgatgccaggggccctgcctttgcttgtgttgggagctgtctttcacgcgctacccagtgagaggcttagtgtacatggccccatttatacagttttctctctgacaatgaactcaggtgtcagcgagtgttccttctcatttccacttctcacttctctaatttacttttagctcatctaaaggctgcagataaaattattaacaatgacattttagcctcatctgtgaggcaatctgaccagccatgggtcccctcagattctagggtgtttgcagcagcccgactcagggcctgtggtgtgtgtgcctctccacagcgtacatcgtggccgtgtaccactgcatgaaggacgggctgaggcgcagtgctccagggagcacccccgtgaggaggaggggggccagccagctctcccaggaggccgagggggcggtcggagcccttcccggtgagcagtcttttgtcttttgaggccactgccatgtgccagtgacctaactcctctgtgtgccatgggtggtccccggtgccagtcccccaggtgggaggtccccagtgccagacaggtcccagacccctccctcagcatccttatacttccaggaatgatcaccttctctcaggattatgtcgcaaatgagctcactcagagcttcttcaccatcactcagaagattcagaagaaagtcacaggctctcg

SEQ ID NO: 72294 - DNA, 1029 bp, Homo sapiens
cggatgtgtgtaaatgcccaggtgcgggccaggctgtgggtgagtggaggtggctgtcgggagcagtctggggaaggggtcacgtctggctggggctcatggtgtttgcaaggttgagacgtgggtggtcagctggtgcaggagtggccagagagtggctgggtgggttgagaggaggcctgtgtcctccacaggggccctcatagtggactgagaggaagctgtgggtaccagagccaggggctcagatgtcagagggaaagccctttgtaaggacgcagacgcttctgggagctggcaggatgaagccaagactgcccaggacacctggatgggagcgattctggttggagttgggggataaaccctgattgaagggattcagaacaaagtgggagggtagaaactcaggcagtgtagaccgctctgaggaggggatcagcgtgtggtcagggcaggtggcagtgggtgtcggtgtctacacagacgtggatggtgccgtggcacgaacacaggctgcgcgggaggctgggtctgtgatggggtcgtgccgtcccaggagattcatggactcagaggagagaacagtcaccgggaagctctggctggttctttcgtccttggggggtgggagttcaacaattaaagtgaactctggaagagcagagtgaagctcacagtcccaggtcacgagcacttctgtgtgccaggcgcttcccacaaagcactttgtactgggagccaccctgggggattcacgcaggctccaggggatgccttgactgcgaggaaggcctctggtcaaacggggcagatggacccaggttggaggagccttcgctgtggcatcctacccctctaccaggccgcgatggtgcaaacacagccgcgttgtctcatgtgttacagcaagactcccagaaagcagggggagcagaggatgagcaggaaaatgaggacgatgaggaggaaagagatggggaggaggaggaagaggcggaggaatccaacgtggaggatttactggaa

SEQ ID NO: 72295 - DNA, 1013 bp, Homo sapiens
tccttaaatggatctaatgtgcagaggattgggtcagcgctagggaggcttaaccgaggagtgacaaggatgacgatagcttaaaagagcttggcagtgggaagcactgtggttggttaccagcaggtgcaggtcacctaaggccgcagagcagaggcagaacaccctgtgggccatccccagcacgaggaggcacccagctctctttgtggcgccagctcccaggggcctggtgggcctccttagttttacgtttaccacatttccccaggaagcctgagggatgatgtggtctgaatgaactttcaaattcagtgttaagtaagtggagggtacagatagatacaaggggaaataaaggaaagttgagaacaaggtcgatttcactgaagcagcgtcttcaatgcttcctctgcagcatccattcaaaggagaccttccattctctgacaatttctttctctcgatgctgggaatttcttctctggatggatccatctaactatggcggaatcaaaggaaaagtttcatctcgtattcactgtggactggtaagcgagctgcagtgtggcacccgagccagctttgggggtcgcgttcattcctgcagcaagtgctgagtgctcagggccccggcgggcctggccgtgagcagcagacactgcacccgcatcctgccctcatgaacacggggagggaccatgcgcagacaagcacgtcagtgtggagtgtggcgtcagccctggtgatggcaaggcttgccgtgggcaacagggaggtggaggcccatgaggtggtgacagggaatccgagagctgatgaagtgcaccatagttgtgcgagcataaggcgcctccagcggatggacaccagggaggcaaagcacaagtcagtggagcagtggttgcagatgcaggcagagagctgacagagccaggcaacttgggcatggcagggcagggcctcggctttcgtggggatgggagcttctgtgtgggtgatgttggagcttt

SEQ ID NO: 72296 - DNA, 2246 bp, Homo sapiens
ggcagcgcctcgcccgcaggaagaggcagcgtctggagtcggcagagggtgtgctcaggcccggggccatccgggatggtcctgccacggggctggggagcttcttgcgaagaactgcccgcagcatcctggaccttccgtggcagattgtgcaggtatagaccttgatccaaggggagggcagtggctctgctgatggcccagggagggggtgtccagctgggccctgaggtctgggatgggagggttagagtgggcctggagtttcctgcccatcgtagggaggcctaaggccctgtgctgggagctgcaagctacctggaaggtggccccgtctgtgggttccagtgtgtcctgtgatgtgctgtatgtccgtgtggcctttcagatcagcgagaccagccaggccggcctgttcaggctgtgggcgctcgttggcagtgacttgcactgcatcaggctgagcatcccccgtgtgttctacgtgaaccagcgagtcgctaaagcggaggagggtgcttcgtatcgcaaggtagggaggagctggtgctgcctctgcagtcatctgggcagcctgaggtggctttcccatgatctagcctggcctccagcctccatctcctcagtaccttatggggatgttctaggaattcctcaaaacaacgtgtgtgagcgctgagcaccgagcctggggcagagcgagtgccgggaatggagctgctggtgtccttgtcacgatgagcttgtctgcccgcgaggtccatgttgcggggacaaaccaagtggcattggttagagattgtgaactctgtctccgtaggctctttggttgttaacagctttattgggatgtaaagttacgccatccaactcacccatttaaagtgcagaattcaatgacttttagtggcatgactattgccagtcaatagtgacattttctttttttttcttttttttaattttactttgatttctgggatccatgtgcagaaagtgcaggtttgttacataagtaagcacatgccatggtggtttgctgcacccatcaccccgtcacctgggcattaggccccacatgcattagctgtttatcctgatattccccctcccctcacccccccattcggatattttcatcactccaaaaagaaacctggcatcccttacctgtcaccatcctcccccagccctcagtagccactgatccacttcctgtctctgggtttgcctgtttgggcatttgatgtaaatggaaccctacagtaggtgggtctttgtgctgggcttcttccacctgcagaaactgcgagggttttcatgtggccatgagtgcgctgaggctcttagatggcatctccacccgaactccccgttgttaatgtgtcggctcagcacatttcttgactggatgctgtgaatcacgtaagaagtgacacgtagttggggagatgaggtgtgcatatttgtacctacacaaggaggttttctggagaaggtgaaactcgattccagccaggtgattcagtagaatgtgcatatagaaagtagacgcagagccaggtgtggtggttcacacctgtaatccccgcactttgggagaccgaggtgggcggataacaagaggaaagcggacgcagaggcatcgagaccacagagaacaggtgggactgtggggtttctacaccttcctttcgatgcgtggtgctgtggtgctgtggccgtgtggaagtgccctaacttttgggatgtttccctttatgactatcagctcatctcgagggaggttctggcgctgtgtgaatattctgtcctcaacgtttgactggatggtgtcagcatccatgtctcgtggggtccatggggctccaggatgatatcttcagattctgttcctctgtgtgtattagctgtttcctttataacgaagagctttgtgcagatcaggtagaaatgaactctattccttaaaaagcaagatacgagagggataatacgctttttttttttttaagcaagataaatgctttttccctttaaattatttttaattttcaaggtagggcatggcaaaatgggtttattcctttcatttttcctctctttttaaagtattactatggattagaggatttttgtttaacttttttgtttctgtttttgagaaggtctctcactccatcacccaggctggagtgcagtggcatgatcttgcctcactgcagccttgtactcttgggctcaag

SEQ ID NO: 72297 - DNA, 1309 bp, Homo sapiens
gcactttctccggaaatggctcaagagctcttcccttcaagactttgatattcgagcagtgagtgccagttgcgttctctactcttaaaagtttacaaggaaagctagacagagcagaatatgtctgagttggattatgttttttgtctggcgtcttcactcttgacttcctcctttctgataagtaataggtgagcacctaataaccttttagggcaaaactgaaaacatgaagtgcctggggccctttagctgttctattggatggactaaggccaggggtgttggctcagccacctactagctctgtgatctagaggagtcagtgaagctccctgccttggtgtcctctgttgtgcaatgggcacctttcatcatagagtttctgagaggattaaataagacacagtggttagccctgtgctcagcatgaagtgagccccactcttggctgctgccacctgctgttctctgtgcccgtttcctgcacatgcagattctggattgggactactacattgagcggctgggaagcgccatccagaagatcatcaccatccctgcggccctgcagcaggtaagggcggggtcagtggcacgggctgtggggctaaaaactgtgcagttagacaagggtctctctctgatgggtgttggcctcacacaggtaaagaacccagtgccacgtgtcaaacaccccgactggctgcacaaaaaactgctggagaagaatgatgtctacaagcagaagaagatcagtgagctcttcaccctggagggcaggagacaggtgacggtggggccccaaggctgggctgggcgggatccttgtgacacacaggactccaggcttcttgcgctgctgtgtgtgctgtagtgaagcttctgttcaagcatcgaaaatggactttttctgaaaatgtgcccattggcactttactctctaactctgagtgtcactcttttgttaataggacaccattgtgaggctgaggtgagggcaaggaactgtctccttatgtgaaaatattagggtgcactacttagactcagtgccttgggcaaatcactgtctcttgaagccccagttttctgaatgtgaaatgaatatcttccctatggaaacacttagaaacacaggacacagtgtaataaaaggtacagtgaaagtcagaagagcaaaaggaaaattcttaaatgctgaaaattaaaagtaagctataaatcagagcagtatacaaactcacatgacaagaacaaggttctttgaccaggtgcggtggctcacacctgtaatcccagcactttg

SEQ ID NO: 72298 - DNA, 1507 bp, Homo sapiens
cgtacagccctgtgggtttggacaagtgcatagtgtgtgtgtccagcaccacgaagcaacacaaaacagctgcaacccctttgtcagcaaatcctctccctaccccgaaaccctggcaacccacaatgtgttttttgtactataattttgctttgtcgaaaatgtcatgtaaagggaagcatacggcctgtagcattttgggtctggcttcttggacctaacagatacacctgagtttcaccacttggttgcatgcatcagaacttccttccttcctgctgccaagtcgtgttagttatgtggaaaagcctcggtttgtcaatccatccactcctggagggacaccaggtggtttccaggtttgggccatcatgagtgaagctgccccctcttcactcttgtttctcaggaaggcttcaccaatgaccagtaccaggagctggctgagccgtcctcactcacctacgtcacccgctcagagaacagcatcttttttgaggttgatgggccctaccttgccatgattcttccagcctccaaggaagaaggcaagaaattgaagaagaggtgggactctcatagcttttgtgctttagaaaggacatggattgagatagattaaatttagcccagaaaggaggttggatcaggagccaggatagaaacagacctgggttcttgtgatcttactgattccgtttgcaccagctctgtctgcccgcctgctgtattctggctctgtggctgcaggcccttcagccattttccttttagagaagcagtggcctaagggagagagacgtttgctgcctcgtggatgacaggtggagggttggaaagggaagaggcgggcagagaggatgaggcacagctggtggctccccagcgctccttgccactgctgtgcttgccttttttttttttttcaggtatgctgtgttcaatgaagacggttctctggctgagctcaagggctttgaggtcaaacgccgcggggaactgcagctgattaagatcttccaatcctcggtgtttgaggccttcctcaagggcagcacgctggaagaggtgtatggctctgtagccaaggtggctgactactggctggacgtgctgtacagcaaggtaaaggcctaccctccaccctcacctgctctgagggatgaaggatgaagcaagaaggggaccccgtgcttcctgggctcctggagaccaaggtgaccgaagaacacagggccagtcctaatgaaatcccaagacctcctgagcacaattacccccttggagttcccctcaacttctgcatccagggacacaactctgagggaaacgtttttctaaatagcgtgataagcctggcatggtgatgcgtgcctgtggtcccagctacttgggaggatcacttgagaccaggaagtagaggccacagtgagccgtgactgcaccactgcactccagcctgggatatttgtttatttctatgttactttgtattttttatattttt

SEQ ID NO: 72299 - DNA, 1040 bp, Homo sapiens
cacacgcatcgtgttggtttgtggtggtgtgggagtgtgggtgtgttgtggggacggcttagtctcctgcctgaggggcttctgcaggccttactgtggcgctcctgtgccccctcccatacggctcttcagtcgtaaatacacacccagtggggaggatataagcgtccctggaggagggctgtcagagtttctggacctgtattagagccatcacagcagcaaatagatatcgtggagcaggtgcttcgagacagtgtatccacagctgctccataagcttctgcccactgtgttagcgttgctgatgggctgtgtttgctggtgggccgcacctgcagcagttacgcctgaggtttcctgtcgtggtttttctctggcgattgtctgtttccttcattccttctactgtatcaattgggatcctgtagggaagcgttgctatccttctcttccatttgttctcgtttatttgtctgcttattgacatcagtgtggatttgcggatcagagtggacatcccagggttattgttcataggaccggagtggcttcctgctccacgtgttccccttgggccactggggcctcctagtttgtggcgtgttcttgggacacgccctcttctggtctttgtttctggagcactttcctacttcttggtactgtaaggtccaccagcctcatcttgtattttccctgctccaacctggagtcagccagttctccgagaagaatgatgtaaaaacccgagatggggtgcttgctgtgctcactgttcctgggagtgtcatagcttccagtctctcatagtggaggcagccaggaagtatgtctctagtaacgcacgcacacagaactgtttatttctgtgtctgtctgtctgcatggatgcatttaaacacatgagtctgcccctttcttattagtgacttctttctccttcagtgataaacctgtttcgaatttctcaatatatgtgtttgttcaatcctagagtccatgtaaagtagttttagaattgctaacagacttgtgtc

SEQ ID NO: 72300 - DNA, 1991 bp, Homo sapiens
cttaaggaatttgcttttgttccttaaatacccagcctttaaaaaccttttctcatgttgggtggggaatttgatgagacatctgtggtcttagctgcatttcttgattgattttaccaggcacccccgagtagctcttgttccctagaaactgtgctgaagcgtttaggatgtcagaccgtgaaatctacaatgttcaaatgattctgtcaacacagagagacagaataaaggaagtgtgacaaaatattgacagttggccagtctaggagaagaatgtacactcttcattgtactggttttttaggttttctatagatttgaaaattttcaaaatactaaaaacctgggctattgactttgtagaatgtgaaatggaagaatctgtgaggtgctccatgttcatgtgcttctcaggtgtggaaaaagaagctctcggcggccgtggaggtgggcgacgcggctgaggtgaagcgctgcaagaacatggaggtgctgtatgactcgctgcagctggcccacaagtgcatcctgaactccttctatggctatgtcatgcgcaaggggtaggtgggcccgggcccgggagaggcttatgggaggaatggatgagtccacgtttagggcagcttcaggtgtaggctgctgtgcatggagggccgttcatctgattcaaggaatgttggagggagaaggctttgggctggggtggggctgggaggttgaagagagtgggggccacgctgactttgagggtctgggtgtccatgagtgatgcgtgctgtggggtgtatgtgtctctgcatcatgggctggagacacgacttgccattttccagcgcgttcatgtctcccagcgtggatcctcactcagggacttgcagagtgtcgggcagttgcttcacagcatgtctgcgtgtccgggaggggcagagaagcaactgacaaggggcatggggctggtgccgggaggggagggtgggacagctgacagcagggctgggacccaggctggaggagggttgggcctggcagctaggcctgggctttctctgagaagctggaggtgagaatggggcttgggaggaggtgtgaagagagtagagaaggcgtgaatgggtctgggtggtattaagagtcctgctgaggctggagtcctgaacggctggacgcagtggcacatactgcacccttccagatccttcctgggcaccaaggtggggacagagaggtgtcctcgggcagagccagattccaccttagttctgtcctggtgcacgcacatttggctgcttcccttgtccctgtcgcatctctcctttcctcctccctactcctcactgcctctgataccccctggaggagccatgccagccccacccaccagtttgtggtgtcctctcagggctcgctggtactccatggagatggctggcatcgtctgcttcacaggggccaacatcatcacccaggcacgggagctgatcgagcagattgggtgagtgcagaaggggagccgtggggctgggagcaggtcctgggggcaagcatgggcaggaaggaaggagggaaggctggaggccacacactgggcaggaaggaaggagggaaggctggaggccacacactgggcaggaaggaaggagggaaggctggaggccacacactgggtgaaaaggaaaggggaactcacgaccttgctcctctctttctctgaaggaggcccttagagctggacacagatggtatatggtgcgtcctgcccaacagcttcccagaaaattttgtcttcaagacgaccaatgtgaagaagcccaaagtgaccatctcctacccaggcgccatgttgaacatcatggtcaaggtgagtctggggcctctggtcctgaagctctggctggcctggcgtcagtgccctgatgtcactggctctgcagcacctcacagtgtgcatgccttcctggcacccagcactgctcacattgcttttc

SEQ ID NO: 72301 - DNA, 1023 bp, Homo sapiens
agagatggggtcttgccatgttgcctaggctggtctcaaactcctgggctcaagtgatccgcctgcctcggcctcccaaagtgctgggattacaggtgtgagccaccgtgcccgcccacctttttcggtatgagaaactagcagtgtatctgagctgttgctcctttgtggtgacgtagaagccatgttcttcagcacccctgtgccctggctccctctgctctgggagatctcacccacctgctctgcccatctccgtcgtgcttagattactgccggaaagcctacaagaagatccacatcaccaaggtggaagagcgtctcaccaccatctgccagcgggaaaactccttctacgtggacaccgtgcgtgccttccgggacaggcgttacgagttcaaagggctccacaaggtgagctctgaggggctgcaagctttggcctctgtgagggcagtttcagtcggctcatgaagtgggcactcttggctccttgcctgggatcctctgagcaggcacttgcactcggatggtaacgtgcaattgtttttgacttggaagagttgatggccacgaaggatgcagaccatcatccaccctggtctgaggcctcagaaggaccctaaaggatgatttctaaagtgattatttagagcaggggtcagcaagctacagctggctggccgtttgagtacatcaagttttacgaacccaactgccttcgcctattgtttatctctttcccgctgtcatgggaggtgaggagttcctagaaactctaaggccttctcatctatggtattcaccatccggcccctcgtgtttaactgacgtatttcatccggtaggaacatggaaaatgcatagcaacacctctgttttgataccaacgggtcattattttatatctgatcagattgagccattttttttctgagagaccttcactgtagactcagcacggcccctgctgtgcggccccctggcatcctgcactgccctgctgaactcatcgtcacatgt

SEQ ID NO: 72302 - DNA, 1045 bp, Homo sapiens
tccacgccaacatcatcttccccaacaagcaagagcaggagttcaataagctgacggacgacggacacgtgctggactctgagacctacgtcgggggccacgtggaggccctcgagtctggggttttccgcagcgatatcccttgccggtttaggatggtgtgcttcttccctgggattcagattcttcccactcttgtgctgtggtaggacccagaagctgcaggggctgaaataaagccccttctccccatcctgtcccacggcccctcaccgggtgtggcttctctggcccagcaccccccgggggcttctttagggcagtgcactgcagattgtgcacatgagtccttccggagctttctcgggcacaacctgccacgtgcagccacagcgtcaaacctgaggcaggctagtgtgggtgtgtttcccctctgaccccgtcgtctcactgttgtgctagaatcctgccgcctttgacttcctgctgcagcgggttgagaagaccttgcgccacgcccttgaggaagaggagaaagtgcctgtggagcaagtcaccaactttgaagaggtaaccatcagggaggcaggaagagccagtctgtgtttggcgccttcttcacagaccacgtctttcagcagcacgtttattgtgcacctgctgcgtgtggtgctgtggacggatgacacagggtctctggtgggacagggcagtcatggttgtgacgtgtgatgctgtcacaaggtcggagggcttcatgagaggtggggtgtgagctgctcctgaaatgcagtaacatggaaggtgggtcctggtgggatgtatcccgtgtcctgttttaaagcattaggactttattttataggcactggggagccattggaggttttaaattttatttactttttgttgttgagacttaaaaatgacagtaaattcctacaaatgacaggattagtgactgtaaaatctgtttacataatggttagaaagcacacttacaaagtgtgttatgtgactggagagggagacaccagttcttctc

SEQ ID NO: 72303 - DNA, 2373 bp, Homo sapiens
ttccagaaggacagccagggggagtacaaggcgccccagtgcatccacatggactgcctcaggtaggggccacagagcagcatggctcctcactgctgtccgtgagcgagatctgaaggcctcttgcagactgtgctgtcaccacatctcatgggaggagggtggcctccgagaggccgtttcaggtcacccaagagtatggcagctgcaaccctgccagggcccgggatgtgctgtctttgactgttgactgacaattcatcagtgaccaggcacattgagcatcagcctctggggtggggaagccgctggaaagacgcactcagctgacaggtcccagacctaggacctcatggagctgctctgcccaggcaaggttgggatgtggcagcccggctgcctcacaggacaagcctcacgggacaaccacagattccatatgagctagggtgggaggcagctcagagcttcggagagtcacggcgttcgggggctctgacatgactggttgggaagacaggtggatgtggaaatgccaacagaaggaggctggaagggaaggaagggaagggagggaggaaaggagggaagggaaggaagggaagggagggagggaaggaagggaagggagggagggaaggaagggaatggaggggcctccacggcctctgtattctgcacagtgccactggggtgcttgcagcctgaatgcgtttctgtttagctctgatgctcagcacttggcttggagagggaggccaggaggctggggccggtttagcgtgtgacggtgtgacagtcctgatccaaggcagggagtgagggttgtgaggattcaggatctgtcatgtggggcagggggaggcccagggatgctggttcttagggaggggttggcacctggggtttttgtgccatccgtggagacagggaatgggtagagaaggggcttgaggcaggaggtgaccctgctaccgatatgctagcctggaagccccacccatatgggggccctgaagaccaccatgaggcttggtttgggctcgcactgtagattgggactcactgggttgcgggtgggtcttggtgaaagctggggtagtggatgaactgaaggcaagaggtaaagtgagagaagaaggccacagggtggaggctgcggggggtggagaccggacatgacccctggacagctgctccagggaatgcgtctgtagggaggaggtagagacaggttccgggtagagtgtggggggccttcttttcttaatttttattttttatttattttttaaatttttattcttcttggcatctgatcacatcttgccttctattaaaggagggtgggcttgagtgtttccgtgctgaagggacagtgtgaggagagaagatcagtgtggttgatagaactaggccccaggggtgcagacctgaggtctggggagaggcccaaggaggtggggcgcccgtcggagaggccacaaactctgctgaggatgggaggaaggcgagggccggaaggaccagtcctggtgcttccttgtgttgtggataggtctgtgagattaactagatcctgatgaagggttttcacaaggtgtctacaccatgtggggccttggtgtgaggctcctgggtgcctgttaggaacttgcatctgtctgtgtggtgcccagttttgccagttctcaggggttcccgggctgcatgttagaatcatcctggcttctgttctcattctccttccaggtgggtgaagagggacagttaccttcctgtgggcagtcataatctcaaggcggccgccaaggccaagctaggctatgatcccgtggagctagacccggaggacatgtgccggatggccacggagcagccccaggcacgtaagccacatcccggctgcccctgctgccgtgtgcacgcatccagatggccacggagcagccccaggcatgtgagccacatcccggctccccctgctgccgtgtgcacgcatgtatgccagcccgctccacccagcaggctgtgtctccgggacacacgtgttttgtcctgtgccggtctccttactgtgtgtgcggcaggctggtcaggccaggctttgctttctgtgcttcacacttgaccctgggctcttgatttttgatggccctgctctctggcgttctctcctcagactctggccacgtattctgtgtcagatgctgtcgccacttactacctgtacatgaagtacgtccacccattcatctttgctctgtgcaccattattcccatggagcccgacgaggtgagcattatctgtcctgtcggcaccctggcctcctcagcccttgccccattccaaatgcactggagctgaatgga

SEQ ID NO: 72304 - DNA, 2522 bp, Homo sapiens
tgagatggagtctcgctctgttgcccaggctggagtgcagtggcgcaatctgggttcactgcaacctccgcctcctgggttcaagtgattctcctgcctcagcctcccaggtatctggggttacagacatgcgccaccacgcctggctaatttttgtatttttagtagagatgaggtttcgtcgtgttggccaggctcgtctcgaactcctgacctcgggtgatccgccttccttggcctcccaaagtgctgggattacaggcgtgagctgccacgcctggcccagtccaagccattcttaaaggaaggactgccttggtcgttgaaaccacatcaatttaccttttgtgtttcctcggtttgaactctggtctcacctcttcctactgagttggaactctggtctcacctcctccagaccctggcagctgagttagttgctctcttgttaattcctagtgttctgcagaggggcggtgtcattactgatgaagaggaaacctctaagaagatagctgaccagttggacaacattgtggacatgcgcgagtacgatgttccctaccacatccgcctctccattgacctgaagatccacgtggtgagtggggcagggttgggtcgctgctcacatgaatttcctaacagccaggagatgatcattatgggtgaatccacagaagaatagactttcctggatgtagaactctagttagcacactgtgtgttttgcaggctcattggtacaatgtcagataccgaggaaatgcttttccggtagaaatcacccgccgagatgaccttgttgaacgacctgtaagttttgcttgtgttaccttcatcctaaaatttccagttttctggagagaatattcttcagtgctggagagtgaatctgactcaaagatatgtttgctgcttttcccccaaatactttattaaaggaaatatggagttagaatttttcatcagtttctgacagtatcatttccttttttgttgtatatcactgtatgacatcagtgtttgagctaggcaggatttggacactcgagggaaagctgggacttccgtttgggtagttgatagtgaagggacatggtgaaaaatggatttgtaactagaaggccttggttcaaacatgactttgtggtgttgggaaagtctttgtattcagttttctcttttccgaaatgaagatatcatctctgtgccacagttacctttcagagttgtcataaccaccagaatgaggtgatgtcttttgaagagtttttctcctaaagttctgtgattttaggcttgtcctgtgatcagctgctctcttaggtatgtcagttttcataccatagggagtcgtgatactcttgatgtaggttggttagtcttagggtccttctcccagctctagagccttttgactcttttaacaaccagagggaggtagagcaggctgggggtgggtgttcagggaggcctaatggggagtttagagcttggctttatgcttattttgtccccacaggaccctgtggttttggcatttgacattgagacgaccaaactgcccctcaagtttcctgatgctgagacagaccagattatgatgatttcctacatgatcgatggccaggtgagcaggtggcttctgggaagtaagctcctgggatggggaccttgtctggtccccatactacagcagcatctgccccactgttagtatttgttgagtgaataatgagttagtccaggaatgggagcaaccaagccgttccgacctccagctgtaccctcccctttcgagtgggaatccacacacagagcgtctcttctcaggaagcttaaagcactttcacattgctgtggacttctttgtagtgagaatctctaggcagagtgtgtgggcagggtgggaacgccatttcttggctttgcagcctctgacttgtgctgattgctaatgaacttggctagggctacctcatcaccaacagggagattgtttcagaagatattgaagattttgagttcacccccaagccagaatatgaaggccccttttgtgtcttcaatgaacccgatgaggtaaggaggtatcacttgggaaactacccggtattgtgggaagaacggacatgtggatctttccaaggcctcaggcattccgtcagatcagaattgcagctccatgagctttgttctcagggtatgaccgtcttttctgccagagacgggcggaggggcggggcaggaataagggccaacatgaggctgctgcttctgaactttgggagaggaatttggaatagcttgaagaagagaaagagcagacctctgactgctgtgacttgggttcaggctcatctgatccaaaggtggtttgaacacgtccaggagaccaaacccaccatcatggtcacctacaacggggacttttttgactggtgagtctgtgtcttctctatgagtaactgggcagcatttgagagggagggcgttgcgtggtgcaggggcgcttccca

SEQ ID NO: 72305 - DNA, 2225 bp, Homo sapiens
tttcaggaatatatataccctgtcatatccgaaacacttaacactaggtgggatgagggttgcagaagtaggtggcagtcggatcacaaggtcaggagatcgagaccatcctggctaacacggtgaaaccccgtctctactaaaaatacaaaaaattagccaggcgtggtggctgtcgcctgtggtcccagctactcgggaggctgaggcaggagaatggcgtgaacccgggaggcggagcttgcagtgagccgagatcacaccactgcactccagcctaggcgacagagcaagactccgtctcaaaaaaaaagaaaaaaaagaaaaaaagaagcagcagcaggtggcattacaaattaagcacggggttcccttctttcactcagggatgatggcgccacttcctcagtttcggcactcaagcgcctggaacggagtcagtggacggataagatggatttgcggtttggttttgagcggctgaaggagcctggtgagaagacaggctggctcattaacatgcatcctgtaagcactaggtccttctcccacccaggaatatggctgcaacccttctggtcatagcgtggtccttatctaaagagtgggggacacatgagggaactttgagtgaatcaggtgggagatgtgaaggttcccagctctcctttcctctttaacgtcattgagggccacagagaggccactgtgagaagccggaggtgatgggcatctcttttagccatcagaataaagctttcaaggattatgagggagaaattgagagagatccccatttggaggccgttacagtgtggttcttgtgaataaggctggtagtgttaatgtaggggtggagtaaagacctagatgagagggtttgtttctaaagtgctgagtttcccgaaaggtaggaggaaagtttctctaactgtgtagaggatggtcttgtgtctgtgttgactgattctcttgtagaccgagattttagatgaagataagcgcttaggcagtgcagtggattactactttattcaagatgacggaagcagatttaaggtaagcccctgactgcgacaagctaaaacccacttttatgggtgttcatgtagctctgtgactgtcagggagggcatgggaggcttccagtgcacagcagcccatagcccagcagaactcgggcccctggaggccccatcagtcatcacgtaagatgtcctgagagaggtcagttcaggaagactctgaatggtgagaagtagcgtgtctttcagattcttgcccctgtgaaaagtgcgcattctgacttcctgtatgctaccaaggtcaaggctaccctggccctaggctgttcatgggatataggagcaagcaatgtgttttcacttttctctcgctttcttctttctcatcacccctggatgggttggtgactcttaacaggtggctttgccctataaaccgtatttctacattgcgaccagaaaggtgagtgtgtttcatagactcaggtcagacgacctgtgtgtcattctgtggtgggctttgcaactgggaaataggcaaggaaggaaatgtattttaccaatggaaagccttttcattctgatcctgattagggttgtgagcgagaagtttcatcttttctctccaagaagtttcagggcaaaattgcaaaagtggagactgtccccaaagaggatctggacttggtgagtatcacccagactttccaggggtaaatgaggccagagtctacattgttcctggcaggtgggatcggaagaggtagaaattcaggtcatctgttgggtgatggggcggtgtggtgaccgtctataaaattccttccaaagagctctagtggtgttagttggtgccacgtgcagagttggacaaggtgccttgaagtcgccaactctttgacttgtgtgtttacctttgagtgtttaccctctcacccataaagtcctatttctcttgaaccaatgagcgtgatctcttcgcattatagccaaatcacttggtgggtttgaagcgaaattacatcaggctgtccttccacactgtggaggatcttgtcaaagtgaggaaggagatctcccctgccgtgaagaagaacagggagcaggatcacgccagcgacgcgtacacagctctgctttccaggtaaactttggtcttgtgagcaaagcatcagcggttcagaacgacaagatggatag

SEQ ID NO: 72306 - DNA, 1083 bp, Homo sapiens
caggctggtcttgaactcctgagctcaagtgatcctcccaccctggcctcctgagtagctgggaatacaggtgtgagccactgtgcccagccagaaaatctttaattgacaaatatttaagggacaagagggttttaagaaattaaaaggatgtatgaagtgaagtgagttgtgaacagaacctgggtgccctcctcatccacgtgcctcagtcgccctcgtgcctgaccggctttgccaatggagcctggaccctcagcacgggtcagctgtgggtgcgaacatggtggtctgggtcaggcctctttcaagtccccacaacaggcctgacttgtgcgtgagacgctttcaccttaaaccccacgccatcctgggggttcatggtcaggtataaaaccctgcagagaagtcaggctgtctgatcccaactctccccttctcagcctggtcacaagtcagttcccagatgcagcattgcaggtttctactttccgccggtctccttgggaacaaaacgttaagtgtgtgcggcctgtgcagggaggacagagggaaggagaggccggagccctcaggatcgagtgatcttgtcgggaggcatgaaccccgtgtccccgagggtcctgagcgcaactcggccgttgggtcggatcaccaggtgggtgatgctgccattattgagggagagccggagccagccttcaggaggaaactgcagtgctctggggagagagagagagagagaaagagcacgttagagccagggggctctgtccttaaaacgggctgagctaggccgggcatggtggctcacacctgtaatcccagcactttgggaggccaggcgggtggatcacaaggtcaggagatcgagaccatcccagctaacacggtgaaaccccatctctactaaaaatacaaaaaattagctgggcgtgatagcaggcacctgtagtcccagctacttgggaggctgaggcagaagaatggcgtgaacccgggaggcggagcttgcagtgagctgagatcgcgccactgcactccagcctgggtgacagagcgagattctgtctaaaaaaaaaa

SEQ ID NO: 72307 - DNA, 1042 bp, Homo sapiens
acccttattgagtaaaatacttcagattgacagctcaatcttagtttgcctccagttaatcttttatgcttagggattaaatgtgtggttttttttttgtttttttttttttggagacggagtctcgctctgtcacccaggctggagtgcagtggcgcgatctcggctcactgcaacctctgcctcctgggttcaaacgattctcctgcctcagcctcccaagtagctgggattataggcgcccaccaccatgcctggctaattttttatttttagtagagatggggtttcaccgtgttggccaggctggtctcgaactcctgacctcgtgatctacccacctcggcctccccaagtgctgggattacaggcgtgagctagcatgcctggccagggattaaaatattcaaacatgttgtgtgtacccagatatgctgttaatttaggaaaaacagtacaatttctatgaagtggttgtgactattttctgtagtcaatacagttgggatatctgatctatttctctgtctactttggaaatgattgcataataaataaaattttactgtttttttaaaaggactagttgtgagtgtgttaaaagcgtggaacttcggccgggcgcggtggccacgcctgtaatcccagcacttcaggaggcccaggcaggtggatcatgaggtcgggagttcaagaccagcctgaccaacatgctgaaacctcgtctctactaaaaatacaaaaattagccaggtgtggcaggcgcctgtaatcccagctactcaggaggctgaggcaggagaatcgcttgaacccggaaggcggagcttgcagtgagccgagatcgctccactgcactccagcctgggccacagagcaagacaccatctaataagaaaaaaaaaaaaggaaacttgtgcagtgtgagaaacgatggtgtcaccagaaccctttgcacagtgtcctgtctccccgtggctgacgcctctgcccgcatcgcaccggctgcctgctcagaggacttccgccagtggcctgggcc

SEQ ID NO: 72308 - DNA, 1037 bp, Homo sapiens
tgaaagtagcttttctcttgggaagtcttgcagcccgtgggagtgataccaggagcaacacagagctcagcagcggcgccaaggtgttccctgtttcctcagcacgtgagccttcaccgcctgcttcattcaggagccagtgcagcagtaatacagtctatacattgttctgttttcaaatttatcctgaggctttgttgagcataaatgattatacgataaaggtatccgttattttggaactcatttcagttgggatctcctgtatgcagagtgttgcatttagaggtttgagtcccatcttggtttcttgccgtgctgactgtagccttcaccttgacttgaatgaaggtctgtggttggaatgtgtgaggagccgctgaggtgttcaggaggtgctgcctggaggtcggtttcttcctgggtgttacgggcaactgctcacacagttgtttctctgtgaacatttccagtgtttaatccaaaatgaaaacccaccaatgcttttgctaacttcagtgccttttataaatcatttttaaatttcctgaacttgctttttgaggatatacagggatattaagtagacgcaggattgtttttgtttgtaaaaattctgaattgaaactttgttttaaaaaaaggcttctttctttcatatgacaagagataggtcaggaatattggaatcaagatttaaatgttaaaattcgattttgttacacagggtgtgttcatttgttttgtagcagacaagatctagatcccagacagaaacaacacatgctattctaaaaagccgcattttaaaaggcaccttggttctcaaaagaaatcagaatatggatattcgtagtgatgatctgttttctctaaaatcttaccatattgtctgtatatggttgtaaattcaaatggaaagtaaaacgttttggccctgattttgtatgtggaccactgctcctgatttcccaggtcttaggccacctttgactgtttctccgtttgtttgtgggcagcgattccagtcccaacgg

SEQ ID NO: 72309 - DNA, 1151 bp, Homo sapiens
tgttgtggctctctgcacacaggacagagctctggttgggtggaaaagctgaacgggtcagctcctgacaagctgagggctagaagggtggaagcagcagggtttctactcagatcacacaggattctccgggaaacccccatgagcttgactctcccagtgcccgcggtgccagggttcagcagtgcctctcctccacccagacgcatgtgcccacggtgccagggttcagcagtgtgtctcctccgcccgggcgcgtgtgcccgcggtgccagggttcagcagtgcgtctcttccacccgggcgtgtgtgcccgcggtgccagggttcaccagtgcctctcctccgcccgggcgcatgtgcctgagtctggggccattattctccgacttttgctgttcatctccgggcctgtgcccgtctgctaacagttctttcttgctttccgcagttggcccagtcccgcggtgaaaggaaggttcaagtctcagctgccagatctcagtggccctcacagctacagtccggggagaaacagcgtggctggaagcaaccccgcaaagccaggcctgggcagtcctgggcgctacagccccgtgcacgggagccagctccgcaggatggcgcgcctggctgagcttgccgccctgtaggcttggcgctgggctctcggtttgttcttcatttttaaagaaggaagggtcatatgtttattgctaaactgtcaaaaaggaatatattctgattaaattattactcctcactttgagggtgtgagaattttagaagatttaaatgttctatataacacttagatttctgatattttggaagaagttagaagttaatgaaagcaaactcagttaccaattttctggaaaatatccatgtggtaatggtagactttttaggtggcaatttctaggtctgaaatatagcagaggaaagggcgctgaggcagttgcaggcaggcagccctgtacttaccctgtactcacctcatccgacagacgctgtggatgaggaggggcttggcggaggcgtgagcaccgatgtccctttgataacctgcactcaccaagatgaactatttgccgccctgtcttttcctgggttggggggtggcatctgatggtggcagagtgcctgtt

SEQ ID NO: 72310 - DNA, 1018 bp, Homo sapiens
ccgtgatcatgaacacgtccgtctgtgggagttgaactgtgtgacctgggttgctggcgtgagggtctgtcgggctgaggcctccttcctgcctgcagccggttcacggctcctgagagctgtgccgggtcctgcttacctgtgaggaggcgtgctgtttcagaaaatgcaccgtatgatttcagctgccagttaaggataaaggaaaattataaccatgattgcagacattgctttggtacttgaagctttagtggcttttttctgtgtagttctgagtattttttctggtttcacagctggttaattgtgttttgtttcttacagggagctagctcatgagctggggtatccctgggttgaatactgggaatttctgggctgttttgttgatctgtcttcccaggaaggcctgcaaagactagaagaatatctcacacagcaggaaataggcaaaaaggctcaacaagaaacaggagaacgggaagcctcctgccgagataaagccaccacgtctggtaagcatgtgcaggcgtggctgtggcagctgggaggggccccccatggccggggtctgacgggatgcgcacatctgtttctcgtctcttggtgtttttaacgtaaaggtctggtactttcccttaggttagtattttttgagacggaacctctctttgttacccaagctggagtgcagtggcgcaatcttggctcactgcaacctccacctcctgggttcaagcgattcttctgcctcagcctcctgagtagctgggactacaggcgcccgccaccacgcctggctaattttcgtattttttttttttttagtggagatgcggtttcaccgtattgaccaggctggtctcgaactcctgacctcgtgatccactagagtgctgggaaggttaatgttaaatgggttgtgtgtcggggagggtacatgaaaaataatggcatcgctttgagcagtattgctgtttctgcttgtgtttgcattatccaaaatctaatatag

SEQ ID NO: 72311 - DNA, 1549 bp, Homo sapiens
tgcgctggtaccttttcctctccttgcagacagttagaaaatgtcgagtagcgcaaacaagaagtaaatttacccataatcccagagtgtgttctcctagctgtctccttagacttttagaaagaccacactcttcacacgttttctgagtgtgagctttattaaatctttagcattaagatactattctactttactgagtttaaaactatttttctgaaatcattgtaatgataaggaaatgttgcgatcaaataagatttagacacacttttttttccaataggtaatttgtgaaagaagcaaaaataaatctgtggaactgaaggagcggatcagagagtatttaaagggtaagatggggagttggtgcctggatcgtggggtccacgccgggaagggccttggagcgttgggggacacagcagagctttgctttcctgagctccccgggcgtgtgccggctcccctcggaagcctctcctcgggatcatcctttcttctcctgagctctcctagctcatttgccaccttttttctgttatcccttctctgaagtcttgtatctgttccttgagctttctgtgagagaacttttttgaggttgtgtgtcgctgcctgttgctggtggcctcatccctggatccatcggtctctctcgcagtagcttcattgtgatggcttctcttcaggtggagcctgcagttggcaaagaacagctcagggagaggcagggtccagagctccttggctgggtggctggcctggcttttgtgtgtctctttgcctgtgttggggtgggggtcgctccctgtcactccttcgattctgaagctgcctccttcctcctcctgtactcctggtgcacgcccaggctcctgtcttggctccgggacactccctccccactcgcctccgggacgttccctccccactcgcctctgggagagaggcctttgctttctgggccgccctcttctagtcagcagcttctagttgttggcccctgtgccttgcggtttgtaggtgccaggcatgtgaaaacggctggtttcagggatggcttttccctgccatcttcctctgttttcagtgaattttggaagatgacacttctagaagcgcctcttctttgccatcttagctcgaagtctggagcttctgcttgctggtgagattgaagcagacgctgaggtcctttcacccacctgcctgctttcctctctctcggattccattcctatccaaaactctgtctctatttaaagcagggtccgcaaatgactgcttttaaaaataaaattttatcagcataaagctgtcaccaccatttgcacactgtccgggttctttcccagcacacagtgacttgtggcctactgagcctaattatttactgtctgacattttatagaagtttaccaagcgtgatctaaggtgtgaagagcctctgcttgtcccctgatctgttcccgtcctaggtataatttattaattacacttcttcagtgtgtgtagctgtgcacaggaaatgaatcctgcatgctgt

SEQ ID NO: 72312 - DNA, 1043 bp, Homo sapiens
ccggacacttcacagccagaatcttggtaatcagaggtgacgagagaaggtgtttctggctgtgctaggtgtaaatgaattctgttttctacacggtgcagtggagctgcctgtgggatgtccaagtgaggtgactgggagggagttggcccttcaggtcttgggctcaggggcactgttgaccatgaggcccgctggtctgtaggccacagttgaaggtgacattgagactgcccagagcataaggaaggatagaggtgcagctgtgggagctccaggcagatggtgtggagacctgtgacaccatccggggaaggagggcgtgacgcagcgtcatggacggagacctgggttcccagccagggcgcgatgcagcatcgtcagcagtgaaaaaaatttcgtttactgtggtgtcacaggccgcagagacttctttgagtacagaccaaattcgtgcgctttgctttattctggttgtggtcctcatctgtgtatttcacttcctgggcatgttttacatgacattgtactgggccctgaatggttaaagctgctgttcactgtttatggagaatttaagctcctccagggtctgggcacccaggtcagtatgctaagctcaagccttggcacgaagtgggtatgtgctagaatgccaattatttttccattataaaagcagagtcttttatggcctttttgtttgtgagtctttttttttttaaaaaagtataagccaggctcggtgactcacacctgtaatcccagcactttgggaggcaaaggcaggtggatcacctgaggtcaggagttcgagaccagtctcaccaatatggtgaaaccccatctctactaaatattaaaaaaaaaaaaaaaatagctgggtgtggtggcgggtgcctgtagtcccaggtactggggagcctgaggcaggagaatcggttaaacccgggaggcagaggttgcagtgagccaagatcacgccagtgagactccgtctcaaaataaataaatgaatgaatgaatgaatgaatatgtatttt

SEQ ID NO: 72313 - DNA, 1268 bp, Homo sapiens
acaaagttcaccaaacttggcctcattcacagagcctttcccagcaagattgtggcagggtctggctgctcttccacttgctgtgctcatgggggcgcgctggctgccgttgtaggctggggcccccagtgagattgtggccgggtctggctgctctccctcacttgctctgctgacgggcacgctggctgccattgattgcgttgcatgctggggccggtggccgtgggcccttctcgtcttttctcacctgtgcctcccagttggcccagaagcctctgtggaaagctgcttatccctcatcagagggtgcatgggtgatgagtgacttttggtgaaactgattgttcttaaattctgtctcttactgacagatggtttgtgcttgtcggaatcagaaacagtcaacaaagagcgagcgaacagttacaaaaatccccgcacgcaggacctcaccgccaagcttcggaaagctgtggagaagggagaggaggacaccttttctgaccttatctggagcaacccccggtatctgataggctcaggagacaaccccactatcgtgcaggtaggtctcggcggttccctcgggcaggtgtgcggtcccggccgttccatcgcagcactcgcacagggcgtgtccacacatcagataggaagctcagagcatgcggttctctttcaggaagggtgcaggtacaacgtgatgcatgttgctgccaaagagaaccaggcttccatctgccagctgactctggacgtcctggagaaccctgacttcatgaggctgatgtaccctgatgacgacgaggccatgctgcagaagcgtatccgttacgtggtggacctgtacctcaacacccccgacaagatggtgcgtgcacaccctccactcacgctttctttatttaattggttaaaagtctttccccaaaagaatgctttatcgacaagttactcattagtataataactttggggaaaagatacatcaattacacccctgcaacctgccttcttaccacatcccactggacaaagggcaccgagcgctggggttccctggcccctgcattgtcgtcgtgtgtgcgatgctgtccccgagggtgtctgaactgtctggggacacggttgtcagaggacatttcctctgccgaacaggacaccttgagctgagcagcacttcccctcccgggagtggcagagctgtgcacaccacaggcaggccctcagtgtcctaccaagagccactgaggcacagagctgcc

SEQ ID NO: 72314 - DNA, 1095 bp, Homo sapiens
aggcgggagaatcgcttgaacctgggaggcagaggttgcaagagccaagatcgtgccactgcacttgagcttgagcgacagagcgagactccgtctccaaaaaaaaaaataaagtaaaaaataaaaaggcgttccctgttcaaaattgtgtttaaaattctcttatgttcttggctgacataattatagtttttttttttaatttgccttttaataatttttatttagatctttatatgaaatttagtttttaggatagaatcttggcatatagaattacatatatgaacataatatatatcatgttacatgcatatatgcacactgtcgagcttgttaattgttctattttggctagcttaggccctttttcttcaggattaaagatctgaactaagccaggcgactgggtagcagatgtggaagctgatggttaggcccagggcatggccaggtgacagctctccagtcactcttctctgattttcatttgttacttttcttacccagaaaggatctatgtttatgaaaataaaaaggaagcattgcaagctgtcaagatgatcaaagggtcccgatttaaagctttttctaccagagaagacgctgagaaatttgctagaggaatttgtgattatttcccttctccaagcaaaacgtccttaccactgtctcctgtgaaaacagctccactctttagcaatgacaggttgaaaggtaaatcatgcagccgttcacatcttgatgttcctgtcacattgatcccaccctgttttgtgccttctttcctctgatgtggtaacttgttttctccatgagggtagagtcgatggggtctcagtggaccaggaggccatgctggctctgatgctcgtgtaattagcatcttgactctggagaagctgaaaagaacgctgtggccgcttccatctgtccccgtgtctgttggatttttttcttttttttttgtaaagagacagggtcttgttcttttgccagcctggagtgcagtctggtgctatcatggcccactgcagcctcaaactcctgggcttaagcaatccacctgctttagcctcccaagtagctgagaaa

SEQ ID NO: 72315 - DNA, 1083 bp, Homo sapiens
atagcaccactgcactccagcctgtgcgacagagggagacaccatctcgaaaaaaaaaagaaaaattctttttttttttttgagctggagtttcgctcttgttgtctaagctggagtgcaggggtgtgatctcggctaattgcagcctccgcctcctgggttcaagcgattctccagcctcagcctcccaagtagctgggattacaggcatccgccaccacacccggctaattttttgtattttcagtagagacgtggtttcaccatgttggccgggctggtctcgaactcctgacctcagatgatccgcccgcctcagcctcccaaaatgctgggattacaggcgtgagccaccgcgtccagccaagaaaaaaagtttttaatgaaagaaacagaaactgatgccattatataatgaaccctagtacccatcacccagcttcagcaggtgttagtattttgtgactctttgatttttttgtcttgggcctaggtgaaatgacaatggatgctctgttggctcgattgaaacttctgaatccagatgaccttagagaagaaatcgtcaaagccggattgaaatgtggacccattacatcaactacaaggttcatttttgagaaaaaattggctcaggctttactggagcaaggaggaaggctgtcttctttctaccaccatgaggcaggtgtcacagctctcagccaggacccacaaaggattttgaagccagctgaagggaacccaactgatcaggctggtttttctgaagacagagattttggttacagtgtgggcctgaatcctccagaggaggaagctgtgacatccaagacctgctcggtgccccctagtgacaccgacacctacagagctggagcgactgcgtctaaggagccgcccctgtactatggggtgtgtccagtgtatgaggacgtcccagcgagaaatggtaatgggaccgtgtgtaggatttcctcacacagatagcacatacgcggaggggcgggatgacgtctgaaaatggaaaactacagattaagaaggaaaaaatccaatcccctccatctcatcaccccagtt

SEQ ID NO: 72316 - DNA, 1050 bp, Homo sapiens
ctgctccaggacgggacgacggccgcaaacagtactcgggctcggagcacacgaacccggaggccgcttcgttctcggagacgcacagcgccccacggacgccaggccggggccgggaggcgcgaagaagcgccgccccgcgcccggccccgccctggtggcctccccgggccccagccccggcccccgccagcacattgcgctccccgcgcctcgccggtcccaggaccccgcgtcgggctgcccgcgccccgcctgccgcgcccgcccgtccgctcgcccgttcccgcccgcttgggtcccagggccggggccgcgccctcgccgggcctccgcgagcggggccgccgtccgtgtcccccgcgccgccccggccgcctcgagcgcggcgccgtcaggcagggcgcgggcagcccggcgcggggtcctgggacgggcgcggcgcggggcgcgggcttctcggcggctgcggcccgggcggcggcgatgctgtggccgcggctggcggcggccgagtgggcggcgctggcctgggagctgctgggcgcctcggtgctgctgatcgctgtgcggtggctggtgcggcggctgggcccgcggccgggaggtctgggccgcagcgggaccccagttcctccgccaagcgcggccgccgcccccgcctcaggtaaggcccaggcggtcgctgggtccccgcaccctggccccttccccgccccgacgccctcctcgggcctggggtcccggccgcgcccctggagccggcagcagttgggcgaggcggccggggaaaccagggccggtcgggaaaggccattccggccgcggaaagggcagttgcggggacttggcttcccgggccgggggcggaggggccacgccgggttcgggggtgagagctttcccgggccctggagcagcctccggggaaggcggcgggggcccggcgaggcgttagcggagactcttgctgcggtctctcgagacctggggagggatggcccaaaggagggcggcgcggggaggaaacccctgggtcccggatgtgtt

SEQ ID NO: 72317 - DNA, 1039 bp, Homo sapiens
ctgctgtattttatttctgagagtgctgggattacaagtgtgagccaccgcgcccggcctgctgtattttatttctgagcaagggcggcccctgaagcggtgtcgtgagtcctgctttgctttattactgagccacaagcaaggggattacctgttggaagcaaagccgtgcaactgaagtcaggagagagccagactccttggaatagaggagacgtctatgaggccggtgtgactgccttgtgcaccacgcagtctctcaacaggcagtgatgtcacctgtggataaacagtggtgtgtctcagtcgatggagtcttagatttgatgaaatgtatctttacctcaaaaaagttatgcccccgataagtggtaaacatttttgttgaagccagcttgacccccaggtacgccccccacgccccgccgcccagcgtccgctcacagcctctgtctttggcaggtgatggtggaggcctaccggcgcgacgccacctccaaagaccagctcatcagtgagctgaaagccaccaggaagaggctggactcggagctgaaggagctgcggcaggagctgatgcaagtgcacggggagaagcggactgccgaggcggagctctcgcgcctgcacagagaggtggcccaggtccgtcagcacatggcggaccttgaagggcatctccagtcggcgcagaaggagcgagacgagatggaaacacacttgcaggtctgtccgtgtcgggttgactcatttgatggggaggattcggccaaagtgcttgtcgggagggtggggcctgtgtctggggcggggcctgtgtctggggcggggtctgtctgggtcggggcctgtgtctggggtggggccaaggtgggagaggcttttggaagaacagctgggaacaaggcccacctggagcataggtcccagaggggcagtccggtgaggcctgataagtccaggtggtgatggtgcatgaagggagggagtgaggaggccccgtgaggcacccagcttctccccattgccatgggctccc

SEQ ID NO: 72318 - DNA, 1068 bp, Homo sapiens
aggtgggagttgggctgtcggtcagacgctgctgctgctgcagacctgaccctgtgtttgccctgctggttcttctataccaggattgtgcgtgaaaaaaagaccctccatagtgtccatcaaaattacttgaaacccgaacaggaaaagggcatacgctctcggaggagggtcaggcgcagccatgtgggcttcattccttctccaggtgaagttgactttactccagcgagaccagcagcttgaggctttgcagcaggagcacctggacctgatgaaacagctcaccttgactcaggaggctctgcagagcagggagcagtccctcgatgccctgcagacacactacgatgagctgcaggccaggctgggggagctgcagggcgaggccgcctccagggaggacacgatctgcctcctgcagaacgagaagatcatcttggaggcggctttgcaggcggccaagagtggcaaggaggagcttgacagaggagcaagacgcttggaagaaggtaccgaggaaacgtcggaaactttagagaagttaagagaagaattagctatcaaatccggccaggtaatgcattctgctgtgttttgttttgaatcagaaccctccttgcaggaatgatgctgattatttgcttctttctttctttcttttttttttgaaacagtctcgctgtgttgcccaggctggagtgcagtgggatgatctgcgctcactgcaacctccacctcccaggttcaggcaattcttgtgcctcagcctcctgagtagctgggattacaggtgtgcgccaccatgcccagctaatttttgtatttgtagtagagatggggtttcgccatgttggccaggctagtctcaaactcctaacctcaagtgatccacccgcctcggtctcccacagtgctgggattacaggctgaaccaccatgcctggctaatttttgtatttgtagtagagatggggttttgccatgttggccaggctagtctcgaactcctaacctcaagtgatccgcccacctcagtctcccacagtgctgggattataggcctga

SEQ ID NO: 72319 - DNA, 1035 bp, Homo sapiens
gtggtgcgatcttggctcactgcaacctctgcctaccaagttcaagcaattctcctgcctcagcctcccgagtagctgggattacaggcactcgtcaccataccctgctaattttttgtatttttagtagagacggggtctcgccatgttggccaggccagtctcaaactcttgacctcaggtgatccgcctgcctcggcctcccaaagtgctgggattacaggcgtgagcctcatctttataaaatggggatagtgtcacctactcgatagccttgtggaaaaattaaagaagaagaaatggtgtaaaaccccaaggcagtgtatggagggaggttctgtgctggatgttgctgggctggtctcgttgccgatcttgccagttgtacagggagctctctgcagcctcacgtggtttctcatctcctgcgactgctcccacctctctgtggcattagctgggctgcccggctgggatgagaagaatcacgttgcgtcagccatagtgcttcaagggcttagtagagaagaactgaaaagaatttcaagtttcaagttaggaatttgtgttttccctaagaagtgtaccccgatgtgaggctgtgttcactgcgggggcctctggtctcttacccggtagcaccaagcaccgctcttgtgagagcatgtccgggtctcactcccgaaaggaggcagctgtcgccacacgagaaagtcggggaggctctgctcaccagtgggtccaagtccttctcacggggttgctggcctgggctgggcctggcctcggtctcctggttggggggcggccaagctgcccatcctgggccctcagtctgcagtcggtagacaggatgaggaggtggatggggcccatgccagggcggtgggtttctctgcagagcacggggccaccggctgctgttcactattaaggtttcctgcctttttaaaaacaagtttcctgggctcaggctgacatgttggatcaggaagcagccttcatgcagattcaggaggcaaagacgatggtgga

SEQ ID NO: 72320 - DNA, 1259 bp, Homo sapiens
ccactgaccctgtggggctggtccctacagaagtctgatgaggaggtacttgctgggatgtgttttaaacgtgttgaggtcacagtcactgaagagtgtgctttagaccagaggtggtcatgctggtcactagagtggggccttgcggcagtgagaccaccacggatcggaggcctggccgcaccctgtgtggtgaggggctggggaggtggtgctctctggttgtcagcggagggagtagtgatcggtgccacctttctgaatggcagttttaagtatgctgcttgtggattttaaatgtaatttttgtacttttgttttcttctcagtccagtcaacctgcaaccaaaacgagactttttagcacgcttgatcctgagctcatgttaaacccagaaaacttaccaagggccagtaccctggctatgacaaaagaatattccttcctgcgcaccagtgtccctcgggggcctaaggtgggcagcctggggcttccggcacatcctagggagaaaaaaacttccaaatcaagcaaaatccggtctctggccgattacagaactgaagattcaaatgcggggaattctgggggaaatgtcccggctcccgattctaccaagggttccctgaagcagaacagaagcagtgcggcgtccgttgtgtctgagatcagcctgtcccccgacactgacgaccgtctggagaacacctccctggctggagacagcgtgtctgaggtggatggaaatgacagcgacagctcatcgtacagcagcgcctccacccgagggacctatggcattctgtcgaagacagtgggcacgcaggacaccccctatatggtcaacggccaggagattcctgcggataccctgggccagttcccctccattaaggacgtcctccaggccgcagccgctgagcaccaagaccaggggcaggaggtcaacggggaggtgcggagtcggagagacagcatctgcagcaggtggtggggacagcagaggtgggcggggtgggtggaggtgggtggggccaacagaggggggtgtggggcgggcagaggtgggtggggcggtagcagaggtgggtggggccaacagagggggcggggtgggcagagacgggcagggcaggcagagggcctggcctgagatgttgcttcccgggcccacggctctccgcactggaacaggtgatacacagcttttcttcctgattctatccttagtcttgacatgaacatttaattcataaca

SEQ ID NO: 72321 - DNA, 1012 bp, Homo sapiens
acgttagagcgtagaggtgtggagggcgggttcacgttagagtgtggaggtgtggagggcaggttcaccttacaggaaggacgtggacaccagaggggctgtgggccttatcctggccaccccgcctgtgggacggggcccatgggctgctcctctcagagtgaagcctttgtgggatgagaaagtgccgtgctcatgagtctggatcctcttctctcctactccagctgcatgtctgaaaagcgacgtcaccttgttgttaaagccatggtggtccagcgtgctctgtctttccaggtgccgaggtaaacagagcatccacggaaggggaaagcccggatggacctggccagggaggcctctgtcagaacgggccaacgccacccttcccagaccctccgtcgtctctcgatcccaccacaagcccagtgggccctgatgcctctccaggtgtggctggtttccatgacaacctaaggaagtctcagggaactagtgctgagggcagtgttagaaaagaagctttgcagtctctcagactcagtcttcctatgcaagaaacgcaactgtgtaagcatccgttaccccgcttttcccaccctccacgtccgcgtcgctcagccccttgggagcaggtgccctgcgcactcactgtctgagctgttgtgtgcctgtgcctgccgtgtgccatctgagtcccacgtggggctgtgagtttagcaaggagagcttcaagttagagagtgaagatgcaggtggagtcaaggttctgctgtggtctgactggcagcagtgctgacgcttttgcgttaaaggccagcctgcatgtcctgtgtcacccaggtgcttggtaagcagacggtgggcatccagtctgttgttttggttttttttggtttgctttttttttctgagacagagtctcgctctttcgcccaggccggactgcagtggcgctgtctcggctcactgcaatctccgcctcctgggttcatgccattcacctgcctcg

SEQ ID NO: 72322 - DNA, 1415 bp, Homo sapiens
accgtgtgtgcctacgcgtgcagaccctcctggcccctcaggtaaaggaaccgacggtgtgtgcctgcgcgtgcagaccctcctggccccgcaggtaaagtgtctcgtctaccccctctgccatcactgtacctcacgtggcctccaccacagcacgtcatgtctgccattgcgtgtgtgcccattacatggcgagatccttgaagacagagactcattccccgtctgcctcccaccaccttgaacactcccaactcctaaagtgccaacacaggtttaatttgccgaattaaatcttcagttctgctgattctgctgagtacattcctctgctacaaagctaatggttccaaaacaaaatgattaagtatttgaatcctggagcatcaacactgccttttaaaatacagcaaagtctaaactagtccagctgaaacatctgtgagcttcagttccaatgagggagtccagggagttagaaactggaagagcaccttttttcagtggccgggaagatggcggacattcagactgagcgtgcctaccaaaagcagccgaccatctttcaaaacaagaagagggtcctgctgggagaaactggcaaggagaagctcctgcggtactacaagaacattggtctgggcttcaagacacccaaagaggctactgagggcacctacattgacaagaaatgccccttcactggtgatgtctccattcgagggcggatcctctctggcgtggtgaccaagatgaagacgcagaggaccactgtcatccgccgagactacctgcactacatccgcaagtacaaccacttcgagaagcaccacaagaacatgtctgtacacctgttcccctgcttcagggacgtccagatcggtgacatcgtcacagtgggcgagtgccggccttgccggcctctgagcaagacagtgcacctcaacgtgctccaggtcaccaaggctgccagcaccaagaagcagttccagaagttctgaggctggacatcagcccgctccccacaatgaaataaagttattttctcattctccaaaaaaaaaaaaaaaaaagaaactggaagagcagcatcacggccacggcccagacaggcaccaccacctgaacagaaggaaggatgggatgaccagcaggactggactcagccattacaggtggaacatgcagaggagaactgctgcagaggagaactgctgcagaggcccacagtgacgacgcctgggccttacactgaccaagaaggaacacagccaaagacgctcaggttccaccgagagggcacgccaacatggtgacagccaaccgcaccgagctgagtccagtgcaatcacagattctgctcacttaattcccctgctggtgtccaagcagcccacctctccagaacagagacc

SEQ ID NO: 72323 - DNA, 1312 bp, Homo sapiens
tgagcagaatctgtgattgcactggactcagctcggtgcggttggctgtcaccatgttggcgtgccctctcggtggaacctgagcgtctttggctgtgttccttcttggtcagtgtaaggcccaggcgtcgtcactgtgggcctctgcagcagttctcctctgcagcagttctcctctgcatgttccacctgtaatggctgagtccagtcctgctggtcatcccatccttccttctgttcaggtggtggtgcctgtctgggccgtggccgtgatgctgctcttccagtttcttttttttttttttttttggagaatgagaaaataactttatttcattgtggggagcgggctgatgtccagcctcagaacttctggaactgcttcttggtgctggcagccttggtgacctggagcacgttgaggtgcactgtcttgctcagaggccggcaaggccggcactcgcccactgtgacgatgtcaccgatctggacgtccctgaagcaggggaacaggtgtacagacatgttcttgtggtgcttctcgaagtggttgtacttgcggatgtagtgcaggtagtctcggcggatgacagtggtcctctgcgtcttcatcttggtcaccacgccagagaggatccgccctcgaatggagacatcaccagtgaaggggcatttcttgtcaatgtaggtgccctcagtagcctctttgggtgtcttgaagcccagaccaatgttcttgtagtaccgcaggagcttctccttgccagtttctcccagcaggaccctcttcttgttttgaaagatggtcggctgcttttggtaggcacgctcagtctgaatgtccgccatcttcccggccactgaaaaaaggtgctcttccagtttctaactccctggactccctcattggaactgaagctcacagatgtttcagctggactagtttagactttgctgtattttaaaaggcagtgttgatgctccaggattcaaatacttaatcattttgttttggaaccattagctttgtagcagaggaatgtactcagcagaatcagcagaactgaagatttaattcggcaaattaaacctgtgttggcactttaggagttgggagtgttcaaggtggtgggaggcagacggggaatgagtctctgtcttcaaggatctcgccatgtaatgggcacacacgcaatggcagacatgacgtgctgtggtggaggccacgtgaggtacagtgatggcagagggggtagacgagacactttacctgcggggccaggagggtctgcacgcgcaggcacacaccgtc

SEQ ID NO: 72324 - DNA, 1048 bp, Homo sapiens
gcactggaggtgaagagagcgtgtttttaaaatacagagacaagcacgtcaaggtgttttcacagccccctgagggaagggacgcagggtctccgacaggtgctctggggtgactcttctgtggagctttaccctctgagtgagaccctccccagagccccgggggccgcagcccgccctcctggtgagcgctgggcagggctcgtggtggcatcagcagcagagacgaagcctttctgtaacatgcggccgtcccgccgagaggggcagttttgctcttttgtacattttccgaaactacagttaaagcagaagtctgtttttaggaaaagtttcaagggagaagggcaagtttatcaaaaacattgtttcaggagaagggagcataagtttacagcctacaggacgtacacaatatcctgctgctgggaaaaccacagcattttatctattttttattttaataggtttggtgcttatcttctaataagatttaaatgtcacaaactgtagcacaaataatataatttataatttacaaattgactaaaattgggtatagtatggtatttgaaagaataagcatatgcttctgtttattaaaaaaagaaaccttccaatgtccaaaactgctaaccctcgacgtggccgccaagttagtcgctccttgctaaccggtgagtgaccgcggccccgagcctggggctggacgcaggtcccaggacatgctgctcccttgtgtgagtgaccgcggccccgagcctggggctggacgcaggtcccaggacgtgctgctcccttgtgtgagtgaccacggccccaagcccagggctggaggcaggtcccaggacgcgccgctccctcatgctgcccgggcccttcctccaagaccctacagagcctgaggggcaccttggcttccgcctgtgctagctttgccatgtcatctggaataatacttgaaattttgatttttggaaaaaaaagttttttatcttttgttgaaatcacctgttatccttgtttgtaaactgataacttttttgct

SEQ ID NO: 72325 - DNA, 1028 bp, Homo sapiens
ttagaaacccacgttacactcatgagtaactgcaaatagacccagggcctaaaacaaccacagccctgtatggcctgacgtcctgccggctcctgactgaggccaaattctgcttagaacattgagcaaagtgcaaacagggtgtctgtaaagaaaagagtgctggccgagcgtggtggctcatgcctgcaatcctagcactttgggaggccgaggtcaagagttcgagaccagcctggccaacatggtgaaaccccgtctctactaaaacacaaaaaattagccgggcgtggtggcgggtgcctgtaatcccagctactcaggaggctaaggcagaagaattgctcgaactcaggaggcagaggttgcagtgagccgagattgcaccactgcactccagcctgggcaaaaacagcgaaactgtctcaaaaaaaaaaaagagaggcagaagccaagaagccaacccagacagaactagagccatgaggaagtcgggggctccttacctggcaactcggaagcaggaatgttctgccgatactgataggtcagctcacggaagctgcgcaggccacagcagtaacacagaacggtgtctcccgtgactctgtaatctggaagaaacacagccagttacccagcaacaccatcttcccaacagcagcgcacggacttcacagcagtgggagactaacgcactgaccataaatggggtgaagacaacgggcgacacattaggaaaataagaacaaagccaatctagatacgaatttatttttattgagacggagtctcgctctgtcgccctggctggagtgcagtggtgcgatctcggctcactgcaagctccgcctcccgggttcacgccattctcctgcctcagcctcctgagtagctgggactacaggtgcccgccaccacaccgggctaattttttgtatttttagtagagactgggtttcaccgtgttagccaggatggtctcgatctcctgacctcgtgatccacccgcctcggcctcccaaagt

SEQ ID NO: 72326 - DNA, 1052 bp, Homo sapiens
gtgggaggatcccttgaagccaggagtttgaaaccatcctgggcaacatggtgagaccctgtctctacaaaaataaaaaataaattagccgggcctggtggtgtgcacctgtagtcctagctactcaggaggctgaggtgggtggatcccttgaacccaggaggcggaggttgcagtgagctgtgattgttcccctgtactccagcctgggccacagagcgagactccatctctaaaaaataacaaaccagaaaatgtgagcctcgccttttttcagggatacaactcctcgccatcacagtccatcacaacctgggtggcgttagctggatgtggccccgccccgatttccatgagacccctcctgaacaatgtttccagaaagagttgagctcctgagcctggtgctgacgaattgtgttggagacagccctcagcgctgagtgcgtgtaacgagtgtcctctctccacaggtgcggtctgcctgcagcctttctgccacctgtactggggctgcacccggaccggctgctacggctgcctggccccgttttgtggtaatactggctcttcaggccccagttgctttgacctttgcatgttctcttggtgaacttgagggcaggggatggtggggtccatagcctgatgtttatagggatgaggccactgttggtcatcaaatgatacctattcctggctggactgcagaggtgtgtcaaattcgtgttagctcaaaatcaagccttaacagaattattaggggagatactcccaggacagaatccttgcagcggggttctgctgttacgataccaagaccaggtgctggggagactcggagagctgatctttttaaggagggagtggaatggaaatcatttctgcttgtcctctgtttaaaattgagttttatcattgaacttcttattctttctagaatctgtaatgaaaagaaatatgtttatcctcagtgtcgggcagacagtgctttcctgcgacatcattataaacaggtaacattgccccttcatctcggcagagctcaacct

SEQ ID NO: 72327 - DNA, 1024 bp, Homo sapiens
agccgggcgtggtggtgggcacctgtagtcccagctactcaggaggctgaggaaggagaatggcatgaacccgggaggcggagcttgcagtgagccgagatcgcgccactgcactccagcctgggcgacagagcgagactctgtctcgaaaaaaaaaagactgcatgtatttccttctcggttacgacagttagaacacatccctttctcctgtggacggggaccttgacctgaacctgcgtgtatttccttcttggttacgacagaacacatccctttctcctgtagatggggaccttgacctgaacgggcagttgttggtcgcacaaccgcgtagaaatgcccaaaccgtccacgaggacgtcagagcagcggctgggaagccagacaagatggaggagacgctgacatgcatcatctgccaggacctgctgcacgactgcgtgaggtgcgaccgtgttcacccttggctcacggaacatggcactgcaggttcttcgtcccgtgtggggcagggctgggcatgagacaagcctgcaggtcctgtttggcctggcatctgctgaggttactctgtcacccagataagtgggtggagtgggtggagtgggtggagctttctcagcccactgcaacctctccctcccaggattgagcggttctctgacctcagccttctgagttgctgggactacaggtgcacaccactatgcctggctgactttttttttttttttaatgttctaaatattttttattcctttttttttttttttttttttttttttttagatggagtctcgctctgtcaccaggctggagtgcagtggcacagtcttggctcactacaacctcagcctcccgggttcagacgattctcctacctcagcttcctgagcagctgggactgcaggcgtgtgccaccatgcccggctaatttttttgtattttttagtagagacagggtttcaccatgttggccaggctagtcttgaactcctgacttcaggtgatctgcccacgt

SEQ ID NO: 72328 - DNA, 1052 bp, Homo sapiens
tcatatgaccacgggtatgtgggtttgccctgcgttagactcggtgctcgagggctaagcctggtcacagacatctccgcatttgtttctctgcaaatgggctccttgcccccagctccaccccacgtagagataggcacaaatagagttaagatgtgagttgagtgagcacacactcctcgtaagccacttgtcattcctaaactacgacatctcaggctgccagctgcactgggctccagtcagtgacaccttacaggcatggttctctcctgagctggatggatcagcacctatcttgtttgattcctctcacagggtctgggggtggtggcatctcccctaaaggaagtggtccctctgtggcaagtgatgaagtctccagctttgcctcagctctcccagacagaaagactgcgtccttttcgtcgttggaaccccaggatcaggaggatttggagcccgtgaagaagaaaatgagaggaggttagtgtctggttgtgtgtgtcctcagtcctctcgtgtgctcctggggcatgcgggggccgctgccatgctccgtgctgtggggcattgcttcctgcaggggcatgtggaccctgcctcaggttgatgcctgtaacacctccggcattttcattcagaaaacctgggcctgtttttttgcggtttgcataatccagatagaactgtgatttgctacaggctgttctcttggtctggaaatagtgcattctgaattgcagaattaatctcaaaatcctccttcctggccaggtgcagtagttcatatccgtaatcctaacactgggaggccaaggcaggagaatcacttgaggtcaggcgttcgagaccagcctgggcgacagagcaagactttatctctaaaaataaaaatcaagcctgacaccgtggctcccgcctataatctcagcactttgggaggccaaggtggacggatcatctgaggtcaggagttcaagaccagcctggccaacatggtgaaactccgtctctactaaaaatgcaaaaattagctgggtgtggtggtg

SEQ ID NO: 72329 - DNA, 1519 bp, Homo sapiens
cgccccgcggatcagctgagggagccgcaatgtctcttgacagcggcggcggcgcagccggttccgggttcggcgcggggcgggggtaagcgcggctggcgagggggctgcggcgggcggcgaagggggacctggttgcggccgtgggagggggcgcccgccggcgtccaggccgggctgcggggctgcgtgggcgcgggcggccgggccggggcccgcggggtggggcgggcgccgagtctcggcctctggggtcgggagtctccatgggcgtttccggggtctccgcagatgtgaatcccgatggagcggcccgaggaaggcaagcagtcgccgccgccgcagccctggggacggctcctgcgtctgggcgcggaggagggcgagccgcacgtcctcctgaggaagcgggagtggaccatcgggcggagacgaggtgcggggctgaggccggggccgggggccggggccgggcagagccaccgggttgcgggcaggccacacgggcggcggtgcagtgtgcgctccagatttttccgtggagtgaaatgtcatgtaagaactggtatttattcggtgttctgcccaccgattcttgcgcatgattcacgcacatcatttagccttcgttacaactgtataagttagttgtgttcatatactctccagaatgcaatattgtcacgttcgttgccgtacagagtatcttttctgactgtaatggaacgaaattaaaaataatagaaggaaaagtggaaaattcacagatatgtggacatgaaacaccacactcttaaagcaaccggtgggtcaaataagtctttacaacggggaccttgttttgagacaaatgaaacaaaaatagaatacaccaaaaggtatttaggatgcagccaaggcagtactcagagggaaatttatagctgtagtgcttatattaaaaaagatctcaagtcccagcccctagaatatttatttatttaataaacctggaaagctaaaaacttgaacaaagtcatacaacgggtgagagaaagttccctcagcctccacattcactgcctccagtctcccaagtgaccatctggttgtttgatttcctctgaagcctttgtatggggagagaaatgcgctggtcctgtcaacaaaaatgtttagtttgtctgaaaattaatgaattagctccgacattatactctaaaaaggagcgaggatgggaaatatttgctgtttggaagcaattttttttttttttttggttaatttcaccccttataatgtgcttgcacctggttttttttgtttttttgtttgtttttttgagataagagtcttgctctgtggcccagactggggtgcagtggtgtgatctcagctcactgcaccctctgcctcccggttcaagtgattctcccgcctcagcctcggagtagctgggactacaggcgtgcgccaccatgcctggctaatttttgtatttttagtagagatgagctttcgccatattgcccaggctggt

SEQ ID NO: 72330 - DNA, 1682 bp, Homo sapiens
gataatcccaaaatgtggctccgagataatcaagacaaccttaaaagtatggagagaggccataaatatgatgtttttggaaaaatatttaattcaagcataaacattgttcatgtaggactgcgatcccataaatgtggcacaggagaaaaaagtttgaaatgtccttttgatttgcttattccaaaaaataattgtgaaagaaagaaaattgatgaactcaataagaaattattgttctgtatcaaacctggcagaacccatggtgggataaaatactgtgattgcagtacatgtagaaaatccagcaacgaagagccatggctcactgctaatcacataacacacacaggagtctatttatgcatggaatgtggcagattttttaacaagaagtcacaacttgttatacaccagagaactcatacaggagagaagccctatcaatgcagtgagtgtggaaaagccttttcacagaagtcactgctcacggttcatcaaagaactcactcaggagaaaaaccgcatgggtgcagcgaatgtcagaaagcttttagtaggaagtcactcctcattttacatcagagaattcatactggagagaagccgtatggatgcagtgaatgtggaaaagccttcagtaggaagtcgcagcttaaaagacatcagataacgcacacaatagagaaaccctacagttgcagtgagtgtgggaaagcattctcccagaaattaaaactcatcacacatcagagagcgcacacaggagagaaaccctatccatgtagtcactgtggaaaagccttcttttggaagtcgcagctgattactcatcagaggacccacacagggaagaaaccttacggatgtggtgagtgtcaaaaagccttcagcaggaactcacttctcattaggcatcagaggattcatacaggagagaagccctacgaatgcaacgaatgtggtgaagccttcatcagaaaaccacagctgattaaacatcagataactcacacaggagagaagaactatcgatgcagtgattgtgaggaggccttctttaagaagtcagagttaataagacatcaaaaaattcacttaggagagaaaccatatggatgcattcaatgtgggaaaaccttctttgggaagtcccagctcctaacgcatcacagaacacacactggggagaagccttatgaatgcagtgagtgtgggaaggccttcacccagaagtcaagcctgatatcacatcagagaacacatacaggtgagaaaccctatgaatgcagtgaatgcaggaaaaccttcagtgagaagtcaagtctcattcatcatcagagaacccatactggagaaaagccctttgaatgtagtgaatgtaggaaagcttttgcctggaagccacagcttcttaggcatcagagaattcatacaggggagaaaccctatgaatgcagtgaatgtgggaaagcatttgttcagaaagtgcagctcattaagcatcaaagaaatcacacaggagagaaaacctatggatgcagcgattgtgcaaaagctttctttgagaaggcacagctgattatacatcagagaattcatacaggagagagaccatataaatgtggtgaatgtgggaaatctttcacaagaaagtcacaccttatgaggcatcagaggat

SEQ ID NO: 72331 - DNA, 1052 bp, Homo sapiens
tatactttccttcggtttctaacgcagcacttcttcatctgaggtagttgggtctaggtgtgtctatatgggcatcagtgggaggcaatatctgcaattaaatatggcatttatgcttgcaaatttgtctagagaggttctcaaagatgttcatgactcaataaaagttacatgccattggggtgcgggccctgcgggacgggacgagggcggggcgccaaccgcgagcacccccgcctccccccgggctctgctggcctctgcgcgctggggccgcctctccttccgcaggggcagcggggtctcctggaagccccggagcctcatggaagcccgggagggcggcggagcggggcccgcagcgcggggcccggaggggcagccggcgcccgaagccagggtgcacttccgagtggcgaggttcatcatgcaggcaagtgtcaagctagggatgcggtccattcccattgccactgcttgcaccatttaccataagttcttctgcgagaccagcctggacgcctgtgacccttacctgattgccatgtcttccatttacttggccggcaaagtggaagagcagcacctgcagactcgtgacatcatcaatgtgtccaacaggtactttaacccaagcggtgagcccctggaattggactcccgcttctgggagctccgggacagcattgtgcagtgtcagcttctcatgctgagagttctgcgcttccaggtctccttccagcatccacacaagtacctgctccactacctgctttccctcaagaagtggctgaaccgccacagctggcagcggatccccgttgccgtcactgcctgggccctgctgcgggacagctaccacgggggtctgtgcctccgcttccaggaccagcacatcaccgtggcggtgctctacctggccctgcaggtctgcggagttgaggtgcccgctgaggtcgaggctgagaagccgtggtggcaggtgtttggtgacgaccttaccaatcattgataatattgtatctgatctcattcagatttataccacggac

SEQ ID NO: 72332 - DNA, 1077 bp, Homo sapiens
tttatggctgcacagttttccatggtatttatgtatcacattttctttttttgttgttgtttttttaagtgttaaataatctttatttgatattacacataaaccacacaaaatgcctttgaataagtaaaaggaaccatcttaaatacaaggaattctaattacattggcatagttaaggccaaaaatacaaagaagacattgctaccttatcttcaacccttgcctttaagaggcaaataaacacaaaatacaggtgcatcttgcttggttctgagacagtgaaggaatttccccagtatttaaatatattcacataaccagtcatataaatctaaatataaaccaatataaatataaatataaaaccaatcttcaataagttttaagatggtactcaccatctttgtgaaaagttgaacattattaacaaagtctaatcatatctttagaaggagtaaacagtgatagcattcactgaattggaattactattaatattcaaaaaccaaacttattcatttaaccacaagccagtcttagttttaaatcaggactgcccaaaaaatattctgacagtcattcataatctgaattctggtgtatgagatctattatatcataggacacataaaaaagtcatgagacatttctgttttgtaatataaggtataaggcagtggccaattattactcactagtagcttttttgagataagctatcaagtctgccctttctgcattgttcttaatgctggcaaagatcatttttgttccaggaatgtacttcctgggattctcaaaatactctatcagtgtttcctctccccaggtgatgcctttgttcttatcagtctctgtgtaagataatccaatggcctgacctgtcttccacctgaagagaccatggagattaggcccagtcttttgcttgcctcccttttccacggtgtggcactgggcacacttctgaacaaaaattttcttgcctttctcaacatcacccatatttaattctctctttcatcactggcactacaaagattcccgctcagaagccagacatcccactctatg

SEQ ID NO: 72333 - DNA, 1047 bp, Homo sapiens
tgtagtagtttaccaaaattatgtttccaccatatcaaagtaaacaattcatgcctttatagggtcaggcctacaatgaataggtatggtggttcacagaattttaaaaacagagttaaagggaagtgatgtacattctgggggcattagggtagggagatgaatcaaaaaatacccctagtaatactttttatttaatactacaaaagctttgcaaatggaaaccatgcaattacttgccttagttcttttgtcataaaaacaatcacttggttggttatattgtagctattacttatatagcaacacttcttcaattagcagtctagacattttataaacagaaatcttggaccaattgataatatttctgactgtatcaatattttagtgctataaaatactatgtgaatctcttaaaaatctgacattttacagtctgtattagacatactgtttttataatgttttacttctgccttaagatttaggttttttaagtgtatttttgccctgaattaagtattaatttgatggaaactctgcttttaaaatcattatttgctgggttctaataaattaaaaattaaacttgaaaaaaaagagaataactatttctcaggtagagaaacattccatctttccaagatgtccttccttagtgttctgatggtataatagttgaatattttaatattccatcctgtcattggcctggatcctgcttaggaatgtggtagtcattataaggaaaacttgggactgtaacatccccccaaactgggaaggcgtcgagagactaaagaataatttgggcaagtccagcttgatgaatagatgagtttactaggacttacatactggacattcctaagcagctctagagtcaccctgcctcccgtctctaagctgcctttcagctaatgttctgactgtttgcctactctgtgtgcacgatgacagtgttttctttgacatgttctcaggtatgccctgggatgtttgggttctcagggatccctgctcctcagctgggcaccagggcct

SEQ ID NO: 72334 - DNA, 1008 bp, Homo sapiens
ttgttttggccgaagagacgaagcagtttgggatgtggtgtgtggtgatcacaaggctgcaggcagctggtgaagggagctgctgcgctttggcgtgatatgatagtgaagtaatgcttctcgtcgtagtccactgtccacgccatcgttacagtgttttccaaaaccgtaaccaactccctggtttaaaatcttccggaattttcatttgcccttggagtaaaatctcaatcttacccagagggtggcatttaaaggccttcataacctgatcagcatcatccctctctcccctatgcgttgtatagctcgcagccacacagaaatacttggaattcatcacaccatgccttggtgtttcctgttctcctggcctggacagttctctgccctcttcttctggtgaaatcttactcaaatgcttccaaggcctcggggtgtagctctctgggaaagctttttttgaccctaacctctgcagagtgaggagcttctcatctctgctctttttactttttgtattgacctctatgaaggcatttaagccattatcgttctttgtttgtctctcctgctatatgtggtctcctttaatccaaggggaagcatggacaataagaaaacaatctgtttcagtagatggatgtgaggtaaacaaaggtcccacagtggtcattctgtatgttgtgttttcattgtctgttatttcccattggtcatatgctgccttgtgtcaattttttgcgcattcattcagcattttttatcaactactgtatgccaggtgctgtgttaggtccggacaatatagagattttaattgaagcatacacagttgctaatagtggaaacttttcctatgaggagttaagtaattaagagctgatgtcattaatattgttatttgcaataaagatggaaatgtttttatgtataatttctccaaatatattgtaagcactttgaggtgaaaggatgagccactgttagactattttgtatcacttg

SEQ ID NO: 72335 - DNA, 1342 bp, Homo sapiens
gattacaggcgcccaccaccacacccagctaatttttttgtgttttttagtagagaaaaggtttcaccatgttggccaggctggtcttcaactcctgacctcaggtgatgcgcttgcctcggcctcccaaaatgctgggattacgggcatgagccactgcgcctggcccataatttttgtatttttagtagagacaaggtttcaccatgttggtcaggctgttctcaaactcctgggctcaagcagtctgcccaccttgacctcccaaagtgctgggattataggcatgatcccactgcacctggtcaatactttttttcttaagccacttttctcaggagatgtgtgtactttagaatgtgaaaatttccacttagaagcaattttcaagttctttcatgtcttctcatcagttttttttttttttttggaaatttaatcaagttagcaatctgctttatttgcctccttttattttctataacagggtaaagttctttacaaagttcgctggaaaggctatacatcggatgatgatacctgggagcccgagattcacctggaggactgtaaagaagtgcttcttgaatttaggaagaaaattgcagagaacaaagccaaagcagtcaggaaggatattcaggtactatgttttgtctcatatttgtttttacatacataaatttattgtaaattttaactctcaaagtatgtgtagtaaatgatttacaaataacaaagtgtaccgtattctttagtgtaaattccatgtagccaattctcacagactgctttcagtgatttttgctgggttcttctttctgtacccaacctacagttgcagttgacaaacaagaatagtttggagatgaatattgatattttcctttaagttaagagtaaggtcaaggtggagaaaaaagagacatgccaaactatcatttgttcgtccgtgacatgagcaacttgtttttgtatatttattctgcattattaactatgtcttatgcctgctttttctgctagttaaaacaaattatctggtgaggacctggtttaaaaaaaaaaaaaacaacttagaactatatagtgaagatatctcacattaagagaatgattctcatgattttataggctgaacattgatctttctccctacaatttaagtttcaactatgttttttaaaatacctagtcttttcttaaatgaccaaaacaatattagttttgactgtgtgtagtagttgttaataataatagcaataacagaagtgcctggcatttattgagcatgtgtgtatactacataactaccatacactgggtcagcactggtttagta

SEQ ID NO: 72336 - DNA, 1618 bp, Homo sapiens
cagataacacatgaacttgggaagtaagatttgtgtgcagtcttgcttgttctgtacataactgtcaaacgtaggagcaagtttaaggacattccaggatccagggtcttagaaaacgttttgtatttgcattggtaactactttgttggcagccaagaaagtctgtaaaaattactttcttggtggttttggaaatgttgaaattcaaatcatttatagcccaccatacctgagtcctttcactcccactttgggttgggcgctcagcagcactgagtttctgtgcacccctgccttccagactcacacttgccctcaccgccaagacctgtttgctgagtcagagatagaggtagcatacgatttcagcttaggtaagcagttttaagaagttgagattctgcttggaacaaaaaatattcttaccaaatttcattagtactacttttcaaaacctttaaaatcaatatgttaatgaatattttaatctgttttgtattttatagagactatccttaaataacgacatatttgaggcgaactctgatagcgatcagcaaagtgagacaaaagaagatacttccccaaagaagaaaaagaaaaaattgaggcagagagaagagaaaagcccagatgatctgaaaaagaaaaaagcaaaggccgggaagctaaaagacaagtccaaaccagacctggagagctccttggaaagtttagtttttgatttaaggacaaagaaaagaatttctgaagccaaagaagaactaaaggagtccaaaaagcccaaaaaagatgaagtaaaagaaacaaaagaattaaagaaagttaaaaagggtgaaataagagatttaaagacgaaaacaagagaagatcccaaagaaaatagaaaaacaaaaaaagaaaaatttgtcgaatcccaggtggaatctgaatcaagtgtacttaatgattctccctttccagaggatgacagtgaagggctacattccgacagcagagaagagaaacaaaacactaaaagtgcaagagagagagcagggcaggacatggggctggagcatggctttgagaagcccctagacagtgccatgagtgctgaggaggataccgatgtcagaggcaggaggaaaaagaagaccccgagaaaggctgaggacactagagagaacaggaagctagagaacaagaacgctttcttagagaagaaaactgtgcctaaaaagcagaggaatcaagacagaagcaaaagtgctgcagagttagagaagctgatgcctgtatctgcccaaacgccaaagggccggaggttgagcggggaagagagaggcctctggtccacggactcagccgaggaggtaagggccacgggaggcagcagaaaacccatgttgagtggtcaagacatttcacaagcaaggaaagggaaacagtcaagctataagaaagtgtttatgaccatgggcggtcataaatgaagatcctccagcttttggacaccgcagcttatctcttagtctctggtttgtttctcttagaatgattatgactagaaaattaaaggctaatttgtgaacaaaaatcaggatggtttttagaggtactcagatgatatatgga

SEQ ID NO: 72337 - DNA, 1098 bp, Homo sapiens
agtatttatatatgcaatatttatcaagggctataaaaaacatcatttttttcatccattatttccagttttgggaatgtattttaaggaaatcattttaaagaaggaaaagctgtgcatacatagttatttatggcagtattatcttcattagtgctacagcaaaatagaacaacttagaaaatgcagtggagaagaaaaccctacataaatgtgaacacagtcatgtaaaaatatgtgtgtaatgtaaacaaaaatgaattttaaaaaagattatccatgtaaaagtacgaggaccagaagggggaacatggagaagtacaatagtcatggttggttaagactatgggtggaaaactttcttataattttctttttttttttttaataataaaattcctaaaagagggttggaaaactgatgttgggtttggaatttgatattttgtgaattattatatggttgactgaggaagcaaaattcttttgtgtgaagaggatttaatgatcagttatcatgtaccacagtatacaagggtgattccctgaagccacaaacctgtattttccggttctcaaataaatttacagtgtcaactctttatccattcttgttttggatatcatgtcattttcaggacaaagaaaccaaaagaaatgaatccaaagaaaaatatcagaaaaggcatgattctgacaaggaagaaaaaggcagaaaagagccaaaaggattaaagagtgagtgtaaatattaacgttttgccatttacgttgctatcttttatacaaataaccagttacctaaatttattatataaaaatttatataattttttttccttattttcaccttgtttttcctttttaatatgatgagggatctgattagaattactgagactggaaattagttgtggcagaaaaataaatgtgtttttatagcaagatgctaaattttaaaaaaccttttaatatattcattatatgtaactctgtgtcatttgtgtaaatataatattgaatacgcattttggatcacttcaagatagaccataatagaaaatccattatatatataaatattggaacaaatacttt

SEQ ID NO: 72338 - DNA, 1018 bp, Homo sapiens
attctcatctgcttggcacacgctgtctaaaacctcctgatcaccttctgcagcaatgtatgcccaagtatccgtttcgtctctggtgtttctcctttctttaagtgactgtttgttttccttggttttgtgatcgtctatggttttaaaatccagtggtatttcttcccttttccgattattctcagaaacatcatttttttcttctggagttaatttaaataaatcaaatgcatttctgatttccttaagtgctaacgaaaaaattaaaatagatggttaagtatgagtcacaaatttctgttacattcaaaagaaaatctaacttagtgttaaagcaacaagatattttcttaatttttactaacatctaccttgcttataaagcctggtctgatttactgtcaaagccacaaaatcgtttcagctggtctttctactggctgctcaatattcagaaaggatgtccagtgtgaatggctgttaagcagatgttctgaactactcacctgcagttgtgacaaaggcctactgaaggcagtgagtctcagagtgatccaagtcacaccagcacctttcccacagctaaagacaccagactgtctatagctggatgttgaagcttgtaccaaaatggcttctggtggcaagtgagggaaacagcagggtgccagagcactgcctgtgtacctggtaaaactgtacctgacgctaccagcttttaactaaagaagaaagtgggaagaaaactggcaggtactagacctgacataagaaataaccccaaaaagaagagaattaggatgaattctattataaactctgggtacacagcagacaggttttattatcagggaatattgaaaactggactctagtgagtacccttatgaatgggacaaacagtagttccatttaaggctgtatgttcacagtaaaaatgtatctgaaactgacatacaagatactaggaggaaaaaaggttaacaaggccaggtccagttttacagtattttga

SEQ ID NO: 72339 - DNA, 1087 bp, Homo sapiens
gccattttggtacaagcttcaacatccagctatagacagtctggtgtctttagctgtgggaaaggtgctggtgtgacttggatcactctgagactcactgccttcagtaggcctttgtcacaactgcaggtgagtagttcagaacatctgcttaacagccattcacactggacatcctttctgaatattgagcagccagtagaaagaccagctgaaacgattttgtggctttgacagtaaatcagaccaggctttataagcaaggtagatgttagtaaaaattaagaaaatatcttgttgctttaacactaagttagattttcttttgaatgtaacagaaatttgtgactcatacttaaccatctattttaattttttcgttagcacttaaggaaatcagaaatgcatttgatttatttaaattaactccagaagaaaaaaatgatgtttctgagaataatcggaaaagggaagaaataccactggattttaaaaccatagacgatcacaaaaccaaggaaaacaaacagtcacttaaagaaaggagaaacaccagagacgaaacggatacttgggcatacattgctgcagaaggtgatcaggaggttttagacagcgtgtgccaagcagatgagaattcaggtgagtttggaatcattttgcagaatttttcaaggtagtgcaccatattattttactgtactcttctctgtatttctgatctcaacgatcaaaaaataatggagtcgaagagtttatttggatctcctgaataaataacattttatattgaagacgggtcattctgtgacttctcaatggatcaaacaatttttctgagttcctataatgttctcagcacgtatagaaattaaaagatttctgattttctaccttacctactcttacctggcagccccattttatatcttactatttaatagatttctttcaggaaattatcaaatataaacttatttgtattttacccttttaatgttgtagcaagtaacactaaataagattatattataaatgctgtcctgaggacattggagctggtcaagaagaagaatacagactacag

SEQ ID NO: 72340 - DNA, 1200 bp, Homo sapiens
aggggcctgtgggagtctggaaggatccataagcagtgcctttgactcacatgctgggatagctcacatgctgagaatggctttatctgtacatggttggaagcagtgtatgtccaagaagaatggtgtaagggagaagagtcacattagaattgcatttcctcttaccagatccccgatccctccttcctttgagctacttagtcttaaaattcctcctttgctattttacaatgacagcttacctatttatctttatgccttcagagtaccatggcttctaaatgtggatcgttcatattacttcccaaagaaaattggggattttatcaattaaaagaccccattatacaatgacttgtgttaaaagtgtacataaagctttggttaagacaccacaaatttcataaacaacattgtgggttttttatacttcagacaaatgtatgttaacaaggctattgtgtgttccagatggcaggcagcagattctgagtttgggcatggacctgcagttggaatggatgaagttggaagatttccaaaagcaccttgatgggaaagatgagaattttgctgcaacagatgcaattccaagtagtgagtagttttggaaatattgaaatccctttcacaaatctagatttataaaatctaacttattttttctttcattttagatgtgttaagggatgctgtgaaaaatggggattatattactgtaaaagttgcacttaattcaaatgaagaatataacctggaccaagaggtaatatgtcgttgaaaaatctcatgaaaggaaaatggaaagtaacacttgaaagaattcagtttaacttttcatttattttaattacaaaaggctgggcgtggtggtgcacacctgtaatcccagcactttgggaggccgaggcaggaggattgcttgagcccaggaattcaagaccagcctgggctccatggtgaaaccccaactctacaaaaaatacaaaaattagctggacatggtggtgtacacctttggtcccagttacttgggtggctgaggtgacaggatcacctgagcctgggaggtcaaggctgtggtaagtggagatcacaccactgcaccccagcctgggcaacagagcaagactcccatctcaaaaaaaaaaaaaataatgcacgttcactttgtaaaataaaaaaattgtagaaccc

SEQ ID NO: 72341 - DNA, 1113 bp, Homo sapiens
cactttattgctaaaaaatgctgacacaacaacacaaaatgagcacatgctgtggggtaatgatgtgaataaacgtgcttgtggcagggttaccacaaaccttccctttgtaaaaaacacagtccctgtgaagtgcagtaaagcaaagctcagtgaaacaaggtaggcctatagaggaaagttgtaaaattttatgcaaacattcatatgtgaaaagatactctaaaagctagtagcttctgatggttgggatattttagtgaaaatcctaagtagatgcctaaatcagtgcctattagtgatttcacattgaaacatctcgagtgagaagacttggttctgaaattgttctgactaaagattaacacgttttttatttaacaaaccaacacaggattccagtggaatgacactggtgatgcttgccgccgccggagggcaggacgacctcctgcgactcctcatcacaaaaggcgcgaaagtgaacggtcggcagaagaacgggaccaccgccctcattcatgctgcagagaaggtttgtggcttcttatgcatcagtttcagagctttcatggtattcctgccgatggactgagaggatctctttggtagtgaaatatagcagtcacatggtcacatcgctttttttttttttttagacggagtctcgctctgtcgccgaggctggagtgcagtggcacgatctcagctcactgcaagctccacctcccgggttcactcctgcctcagcctcctgagtagctgggactacaggcaggtacctgccaccacacccggctaatttctttgtatttttagtagagatggggtttcaccatgttagccaggatggtctcgatctcctgacctcgtgatctgcctgccttggcctcccaaagtgctggtattacaggcgtgagccaccgcgcctggctgtcacacggtcccatagctttttaaaaatttatttttagaaataaggtctcactctgtcacacaggttggagtgcaggtggcaccatcataactcactgtagcttcaaactcctggactcaagcaatcctctcgcctcagcctcccaagtagctgggactaagtgtgtaccaccacac

SEQ ID NO: 72342 - DNA, 1021 bp, Homo sapiens
ggagtaactttttaattttgtttcagttgatctgtgacatgtaatgaatggatttatcatcagtagtacattgtaatcacatttcaaaatgtgatttatctcgttggaagtaatttatattaaaatactctgattaaagtactaatattttaatcttagataatttaatttttttgaataaatggtatttgtattccttttggttaataatttaattgaaatgtttccatatattatctttttaaaggatttatatgcagaggttcttaggttggagctagcggttccattcgcagttgctggcagcacagtgagtggccacgtttgggcctctgtggggcggggtgcacccccgtggccccacgggaatgctgcagcccgcaaccacttgtgatagaacctgctgggtatttttcctgatgactaaaaatttcaaaatatctgaaaactgtcttttaaataatttgggaaattaaatttgcctttttttcttttcatagaactttttaacaacagtggctattcttttggaagcaggagcttttgtaaatgtccagcaaagcaatggtgagactgcactgatgaaggtaaatccctcctgcaggtcatccctttcttcactacgttggcaggtgctcgtgttggcatctgccactgccaggcactgtgctggggactgagaacagagtgggtaccaagacagtcctagagtcagccgcttgcaggggagaaggagaagcgggctggcagggtagcagtgagagctcagtatgggcagtggtgtgatcagaacaggcacagagagccatgaggtcacagggaagtgctccgagctgggccctggggaccctgacaatccttagggtggatgaggcaggtgccacactgtgtcctaaatggcagtcaagtcagccgggagggagcactccggccgcagctggagcagcagggaggctgctggcctcgaaagtgcaggcctaggggtgggacggagttcctcgtgcactctgtgtgttcgtca

SEQ ID NO: 72343 - DNA, 1054 bp, Homo sapiens
tgagaggtgtttttgagattcctgagacaaagttgtctacagtgaaggccaggcttacgtatctctgcgcctcgctgaggggctggctcacgggggacagcgtggcatggacagagggcagcagcaggggactgcttagcaaggcctggtgtctgttctgtcttgggactgaagcatcctttttgaagttgcccatttcctgaaaactcagtgctaagatattaactgaatgtagcacacagatttttatgttggcccctgagtcaaagatactccccacttgcatttaagcaatgctgtgtgactcctaacgctgtggcctgacgggccccaaaagttctctatccttcttccatggcctgtgccctctcttcacagaaccgctaagcatgtatggagaagggaccagcacccatgccacagtttacagctaagtaattgttactcctttttacctgacgtaggcctgtaaaagaggaaattcagacatcgtacgactcgtaattgaatgtggagctgactgcaatattttgtcaaagcaccagaatagtgccctgcactttgcgaagcagtctaacaatgtgcttgtgtacgacttgctgaagaaccatttagagacgtaagtgagaagcgactgtgccatagttaagtcacatatcatacatctgtttatgtagacatattataattggagtggcctgtgtgtaactgctcagaaaaacatccagcacaagtcctgatggttttgtttccagtagatcacagatttaataaatggcatatgaattatttttctgcaagttatttaactctcagaaaatttcaaacttaacactggcctatctgggagtattttccttaaatattaagtatgctcttaatttggttagcaaaggttttcttaaaaacatttaaacttggccgggcgcagtggctcacgcttgtaatcctagtactttgggaggccgaggcgggtggatcacttaaggtcaggagtttgagaccatcctggccaacatgatgaaaccctggctctactaaaaatacaaaaatt

SEQ ID NO: 72344 - DNA, 1028 bp, Homo sapiens
attatttggtctttgcaggttggcctctttcatttagcaataggcattcaagattccttccatgtcttgatagtgcatttctgtttagcactgactaatattctgttgttggttgtcaagatttactagtttattcaagttcattctttttcaaataaattctcaatcatattttattttattgcaggttcatacttataacacaatttagtatttctatcacttaagaactcttggcaacacatatcagaaacttgcatgtatcagacagtagcgaactcaaggcggtgtttatgtagcaggtctcgggtgggcctctgggaccgcgcctgttgaactcagtgctgctgatggctgcagtcccaactcctctggtcacacggggggtttgcatagatccagcaagtagagtgacccactttcctgatttgcccagtactgaggggttcccctttctgattttccactgattcattagacaactatgtattaagcatagactttgtgccaggcactgttctaaaggctggggagatggaaatggcagtggagggaagagacttgccttcttagaacttcaattccactgagatggacaacaagacagacacatgggtgtcaggtgcttggtggaagtagagctggaaagcggaggcaggcagagctgcaggtctttgtttggaaggttggcctgggaagccctcactggtattcgacaggcttgtggttcttttctacattaacgttaacacgtactatttttttttcttagactttcaagagtagcagaagagacaataaaggattactttgaagctcgccttgctctgctagaaccagtttttccaatcgcatgtcatcgactctgtgagggtccagatttttcaacagatttcaattacaaacccccacagaacataccagaaggtaagccgatgcctcccttcacacttttctatgtgaagtgtgacactatattaacagatttttagacagaatcctttcttggaacaaaactttaaggaaat

SEQ ID NO: 72345 - DNA, 1024 bp, Homo sapiens
acagacatgagccaccatgcctggccaatttttggttatgtattaatcagaaaaattggaaggggcaaaagggtatgtggaagaaaatggaaaaccactcagacccacacccaaagatgcccaccacaggaatgtccctgggacgtgtgcacattcagcagcagtgtttaaataccagttaaataacttcagtgtagaaaatcatacgtaagtcttttccaggaactgtcagcagagattacttgggcaaaaggtaaaaagagttctgtggttgaaaaatgccaggtgacacgagctttgagagggccagcctcctctgagcctccaggcagagtgggtgatgcctgtctgaccaggcccagctcaggggcctgcttccatctggtgttgagtgttcctctggggactgaaggttgcctttgaagtaattcacacacatctcccattttcaggctctggcatcctgctgtttatcttccatgcaaactttttgggtaaagaagttattgctcggctctgtggaccgtgtagtgtacaagctgtagttctgaatgataaatttcagcttcctgtttttctggtaagatactctgtatttcactactgaaaagtacattcttctaatcaaaagcacagatgacttaattttaaattcctgtgtcttaataaaatataagcattcagaaaacgatccagtaatagtggttgggaatgaggcaatacccataaagtaaaattatcctaagttttgtcagtaggaatttttcctgcttattttttgccttaaattgtgctcaccatactgtcttagggccagcattgttctgaatataaatacttaatgatctcaaagattctttgtacataattactttgccactgttagaattatttccttggactgaattaagcaaaatttgctagatatagacattttaacacttgtactgtatattgctgggggcattctaatccagtttcccagattgattctgtcatttgtatatttttaataaatcaaggg

SEQ ID NO: 72346 - DNA, 1081 bp, Homo sapiens
ttaattcaagaaataattccaagtgcttataattttatattactgttttattagagagactattttgtccagcttcctttcatacaagagaggttagggaccggcctaaagacatacatttggcaactccataccaaggcctagatcatgattcagatggctccatcctctagagaggcatctttctcagctgcaacctagttcttttcctgccgcattattatgtctaacacattgtaaactgagagagggtgcacctagcatcactaccccagggagtgcctgtctctaggacaggtacaccaggattcttggaattttttttctaatgttgataaagtaatctggagcaacaacttgagtagtgacactaaatgtgaagaaaggactgtcaccttggcagagggtgcttctgtcaaccttatgaagagtttattgggacctgcaacagggctgaatgagtaaacaaaatgactgtcctacaatggaaagagaaaaaaaaagtcagtgttttcaaacttacaccagaagcccttaaaacaccaatgatgtaaaagaatcataaataagttttattttttatttcataagtcaagatgttgtggaggaggccaaggcggacaatcgcttgagcccagaagtttgagaccagcctggccaacatggtgaaaccccatctctacaaaaaatacaaaaaattagccggatgtggtggcgtgcatttttagtcccaggtagttaggaggctgaggtgggaggattgcttgtgcctgggaagtcaagactccagtgagctgtaatccgcgccactgcactccagcctggacaacagagcgagaccctgtcttcaaaaaaaaaaaaaaagtgatttatttttcccttgatttattaaaaatatacaaatgacagaatcaatctgggaaactggattagaatgcccccagcaatatacagtacaagtgttaaaatgtctatatctagcaaattttgcttaattcagtccaaggaaataattctaacagtggcaaagtaattatgtacaaagaatctttgagatcattaagtatttatattcagaaca

SEQ ID NO: 72347 - DNA, 1020 bp, Homo sapiens
ctccctggctcaagcaatcctttcacctcagcctcctgagtatctgggactacaggcttgttccaccccatgttacccaggctggtcttgaactcctggacttaagcaatcctccaacctcagcctccaaagcgctgggattataggtgtgagccaccacgctctgctaaaagttcacatttaatactctcttttaggtctcatagtgtactggtttacattcttactacatcttagattctcttgttaccctttgaaaagatgataagtgactacagcatatttacaaagtgactgccatctccaccttttgtgcttggggaatgtgtggcaactgtctactagaaaaagatcaggcctcccaaccctttcaagggcagcaaacccacactttatttggtgcttgggtaacttgaatataacatggctcccttgctgtaagcaaatgttttagagctgaatttttcctttttttttttttttttttaagcacagaagttcaccagggctagtagaaaatttcaagttaagaaaataactcttgctgggtgcggtggctcatgcctgtaatccaagcactttgggaggccgaggcgggcggatcacctgaggtcaggagttcaagaccagcctgaccaacatggataaaccccatctctactaaaaatacaaaattagctgggtgccatggcgggtgtctgtaatcccagctactcaggaggctgaggcaggagaatcacttgaacccaggaggcagagcttgcagtgagccgagatcgcaccattgcactccagcctgggcaacaagagcgaaactccgtctccagaaaaaagaaagtgaagtctttaattttcttaaataatcctcatatgtactatccacattgtggaaaaactgaaatacgcagtctggacactgcactgagattccggcatactggcacagacacagctatgtcgcatcttacagactacaacagacaacaggcttaactgcaagaggtttacagacaaaacttt

SEQ ID NO: 72348 - DNA, 1050 bp, Homo sapiens
tgaggtatcaacaatctgtacaagagggcctgtggaaataaggagggacttagccaattaaattcttaataaattattagcagatctgaaaattatttggtatttaggacttaatactgtttactgtagaagataaaatgaagctgattttaattcagttgatgttctttgaggaaatggagagtattttgaattaaaaagaaaatccttactgaatggaaataatcagcacgcagcactacatggtatcgaaacctcaattactgttatgaatttactaaatgagttaactctgatttttctcattgtttattgaaatcagttcttaaaaaggctgaatctgatttcattgtatttctagggtgataaaagaaaatgtggctgaagttacccgaagttcagcttgcagtgtaattcagaagagttaagaccagaagtactggaatcatacttcctttcaggtcagtccgtatctgctcattattttctaacagatccttgagtattcgtttcttcctagttttttctagtcaattcttcctgattctgattctgtggactgtaatgaagatatgtaatggtcccagtgttttgagtcagtagaatatttatgaacagtttataggtgaagctgaagcctctatagcttggcctgtcttcgtaggaaaccctggcatcatatctcagcaaggctagaggggactctcagcttcgccttgccctcctctttcctcactggtgtaatgcgtatattaatttgtcttcaggtaaaactggactaagaggggaaatgactaagaggggaaatgacatagaggtcttggagtgaggagagagaaaaaaaaggtctttgtaaaaaaatttcctgttgatttttaatgacctccaaacctagaattttaaacttgtgttcctttggaaaatatgtaatctcttttttttttttttttttgagacggagtcttgctctgtcgcccaggctggagtgcagtggcacgatcttggctcactgcaagctctgcctcccgggttcatgccattctcctgcct

SEQ ID NO: 72349 - DNA, 1102 bp, Homo sapiens
tttggttacataaaattttcatgtgtgttttcccagtgttcagtgtctttgccatttccttaattttgcatcctcgttatcatcctgtttttattttgcttttgtcttcactctaggcttccctctggaggcctgccttttcctgctctagtctgaactggctgctgtctagagcagccggagcagaactgtacccttcagacctcagtgcttctctgggttggatgtgctcttggctggattatcattaattgaacacctgacagctcatgtcgacagttgactataagttttctgtttgtcctttaatagttattttcctttggctagtgcacacactgacacataaaatagcctgggtgctagtgtaggaatactacaatgagtttcctttttttttttttttaagagtttatcacaccattaaaagtaacttatgtattaaaatgctaatttaatgtgaatgtgtctttgatgccatataaactaataagcgaacactgtatttggtcaacaaaatgaatggtttctaaacaatctatagggtccataaattaattgcaagagattatgtcattgttatatttgtgaagggcctagattgcttgagctgagttagtagacgctcgagtcatagattaggaataattgattctacagtaggtctgggtggcatggaatataagctccgtccagcaaggatttgctccatcgaagataaacgcagccagcgtggggtagatatgaggtgctcctgtcttccagcaactccagacaactgatacatgttagaagacagcacattaattatgaaacaatgcagaaaagatcttaagggagaaagaaaggatgacaaacatcaataatggtaggagcacctttcagcagtcaacttggactttacttacatatgcatgaattgagaggcagacggaaggaaaaattcaagaatacacaatacaaaataagtgttggaatcttgttctcaataaagcatacatcttgttatcagttttgggagcatcgtgtgacaggaggttatctagtattatctgtaagaatcacctgctatgtgtacagttcagtagtagtgctaggtata

SEQ ID NO: 72350 - DNA, 1257 bp, Homo sapiens
aacttatgttctgctgtttgtgctacaggccttaaagtcaactaaagtctaggggttcatgtcatgaactttttgacatatgaatggatgaaatattccctaggttggctgaaaatatagatctcatagtttgaattattttggaattacttgaatgatatagaagactaacctatcacagccagtttctatttcttttctgtaggtcataaacacagcatagatacacatgttaaataatttagcagtgcttgaaaccctcttagttacatactgacttcctacagtttgctatgtagactgtagtttcttgcagtttgaagtgtgaacacagtggacccatcctttgccctgatagcatttgtgtaatagagtgacaaataatatcttaccatgtagcgataaaggcagtagagaaaatgacagctactcttttagttaaggggcctagaaaatagctatcttaggagacaaaggggaaagaaaatgatttttatttagtttgtgctcattgaattgagttgtgctgaagtaagcggccacagttctgcctgaagctgaaccatcctagtagtagtggcatttggctgttgagtccttggaatgggactagtgagatgaggaactaaagtttttattgtaattgacttaaattcagttattgatagaatattaagcatacttggaacgacttgattatattaatctacttttgtatctttgattttatgtaatctaaatacagttaagtatttttgaggaaaattttgcatctgaattagatttgcagacttacgaagaaaagaatgtaaaatttctcaacttttaaatgtggcatatgccgaagtgataatattttgactacattgggttcaataaaatatatataattaagctaatttcacctgttgcttttttccctcctttaatgtggcttctaggaagtttaatatttcacatgtggtttgaaatatttttcttggccctgatcttagaagaataatttagtcacattttaattttttcctttcaatgattgtaatctctgaatcccattacataggctataattatgtaatttattgttccttttaaaatgaataaggttgaaatttaaagttttagtgtgtgtgtgtgtgtatgtgtgtatgtatatatatatatatggttttttttttttttttttttttttttttgagatggagtctcgctctgtcacccaggctggagtgcagtggtgcgatctcggctcactgc

SEQ ID NO: 72351 - DNA, 2470 bp, Homo sapiens
atgaactttaaaagagatggtattctgcttgtacacataaataaaatttcagttctgtcttgtggaatataaatcactcaaatttcacatgaggtagttcagtctcaaaattaagaatagaattagaattaagtaggttcaagtggaaatgtacttagtttgaacacatttcattttagattttcttcatattttaatataaatttagtcaataagacaaattattcattaaatacgaggtcctacattgtgttgatagtaatataagtggaccttatattttttaaatgctttgtttaagtgttttgttgatggtgttgaagactttgaaatagataccttaatctaaattttatcttaatttttatttttatttcattgtctaaatttttatctaaaattttttctagctctttattacaccaagacagcttcacatttttatttatatattgtacatctcatgtaaggaattaccgtatataagctagtgtcataacttaagtagccacattcattcagtatgttttatgttttctctctgactggatctctgatacattctttcctgttctagctgcttttatgcaaaagggcattatatgtttgtcaatcaaccaggcttctgtgactgtttagaagaattatgtaaatatataatcctgtgcctgttcactttgccatgtttggaatacaagttatttacattattatctttatggttatttaaataatttactttttgcaagttatttgtattatttattacgtgaaaattgagaaaacatcttagtgtacctttcgtggttaacttttcctcaggatatttttacattattagataatgtaaatcagtattaagtttcagacattctttagatttaaatatgttgcctggtgtttttatgtattgagaaaaagtaaactaaattctacatagtcattctgtatgacttttagtaatttctgacctttttggtgttagaggcaataatagtaagttgcttagttgttaatcactgtatgttaattctttgagttgattagaaaatatgttcccagacttgaatgctttacacattaggataactttggagtgagaagttcagataactgaaaatggtaatgggagtaattgtctacaaaaacttttcttagtcatataagattttatgaggtgccatgtcattcagaatttcactatatccattaattcattgtaacagcatgtatcaaggggacctactgtgtattggttagttttctagggcttaagatacaacagtggaaaaaaacttgtcctctaaattaagggacagcagccacagacatccttctgaagttagtggttctcacacttgagcatgcattagaatcacctgggaggctcattaaaacacagatctctggactttattccagagtggtctgtaggcctcaggtggagccaaagaacgttcatttctagtaagttcctatgtgatgacgctgctactgttggtaagaacccctttgagcatctgttttcagatattgtgcctcaaaagaggctattctgattgtgatttttgttgttgctgtagttgactgtcccagtacactgtagattggataagatccctgacaatcaaaacaccctcagacatttacagctattgccagttgataagcactgcaaaagtccattatttctgactaggaaacatattagctattgagtgttatttaatgcataaattcatttatcatacatttttgaactaggattttaaaacctagttaattcaaatgaagagggtatgtggagaagtgtactttgaagattttgtgaaacaagtttcctcttagcagattctcagcataccagtatgagatgaaataatgtaactgtttttgtatcggtatgtttggacatgcttctggctgctggatgaaggtgctagaaaactgtcctgtctttacttaccctcatggtgaatatgaatagaatgatagtttggtggattaaaatgatggcctgactttctctttggtgtaagcttgttttgcttttctagcttgaagataaaagatttgataagtgtatttcccaagaccataagtatatatattaaaatattttctttgtagcgtcagatatgtgtgtgtgtgtgcgtatgtgtgtgtgtgtgtgcgtgtgtgtgtgataaaggcctactcaaaattatgcagcacaataaaaaattaaattggttcataatgagagcatctatttgctgtattgacagttgtttgttccaaaaaattgtgactgtaccagtgcaaagaaacagtcacctgatttcagtcctttaatatcccagaaagtagattctataacattgactttgatgtgtgtatgttaagaatatctatatgtaggaaataagtatagagatttgtttcttaattgtaatccggatatcacctggggactctctgactctgcttc

SEQ ID NO: 72352 - DNA, 5909 bp, Homo sapiens
gacagggtttcactatgttggccaggctggtctcaaactcctgacctcgtgatccgcccgcctcggcctcccaaagtgctgggattacaggcgtgagccaccgcgtccagctgagatagtttttaagtagtccaagaattaggattactgtctgtggcatgctgtggtacctcagtatatagcaaatgcatatgttaattacagatatttttctgtgctttttaatttgtttccatcttttaccagcattctaacgttcaagcattttatgatagtgttcttttcctgtgtggactccttatatttgatggggacaaaagtccaatatgtatgaacacacagttttcagtaaatatttttgataaaaatattacctgtcatgatttattgcaaagaatttggctgtaaattaacattaaagtttttgtgtatttccaaaccaccattgtggcattcttttcacagaattttaaattatatttagtaaatttaaagtagacagttttttgtcttgatctgagagtgtgaagatatctttgtgtggattaaatactatgaaaacaaggtttttcagttgtaatttttattatatttaaatatattagtagcaagaatgataccttttatcatttctattaaagtctgtcactatataaatcggactttaggcaaaccgttttctcatttagtgtttgttaatgcttgttgtaaataacattttgaaagggaaattgtttggttatctattttgaaaaggcagtttagttttgaaactactgtatgaaatcttgaggcgccaatgctgctaagaaagaaagaaagcactgcctgttagactcagacctgtcatcagttgtaaatccaccgtgatcagagacgttaaaagcaatgcattgtatgtcttagagttgaatgcagcatttatcattattttatttgcttcaagaatttggagaaattggacatgctggcagttggattttttaaaatgatagtttatacagggagatgaggcagtgcacggctactatgaacagatggcgcttaacacagtgattgcatttatttccttcagtagaggctttattttatagtgatatgtttgaaagctagtaaaaacttatactactttggttaagtttttgtgtggcatataatcatcaatagaaacatagaagtaacattaactgtcccatttttttattgtctccctgaaattgtaaactttatttaaatatcacccttggtctgttttgcactgacattttactgctacacttcagggagttctatccaacctttcagattaatatgtatgattattgtgaagtttttcaaaatacttaattcagatgtttaaatgtgcttattagtgcatgttattacattaatttttaaaactattttcccatgataatctttcaaggaaaacactctcagaagtttccatactgaaatcataattctttgtgtatgtttgtattagtgctttctatcttcaaggaattgatgtgaagatttttttttagaatgtttacttttaaaaaaccgaattgatgctgctccccagttttatttctctgatttttttaagaacgtatttttcttacatagcgtagtttcatgcaatataaacttttgaaaaaaggaatcagagatttattataatattgtttaggcttaagattacatttgcttctgtcacgaaatcagttctttgttctttaaattggggcatagcattagcaatatgtaaatcttcagatgctgcatttttttaaaaaaaacatagtaactaattaaattgctcctttcttccttctatgtgtgatcctgattctgctggactttctgccgaacttcatgacaccaccacttgggattttgccaatttttcttgtcacttatatttggcgtgttccaaatggacttcatattctattccttattgtgtggtatcatagcacaatgacagatttcctcaaggaccaccatctcagatgggttcacctatggggagtagaacaggttctgaaacccctcaagcaccaatgagtggtgtaggtcctgtgagtggtggtcctggtggctttggtagaggaagtcaagggggcaactttgaaggccctaataagcgtcgtagatattaaacattcgttcattcctggctatctagaaaaaaaaaagtcagtggtatgcctttatacttttacctgttatctggaagaaatggttttattgttaatgtatgtagacttaaaagtttttttttttttgtaaaacttgaggtttttgtatttttctttattcatgagctttgtagattagaatggtaatgatgctcatcattttgaatgttgaaatgtgtttgtgactttagctaaatataagtattccatagtactgtgaaatctatgtagttaatctcaataaagaaatcattttggataatttaaaactgttattagtggtattctcttacggtcttactaaactttgctgtaacagtaatgctttggttgctttaactaatcctatcattaaaaatgaaaatgattttgctttttaatttgcgcaagtagcactaaagatagaagcttaattaatgaaagctaatgtcaataaggggtagatagagtagtatatgtgggggtgggagggtatgggagtttaatttgtataaaccactgatgttctgtgaaatcggaatttccagctacatttcatatagcttctgaatattcaggtattctgagacagattattaaggatatctttgtcctgtgctgatttttccaaataaatctttttcatcttgaaaaaaactgtttgaaggcaaatctcttttgcttataaaaaataatgtctagttttaaacatatctgccattatttatttggttttaatatctagaccttacccgattattatcgtacagttagtgttaaacattctttaaaataaaacaatactgttgggttggctgtgaagtgaggatttgctgtgtgatttgtggtgaattaggcatttcttgagaatgtaggtttctagaagtattaaaagatggcttgactctgcagtgttgtaaatatttccctaaaatttggacatttctccagtaaaacgtgtctgatgggttaggaccatttgtctccaaggaatggcagtggttttctttttaattgtttgtttgtgtttttcaagataatgctgagagacatccaaggagtacagttcaagaggtgattttaaaaagcagataattacttgagaatggctagagtcattggaatctgattagctcctttcactatcaaatacctattttgattttcaatactagggagaaactgattttatcacattataatgtttattgcaaaacaaagtcataactctttaaaaatgtgtatgttggtcatgtttatttaaaattacatttaaggaatcatatatgactcataccacaaatgtaattcatcagacactgatcatagcatagctgtttctcataaaacatcattatggtttgctatatcatgctttcagcacctttctgaaagataatatgctattttaaaataaacactatgtaaatagtggtgtctgttttgctggaaggtgtagtttggaaagaaacaatttaaattttgcataaaagcagttggttgtaaagcataattgatgcattcttttatactaattaaaattttcatacgtactctttcatgttctgctatttttttgatacacagtgtggatggaactattttccaaaatttgtggtattcataggcttttgtttttgacagttctttgaaaacatgatttggagattgtaaaataatagtcaaagactattctcatgtttctcataagtatgaggtgatggagagtgggatttgctttaatttgtgacattaattggggtatggggagttttaacattgattacagtttttcagtgatatctattgcacttaaatctacctttcccgtcatctatattttattcatataattctcaggtaatttttagcattgtatttcacttcaaagctgaaatatgattgggagaaacttgatcctttgatgttaaaccaaggtacctttggccaaggctgtgaaattctgtatgattcattcaagaacactcgaaggccagtgcacaaaaagatgtcttaatctcctgaacatcctagtgtccaggctcaactctggcaccaagaacagagttctacacaactttttcccagcatcaagaaaatccttgttccggctttaccaagtttacgctgggagcagtcagcttctgagtgacagtcaagtggagcatctctgaactcccagttattccgtgtttttagtgtttttgtatagttaaactttgtggctggttcagtcaatttttttttcttgtggattagtataccaaggaagatttttgaatatcatctgcttaaaagtggtagatacaaaaataaagaggaaattcagtagtgttagctttctaagtaagtgtgaagttgtcatatatgctatcttttttttataaaaagtaatatgaaacaattttaatatataacaatattatgatagtttgtgtgatgatttgaagtactgagtttaaagtcttcaggacttaatgtttcatgtgctacttgtaattagtgtgtataaaataaaggaacacctgttttcctaatagttttattctagtactctatgttgttggaatttcccccatttttgtatattttgtaaataaatgcatattttttttcttgacagatgcagattttaaaaaactgattcacttgtgtttttgcaaaattcaatttgctattctttcttgaggttttttttatttttctgtgtgaaatcagtgctgagcacttagtgaaagagattgaatatttttaaccctgaaatatcaataatattaggggaacaatatctgttttagctggaattgccatttaataaaaataggaattgtaaacaaggacagtgactgaaactttggctcttgtttttcaaacactatttgaaataatacctttacagtttgttgagaaacatacttgttgaatatttcagtaacttgctacttatatgtagagtctctaataattgctaaatagcaatgtgaatgattagtagtcattaattagtaaatggggattaggttgatcattacaacatagattctgaatgagaaaaaggacatatatgattgaaatcaagtaagttttgtgaaaggatgtgatcatattatggtaaaagctttaaaaagggttgagatttagtgtcagatggtattagtgaaaaataaatgggccacatcattttgaaaaaatgaaggaagttcctggggagtaaggtattatttaagtgttttctgtaggtgttcagagttttgttacaacatctaatgtgttaaaatatatttctgaggtgtcagaggatagcagtgatataaaaagtcagacttcttattttcaagaataaggcagtaaatatccatatacatatcttctaattcaacagttattcatgttttcctgtgttcatagatgtttttaggcatggactttttggggggatggcaaactactttaaagtaagtagcaggcttgatgttacttgtcccttaaatatttcaacacatgcctccaaaaacaacatttttaggttaatttcatactgatgaagattcatttcttgaaatcgaagagtccacctcttatgtagcccagcatggaaacatttcattctaagcaaatcatataattcaatgaattgggagtagtcttatactttacaagatcattttgtttccagcagctttcattactgaagtttaaaaattaaaatcatttttctctgttcactttacatgtttttct

SEQ ID NO: 72353 - DNA, 1541 bp, Homo sapiens
tcgtaggccttactaaatttgaaatttgaaatgtcatacatttaaaagttggataaggaattaaattttattaaattaattgtcccacaaaagctgtcccacattaaattgtcccacaaaaggtgttatgaagctaaaaatctttatataacttaaaagtacatagtttcaaagattacactaccatggcaaacaatgtacttaacatgcacacccatttacaaaatcaagtgtgttctcagcatatatagtctatcaaatgaaacttaagtcatgtgtggaatgaacattttccatgatcagcttttttttcttaaacttctgttgccagtttttcaatactactaatcagataatgtagagtcatatattgctgttttacttggtcactttttaccaacaagtagttagtgaatatctctgatatatgcaggaagcaagaaacatggccctcgcccataaagaacttaattgtgaaattactgcagtggatacgtgaaataattaatgaaccaagagtgttctaaattatgaagcataattgagtataatgatgtccaagtggtccaatatttatgtctttttttaagagtaaatgctggggtgctatttaatataatccatgtaattttaaggattttaggaataaggttattgtagattataggcagtttaaaaggctgttatcattattagaatgacattaacatcagagctaaactttaaaatagtataaaacttaaaaccatttctgatggtgcagagatactctgcaattttatcagaagaaatatcagaatatgcctttagagtccttatttagttaggaattgaagataacttaaaatttttgtgacattttattcaccagaggacttacttacattttagcacttaactctcctaaagcccagtttatctaattttctcttcagtcttcattcaatgtgagacttcatcataatggttttgtagagctattaatcattatcatccagttgggttgttgagaagttaaaactgtcataactcatcaagttacattgatggaaagtggcagcagattttctggtgtatcactagtgtgtataaccaaacgaaacctacattataatgctacctttctagtaatcagataatgctaacattttttatatctttaaatttatttatagctatgtggtggaagatgtgaatactaaaagtaaggctctaagttaactgctgttagttggaaatattatttttgattttttatacccatagttgtatagttatattctgaacccaccattgttaaattacattctattaaagagaaagagaggaaaaagaaaacttccgaacccaccattgtaaaattacattccattaaagagaaagagaggaaaaagaaacttagtttgttttctgggggattgttgaggtaagacgcctcttagatactgttcttatattctcttcatgtctagattgtagaaattattaaaaatagctatttagggctatactgagggagcggaaatattcttggttaaagt

SEQ ID NO: 72354 - DNA, 1139 bp, Homo sapiens
agtaattgcttgtgtgggctatctatagtccctggatggaataatgcttgagtagatgaatacaaatacatgaatgaattataatatttagacaatgaagattgtaaccttatttttagcataattccctaaagctatttgtgttatatgttcaaatacatttcaacatgaacttggtaacagtcatttctattttaagacttcagtgacctgggaggagaaaataattggctctggtggttatcattactagattttcctttgcttggaatctaggcatgtgtctttcatctgttggaataaaaacattaaaaataatttgtgatatattttatataatctgattcattagtaatctaatcttgcaatataaactggatgcattaagcatttgtagtatattaagcctgggagactgaagtttcttttcagcattcttattaagtttatgatgatggaaacttttcaaaatttttaatgaaaaatgatgtcccaattcactcttttctttttgattttagatgggaaatgtaaagtcataagatcgataggttgactgtgacaactatgtttacttacagagagaacaggaaatgagaatgggtgatatgggtccccgtggagcaataaacatgggaggtagggatttgaagcaaaaggcttttgtaatttatcatttttggggggactgtttatgctgtttgtggtatctacatatcagtaagaaactaaaatacagaaccaacatttctaaaggtgaaatctcttacatccattaaactggaatacaatacaattatattaaaaatatatgtctgggaagaaaattctcattttgtttttgtttgaaggctaaaagatgtgttatacattcataggcttaatgaaagaaacatataaaccaggttgcaatacagcctgaaggtagtttagtcattgcattgtgtaatacagctctgtctttgcagttttaaaatcaaattttatgccttctatttggctttttttttttttttttttttgaggcaggacctcactctgttgcccaggctggagtacagtggcacaaacttggcttgctgaaacctcgacttcctgggctcaagtggtccttccatcttaccaagtagctgggacta

SEQ ID NO: 72355 - DNA, 2063 bp, Homo sapiens
cttttgcagtccatctattgcagaaagctttttaattaaaacgcatcaaagaagacctgactttatacggagaagtgataagggaggagtatgttaataacctttaaagataattgtggatttttttgatactactgtaaaacttaaaagtactcttacatcgaaattaattgggttggctgggcatggtggctcacacctgtaatcacagcactttggggggttgaggcaggtggatcacttgagctcaggagttcaagaccatcccaagtaacatggtaaaaccccatttctacaaaaaacacaaaaattatctgggcgtgatggtatctgcctatagttccagctacccttgaggctgaggcaggaggattgcttgaatctgggagtcagaggctgcatgagttgagatcacgccattgcaccccagcctgggcaacagagtgagactgacaaaggaaaaaaaaaaaaaaaaagaaatccgctgggctgctttgaattttgaatggattttttacccatgcatgattttttagtgttatgtaccaatcagaagaaaaatactgatgcattggcctaagcagattatccaaaatgctaatgtatttattttacaaaattaaaaagaagttacatgtcttcatattgatctcatagaaaatatccgccaaatactcaagccaataattatagtgtctcttataaaaaccttgttctgtgaaaaaagtatttcattcaacatgcacctcaattatgaatgctttttcttaaaataaccatcctacttcagaatgcagcagatgtactttgtggacaaatcctgttttattgtgaagaacatgaaaaaagcatgtacccatggatagagatttaataaaattaactttgactgcttcctccaggtattcatagtttaaaattttaaactacagttttatccatgtgacaaatgcagtggttactagtaaaaattgggcccaagtctcttggcttgtgctatagtgctgggacttttcctagccattactttcgcaccattaaatgtagtgaatgttgatacagagaaaagtctgatgatagtactataactaactgtatcttagtgctgggaaaacatgaaatagttgtgactgtgcacttcctgagttttggggactcttagtgtactccatgacctacacgttaagaaccgctgcaatgatggaatgctcttttgacatgtggttctgggaattagtcatactttgcctccttttttggtcatctgttaatttaagtacacttgaattcgaagctttcaggaatacatatgtataattctttccatggaaaggcatacaatcttataaataccgcaaagataagttaaaatcttgccttttgttaggcttcgactgttggaattcttttttttttttttttttttggctgtctgggacatggagatatgttggaatttttgaagaatgaaagtatctcgtgaacgtcaaaaattttgtgaactccatttcagtagaatcgtataggttagctcagccacttactatccatatgaccttgactaagttattcaacagctttgtgcctcagtttcattatgtctaaaatgaggtaacagtaggcctacttcatagagttgaatcaataatgtaaaactgagttttcatcataggtttattttagcgcactgcagtcttttgagatgttggttacaaataagttgttttggcttaaacaacaactcttaattttttgtaatgtaataaagcattattaaaatttgtaaaaatatcacgtatacgcactggttctaacttaaattctaatttgaagtgttattaaaagtcattcatagagggaagtaagggttttgtgtattgcttgttgggtgggcacacagttgtgaatttcctcaagtgattcttattaatatttgatagatttagtgttagtgaagaatgctgtatttcattttacaaaatcatcctaatctctacctcttttgcattttactagaagtttgtagcggtggttttctagaaagtaacagcctgaagacatga

SEQ ID NO: 72356 - DNA, 3117 bp, Homo sapiens
attttggaagaaaaatttgttcactgtttcctgtattcaaaacatagtgctgagcactgtggaggatacagaggatgttagaggactttaggtgctgagtacttatacagagtaatgttaaaagaaacagctcaaacgttctgagaatttagaaaatgaaattctctactgagagtgtcattaaatagtcttggtacttttgtgtgtgtatatgtctgtgtttataaaatgatgtgatttgtttattattcctgctgtgttgtaggtatacctcatgtcttttcatttgaaatggtaagttctaataatttttggttcagaatggtaagattttttagctaatgttaactcttttttgagcaatcggagaagaggagagtcaagaccggcaaatagacatggttaactaatgtaaacatatcttgtgcattgtctagtgtataatataactaataataattttaattattagtttgaattagtaacagaagatcctcagaaggcataaaaatttaacttgttacttctgctttgtgacttgtttaatgtatttggagccaccttacagtgcttgttctacatagtgacggtaaattatattttaggctagtcagtatctaagatcttctatacttcatattgaggatagtatctctgtagtatcatctaaaatgttagaattttgtactaaaactaaaaaattataatgtctatgttcagtattaagtaacaactagtgagatgtaggctgtaggaactctggtttgtaagcatctgatgagatgcagttatgagttagattggtaattattataattataaactttcaaaggcttttacttatttgagttagattgataattataattacaaactttcaaagacttttacaattcaaagtaactgaaagtttatgggtaagtttgtttcttttcttaatggtatcttatactatattgtgcactatgtgtcaaaccctggcttttctggttgttttaccatagttttcttaagataacttcttcatttgatttattcttgttttttctatatatgattttaaccaattgatatgattgttacagtagtttgttttataatggcaaattttaaataactttgatttttattttggtaccacttaaatgtgtaaaaaatgactatgtatttaaacctgtagctttgagttagttacttagaagaaaatatgtactaacatcacaatttcaaggcctctggtaaattattaagatgatttatctaatgccgactatcacaaacagaaatggatactctcctgtataaaatgtgtacttaactcatacgttggccatctatgccttgttttcctcttttctgcttttttctgttgacgggaccaatttggaactgctgcttgtgcagtttatatttgttcttttctttcacctttcataccttgacctggccagttatgatggttttactttggtaaggaaatgcactggataagaaagaggttttggatcaagaagtgcaaaccagtcaccagtattatgtgaactttggtaagattttattgctagtattgtttgtcttacagctggtatccttgctcattgttttttttaggagttctgggtaaaataactaaatttgaagaataattaaatactattaatcaattttaggttttaaaagcacctcttcagagtgagtttacacctgacaattgaaactggtaatcttgaaaatgctctcaggtgtatgcattacaaataaaattcttaggagcagtgttgtgtgccttgtagtcccagctacttgggaggctgaggtgggaggatcaattgagctcaggaattcaaggccagctcgggcaacatagtgagaggcccgtctcttaaaatctcagccaaatagaagcttctttaacaattaatttatgtaaaatacttatttccttctgtcccttgatgtgtgctagattgtgtttacatttaattgatcttcggttagaaagccaccctatgtattaaaaaacagccattaattttgctacacattcagttgaatttgacagtaatatcagagcaatctattcactcaattacctgaccgaggctttcaaaatacattgttgaatgtatttggtttaagaggcacatgtcaagttaatgaacacagtaagtttccctacttctatttgtcgttgcctccatttctgatttagtatttaacaagtaacaactactttttgtttcgtgactaaaccttgcagtataaattaagatgtaattagctgggtgcggtggcatgactgtagttccagctactagggagcctgaggcaggaggatccgttgagcccagtgagtataagtccagcctgggcaacatagtgagactcatcttgatttattattattatttttaatgtaattgattattcaaaaggattcattttaaagtttcaatattttagtagcctttttcaaaagagctttaggtccacagcaagattatgtggaaggtacagagatttcccgtctaccccgtgccacatgcctacagcttctcctgctatcaaagtgttttaccagaatgatacacttataacaattgctgaagctacattgacacgtgcttatcaaccaaagtctatcgtttacctttagatttgctctgggtgtacattctgagggttttgacaaatctatgacatgaacctatgattatagcatcatacagagtattttcacctccttaaaaatctgtgctctgcttctctatcccttccacctaacccttggcaaccactgatccttctatcgtctccatagtttagttttttccagaatgtcatatagttggaatcatacagtatacagcctcttcagattggcttctagtcacctggcaatgtgcatttaaatttcctctatgtcttttcatgggttgatagctcatttctttttagcactgaataatattttggttgtaccacagttcacccattcatatactaaaggacatcttagttgcttccaggttttagcaattatgaatcaagctgctataaacattcatgtgtaggtttttgtgtagacataagtttgcacctccttggggtaaaatg

SEQ ID NO: 72357 - DNA, 1121 bp, Homo sapiens
cggcccactccaacccccgcctcccaggttcaagtgattctcctgcctcagcctcccaaatagctgggactacaggcgtgcgccaccacgcctgggtaatttttgtatttttagtagagatgtggtttcaccatgttggccaggatggtctcgatctcttgacctcaggtgatccgcccgctcggcctcccaaagtggtgggattacatgtatgagccaccacgcccggcccacgctcggcaaagtttttgtatttttggtagagatggggtttcaccatgttggtcaggctggtctcgaactcctgacctcgtgacccgcccaccttggcttcccagagtgttgggattacaggtgtgagccaccgtacccggccaaaatccctttagttctagtcagtagaggaataaagcactgttctttcaaatgtgaacccctcttgatcagtattgtccaatctggcctgttctttaaccagtcagcctcttttcctgcctcttgcatgggctttttgttgttgtttctttgtttgttcatctatcatctcttgctttaatcataacctaactttccctgatgtggcacgtgtaaaactgaaaaacagaaactctatctggtaaaaaaaaaaattccattaatttatgctgtcagagaagagtgatcctgttgttatttactaatgaatagatacaaatttattttctgaaatggtttgtgaagattccagagcagaagttacagttttgtggtttccacatggctgtccctctttttctacagtttttaaagctctaatgaggaatttatgttgcttaagaagatttgttttttgaagtctaaacttctgaagcattcaaacaaaagacacattttacaagggatttttatggcctcttcattaagttatggaaataactaaagaattatttgctgaaggatttgatgtcagatttaagtgtgacctgctggactggtaggcttatttatggtataatgatggcctagtcccagtggtttggacatgttggtgaaaatcaaaatggataataacagacattgcaatggtctcatatgtaatgttctagttgtgactagtttcggttgttaatgtttttacttat

SEQ ID NO: 72358 - DNA, 2051 bp, Homo sapiens
aataattcttcatacccttttcaggtttcctgcattgaactaaatatatacctgacttactattaaagcttattagtcccatttgagtagttgggaatagccctaggtgtttcaacacagtttattcaacacacataataaacttgagaataaaggtatgttgtatgctaaggcaacagtttgactcagttgtatttctttgcttgtcagaggcattccattgtagcacccgagggactgtgaggccagaatgattaagggaatgttggcagaggctagcagtgtagtgcttcttccaaggacaatgtaaaacattttttttcttttagagatggggtcttgatatgttgcccaggctgggctcaagcagtcctctttcctcatcctcctgagtggctgagacaacaagcacatgccactgtgcccagcagaacagtgtttttccaatgtacgtaataaacactcaaggagcttttaaaaaatgtgggttcttagatcatactactaataattgatttgttttgtgatccaggtagattgtaatacattgatctttgatcacatttttttgctaaatccagtagttttcaaccttgcaatatatttgtggaacttaaggaaaaatgcctgagattcagtcctccaagtattttgattcagtgtgtctaggttggtaccaggagatatacgtgttaaagaaaactctacaccttgcttatttctttttggtagcgaagattcaaaactactggccttgtattgaaatgagacatactgaaatgaaaatagttgaatttttcatggatcctgggagtgttagtggaaggcatgcttgatgtggttcaacatggtgtaagatttatataggatgcaatttatttatttattgatggtatcttgctgtgttgcccaggctggagtgcagtggctattgacaagtgtgattatagcacactacagcctcaaactcctgggcttaagtgaatcttcctgcctcagcctcccaagtagctgggagagtaggcatgctgctgtacccatctttcttcatttttttctttcttttgattgggtctccctgtgttacccaggctggtcttgacctcctgaagctatcctcctgtctcagtctcctgaatagtgggactacagttgcctaccactgcatatggttatatatccatctttagaacacggttcaaacagtatgacattctacgtgaatagtaccctgcagaatttgggtgtggcaaccttgatttgggctttcagactatatgtgcaggacatattatctcaaactatgcattaattttgcgtgcatagttctaataattttaattgtctcatccagtcgaggggttgacagactagaacagaccaggctcagttcacatgctgcctatttttgtaacacttttttttgtttgttttgttttgttttgtttattttgccctacaaaaactgatttgagtagttgtgacacaactatgtgagactgtattgagactacatggcctgccaagcctaaaaaatatttacacctgaccctttacctgaaatgtttgctgacctctgaatccgagagttgaagggaatctataaaagtggctcatattaccaaactcgtagagcttgtgaagaataatgcaaatctattcatttatatattcttttccagtgtttttagaaggctcactgagcacagtacctcatattccagatccaaggattcctgaggaatccaaattagtatccagaaggttcattggtagtcatggttataaaccagagcaaaagttaatgggaagaaatggtaaagagtcactgcattgcagctgacacctgggattttaaaatctttttttcgtttttgagatggagtcttgctctgtcgcttaggctggagttcagtggcgtgatcttggctcactgcaacctctgcctcccaggtgcaagtgtttctcctgcctcagccttccgagtatctgggattacaggcacgcgccaccacgattggctaattttttatttttatttttatttttat

SEQ ID NO: 72359 - DNA, 1031 bp, Homo sapiens
ggaatatttatgttttttaaaaaattttaaaattagtatttatggtagatagaccacaaagttactatgctcttaactttttgggatatccgtatttcaaatagtatgtaaatgaggtatgataattgtgtaacactgactagtgttctataagtttatttgtgattagaagtgatatgaatctacacaagtttttcattattttggtgtcagttttatttggttccaagcttcacagtgcctcttactactgcaaacttaagcactaaaagcaatatgaatgaaagctctacctatctcaaatattttgtgttaatgggagtatattaataggaaagcattgtattaagaatgcattgaggccattctggcagttgttcttcatttactttgaaaactgtctttggagaaaattgttaaacaattttaatgctgtgtgtgtgtgtgtgtgtgtgtgtgtgtgtgtgtgtgtgtgtgtgtttaagctttgaaattaggccctcttatgtgctttctctttatttcactgttcagtttaaagggaggaatcaaatggtaagtgttcaacttgtccaagtaatgagtaaagttgattttctttgttaattttaagatgccacctctctcttcttgccttcctaatagaaatattccaacaaaactaagagttatgggacttttaagtataaaataaatattgatttacatatttcacattttaaataataatttcatgtaacaaagaaagagtgaaaacacttgtcatatctggtcatctttttgtttgtcagccttcaacttgatcataattttatgacacatgggaatatatttttaagagtttcaaggatgtaagccagtacttcatcaatatcagttgtcagttttatttaatacttgatttttccttagaagacaaactttttgataattactgttgtaactataaattaaacaacattttttactcatttaggataacattcaactgccttaagaatgtatacattttaataatatgtcttaattgc

SEQ ID NO: 72360 - DNA, 1554 bp, Homo sapiens
ctcgcctcaacctcccaaagtgctgggattacaggtgtgagccaccatggctggctgagattttttcctttctatagtaagagagtacatgtttcagctttttttgactctcaatttcttgaatatacgcaaataactatcctagttatgattttactttgtttttctggtttaccttagctaagttactttatttctttggcttttttgatttattaaaggcttggagtgacatagaaggaaggtaaatttaggatgccgtggtcagtcgtgattacaggtttggcataatatgattgcataaatgatttcattttacatgaagtaaaatgtccaatggcagcccacatgttatgatgctgaaatttttatttgaaaaattttcagacatgaagaggagcatcggcggcgtgaggaagaaatgatccgacacagagaacaggaggaactgaggcgacagcaagagggctttaagccaaactacatggaaaatgtaagtaaactactagttaactaaaatgattttatattttcaggtttatgatgcatatttagaatgctttagattttggtttatacagtagtcttttctaatctttctaaattcatcatgtttgataaattagtgattttcttaacctctcataggtggtaaagtaaaattagtttctgaagatatctatgttttatgaagtggatgttatattttttcctattattttggttgatctttaaaaaaacatatgctattaagttagaaatcttgatatatacatcatttccacttgactgattttcaccacatactaatattgaaacatctctattttggaagatttcagacatgtacagaagaattgtagtgaacacttataaacatatggccaatcttttacatctttaagtataaccactttatttcccaatttatgttatttgaaatacctgatttcatataattttattttcagtatgtatctctaaaagatgaggactttttaaaaaaatctttatcatattttaaaaatggtcagctctttcatcttaactaattaaagcccagatttgcacaggtcttaatttttttttttttaaacatttggtttctttgaattgactgttatatccagcctcttttagtctataggttttctcttcctgtctttaatattttagtaaccttttttttttttttgagacggaatcttgctctgtcaaccaggctggagtgcagtggcacaatctcagctcactgcaacctctgcctcccaggttcaagcgattctcctgcctcagtctcccaagtagctgggattacaggtgcgcaccaccacacctggctaatttttgtatttttagtagagacggggtttcactatattggccaggctggtgtcgaactctttacctcaagtgatctgcccacctcagcctccaaaagtgctgggattacaggtgtcagccaccatgcccagccgacatttctaaaatagatcatctattgtttcataagattatgcttatagaaaagcattaggtgacaatataccttct

SEQ ID NO: 72361 - DNA, 1161 bp, Homo sapiens
tttcccctaacaatgaacttgtttttgagatggagtcttgctctgtcattcaggctggagtgcagtggcacaatctcaactcattgcatcctccacctcccgggttcaagtgattctcctgcctcagccttctgagtagctgggactacaggcgcgcgccaccatgcccagctaatttttgtagttttggtagagttggggttttgccttgttggccaggctggtctcaaactcctggcctcgagtgatacgcctgccttggcctcccaaattactgggattgtaggcgtgggccaccgcacctggccaagaatgaacttgaatactcttttttatatacgtgaagaaacgtgctcagaaaggatatttatttaattacccagcttacattattataaaatgagtaatataccaatatattgccagtgatagagaacttctatgcttattggtataaaaatatggaaagggaaactaaaaatattaatgtgcagtcattattttatagatctaatgaggcgtcaagaagaactcagacgcttggaagaactcagaaaccaagagttgcaaaaacggaagcaaatacaactaaggtaaaagaagatcattttaagaaacatgaattgtatgtcttattaataaaaactccccacaacctgttacaagttgtataagttgagtatcacaggaaaaatagaaaaattgcccattttaaccacatacagtgaattacttcataatgtagcataattctttgctggtttttagctggttaagggcactttgaatgctaaactttgaagttaaacaagggttttaggtattattatatgtaatttattataagaatatgctgtgaatatccatttttccagagatggatatatttgcgttgctcttatttattttgttatgtgtaaaactctactatgaatatctttatgtaactttgtgcttctgataatctttaaacaagatttctgaggctgggggcagtagctcatgcctgtaattccagcactttgggaggctgaggtgggcagatcacatgaggtcaggagttcgagaccagcttggccaacatggtgaaaccctgtctctactaaaactaaaaaattagctggctgtggtggcacgcgcctgtaatcccagctactcagg

SEQ ID NO: 72362 - DNA, 2034 bp, Homo sapiens
caagaccagcctggccaacatagtgaaaccccgtctctactaaaaattacaaaaaataagccaagcatggtggcggacgcctgtaatccgagctactcgggaagctgaggcgggagaatggtgcgaacccgggaggcgaaggttgcagtgagctgagattataccattgcactccagcctgggcaatactgtgagactgtgtctcaaaaataaataaataaataaataaaaaagtgaaaaaaaaattgactggggaccaggtgtggtgtcttgtacctgtaattttgcacttttggaggctgaggaatgagtattacttgaggccaggagtttgagatcagtcatattttttatatgtctctaaaataaatatttacatatatatgtatatatgaaaaaaatgaagactttcaaatatattcatagccctttatttggtaattcgttaatttattcaagaaatgtatattaaatgtatatactgcactctaggtacttgaggtggtggtacagcatttaacagccacatttgatgtcgtcaattgagtttaaagtctatcaagagaaagaggtaataaataattaactacaatggtagtaagttaggccttgatttttggggcctacccaattaattggcacataacgctcagtaaaatctagctggttttactagaaaaacatctgatccagacagttaattcatattcatgtgttccagactttcctttgtaaaatatttcttttttttgggacggagtctcgctctgtcacccaggcaggagtgcagtggcaggatctcagctcactataagctctgcctcctgggttcatgccattctcctgcctcagcctcccgagtagctgggactacaggtgcctgccaccacgcccggctaatttttttgtatttttagtagagacgggatttcacaacgttagccaggatggtcttgatatcctgacctcgtgatctgcccgcctcggcctcccgaagcgctgggattacaggcatgagccactgcgcccggcctgtaaagtattttgttgactgaaaaccagaaaatgaaacctccaaaagcagaaattttgcaggtaataattaggagaatgcaggttgtggcatcagattgtgtaagtttgaattattgttccattattagttgaacattcttgggcagttcttaaactcaggcctgtaatcacaatattgtcacgaggtaattcatgtagacacggtgtctcacacggtgtcttggacattgtaagtgcttgttgttctcatttgttgttgttttaccttttaagcatacatttctgtatgttttaatgttaatttagggaaagagaacaaccaccacgttttgctcaacctgggacatttgaatttgagtatgcatctcgatggaaggctcttgatgaaatggaaaagcagcagcgtgagcaggttgatagaaacatcagagaagccaaagagaaactggaggcagaaatggaagcagctaggcatgaacaccaattaatgctaatgaggcaaggtaaatatggattttcatgtacatgtggtatgattttttttttcccttaagtgtgtgtaccattcatgtactactgtgtaaagtgccatttaggagtttagaggtaaagttggaactcaacatattaggtgtgaaaatctcccttttcccagataacttcccttaaaaaaaagaacacaacttactaaaagttagttttacttgacgggcgcggtggctcacgcctgtaatcccagcactttggggggccaaggcagatggatcacctgaggtcgggagttcgagacctgcctgaccaacctggagaaaccccatctctactaaaaatacaaaattagccagccgtggtggtgcgcacctgtaatcccagctagttgggaggctgaggcaggagaattgcttgaacccgggaggtagaggttgctgtgagctgagatcgcatcattgtgctccagcctgggcaacaagagcaaaactgtctcaaaaaaaaaattaa

SEQ ID NO: 72363 - DNA, 1036 bp, Homo sapiens
ttaaaattttttatagagacaggatctcgtcatctttcccaggctgatcttgaatttctgggctcaagccatcttccccgcctctgcttcccaaagctctagaattacaggtttgagccacttcgccgaaatgttttaggtcggattttcagctttaactttttttttttttttggtgacagagtctcactctgtcgcccaggctggagtacagtggtgcgatcgccactcactgcaacctctgcctcctgagttcaggcgattctcatacctcagcctcctgagtagctgggactacaggcgtgtgccaccacgcctggctaaattttgtagttttagtagaaacggggtttcaccacgttggccatgttggtctcaaactcttgacctgaggtagtccgcctgccttggccttccaaagtgctgggattacaggtgtgagccactgttcctgctggccaacatttttaagaactttctgaacaatactgatagatacagggaaactgggtggtgggtacagatgggtgggttgaggtggtgggacatgttgatgataaagatatatatttagaaaatgtctcacttgagaaaaatgtctcagaagtatcatttgtactcataaaaatcaatcaatagctgaagcagtggctgtgatgatgaccacacatataaaacatgggttaggtacaaattcgttttcattatactttctaaatgttaactataaccgttatgctggttcataattgttgctttatttactcatctttttgtggcttttgacattcacctctctctgactcagtaaatgtttattgactgatttttttttttttttgtgatggagtcttgctgtgttgcccaggctggagtgcagtgatgcgatcttgactcacttcaacctctgcctctggggttcaagcagttctcctgcctcagcgtcctcagtagctgggattacaggcacacaccacaatgcccggctaattttttgtatttttactagagatggaatttcaccatgttggcctgg

SEQ ID NO: 72364 - DNA, 1342 bp, Homo sapiens
gcctcctaggttcaagagatctcttgcctaagcctcccaggtagttgggattaaggcacccgccaccacgcccagctaatttttgtatttttagtagaggtgggatttcaccctgttggccaggctggtctcaaactcctgacctcaggtgatccgcccgcctcagcctctcaaagtgctgggattacaggggtgaaccactgtgcccagcctctagtcaagttgttaatatgtgttcttaatatatgtaggagattttaaaactatattgctttgaatatttaatagttggtaactggccttatgaagagctaatctttaaatgattacttttaacaaaacaatggagttgggaccttttaattaaaatgtttaaaatgatcattgaatagttaaaaaccatgtgataccaaagttaaaagatacaaaatcaaattgaccctgtcagccatttgctaaagatacctagttctccctagaagccaaacactgttttgaattttttctgttactgtcatcttttaaaaatgttttttcttcctaaaaaggaatccagaaccctggctgaaattgcaaaagcagagctggacggcaccattctcaagagcagacctctacggattcgcttcgctacacatggagcagccttgactgtcaagaacctttctccagttgtttccaatgagctgctagagcaagcattttctcagtttggtccagtagagaaagctgttgtggttgtggatgatcgcggtagagctacaggaaaaggttttgtagagtttgcagcaaaacctcctgcacgaaaggctctggaaagatgtggtgatggggcattcttgctaacaacgtaagttttaaatatcttgtccttcttctatccagttacatatgggcttctctctgttttggaattctgtctttcattgcagttcatactagcatatggtaagtaggtgttgagtaaatattcagtgaatataaataagaaattttcgtgtactggtaggagtcaagagtcatgtactttcttcaaacttcagagtttaaatctctgcagtgttttgtattatttcatttaacttaatgaacatatatacaaagtaaaatctataaacttaaggtaatcctttcagaaattgtaatcagctttattgacacctaatttacattaataaaaagcacctcaggggtgcagtggctcaagccccagactttcagtgcgcggatcacctcaggtcaggagttcatgaccagcctggccaacatggcatgaaaccccatctctactaaaaatacaaaaattagccgggcgtggtggtgcatgcctgtagtcccagct

SEQ ID NO: 72365 - DNA, 1099 bp, Homo sapiens
aattgagcttgatatctaaaagggtaaggatgtttactcaagtcattgtattttcacacactgctgcacacatcacataatttgtcccaagagtacagccaacaacagttttgatattttagcaggatgggaaaggacgtcttcaccctcctaggagatttgtcgattgcacgcgcagcgttatgcgcatgcgcggtcagtcaacggtccgttggtgccgcgagtgcgcaggcgcgtcgttccggcgccggctttggcggaggggtgggacttgcaccggcgtctcttcttctaactgcagtttgtggcagcgccattttgaatgtgcagctgcagcgggcgtgagttgggggaggacgggttgccgactcgcctacctagcggtctcttgattgtcgatattttgttggcataggtttatgtagagacgtatacatatatatagacacactgtctataaatctaggcctgtatccggtgtccgaggcgaactcagtaagatgatgttaagaggaaacctgaagcaagtgcgcattgagaaaaacccggcccgccttcgcgccctggagtccgcggtgggcgagagcgagccggcggccgcggcagccatggcgctcgctcttgccggggagccggcaccgcccgcgcccgcgcctccagaggaccacccggacgaggagatggggttcactatcgacatcaagagtttcctcaagccgggcgagaagacgtacacgcagcgctgccgcctcttcgtgggaaatctgcccaccgacatcacggaggaggacttcaagaggctcttcgaacgctatggcgagcccagcgaagtcttcatcaaccgggaccgtggcttcggcttcatccgcttggtgagtgtcaggcgcccgcgcgagggaacaaaaggactgtcggggtggccgcggggtcgtggggctgaggccagcctcgtcctaggacgctgtctcaacctgtggcaaccgtggcgccgctcggcctcatcgattcctctgtgcggggttggccgcttccccagctcggcgcctttggtttcgagttcacggtcccgggatttcctgcgctcacagtggccgccgtt

SEQ ID NO: 72366 - DNA, 1084 bp, Homo sapiens
gactggagtgcagtggcgcgatctcagctcagctcaacctctgcctcctgggttcaggcgattctcctgcctcagcctccagaggagctgggattacaggcgcatgccactgtggcccggctaatttttgtatttttagtagagacagggtttcaccatattggccagacttgttctcgaactcctgacctcaaatgatccatccaccttggcctcccaaagtgctgggattacaggcatgaaccaccgcacccgaccgtcgtcgtctttttgattggcatttctttgatgcctaatgatgagcatgtgcttattgagcatttgaatatacattaatttttaaaagtttaacctaaaataaaattataatcctctttgtcctcagatgatggaaacaaaatcaaaaaaattaacagcatcagaaaatagaaaaaggaatgcttttagagaagaaaatgagaaacaattatatggatcgtcaaatacacttttgaaaaaaatagagggaatcccagaaaaaaaggaaaagacttcacagctacagctttcagtagaatgtggcacggatacattactgatccaagagaatgtgaatttacctccttcttccacgtcaaccatagctgatacatttcaagagcaactggaagagaaaaattttgaagactccattgtaccagttgtgctttccgcagatccaggtacgtggccccgaattttgaatattaaacaacgggacactcttgttgaaaatgttccgcctcaagtaagaaattttaactttccaaaagataatacagggaggaagttttcagaaacttattatacacggattcttccaaatggtgaaaaaaccactagatcctggttactttattcaacctcaaaagattctgtgttttgtctatattgcaaactctttggggaaggaaaaaatcaactgaaaaatgaaaatgggtgcaaagattggcaacatttatcacatattcttagtaaacatgaagaaagtgaaatgcacgtcaacaatagtgttaagtactcaaaattaaaatctgatctgaaaaaaaataaagctattgatgct

SEQ ID NO: 72367 - DNA, 1107 bp, Homo sapiens
tgtgcctgtgtgccaggcattacttttatgtcatgtgttcttcatagcactctgatgagttaggtatcatcaattagtatatttgtataatattacattcaggagatctttgaacctggagtctgacttaagagccgatggctaccacattacacaattccagacgccaacatttactttattattattgttggcacagtggagtatcattcacttgagatacaaagtggatagtccccctgggattgtgcatcaagagtgtttggccttaaccacatgtttatacgcctgccccacttgtctcttaaactcttaaatgaaaatgcaagttatttttctgatgtacattttgatttgttccatgatttttttcttgtttcatttttaagattcttggatctcccagtcagcttcatttcccagtaatcagaaacagccaggggtggattctttatcaccagtggccttacttcgtaagcagaatttccagcctacagcccaacaacaacttactaaaccagctaaaatcacttgtgcaaattgcaaaaagcctttacagaagggacagacagcttatcaacgaaaaggatcagctcacctcttttgctctaccacctgcctttcttccttctctcataaacgtactcaaaacacacgaagcataatatgtaaaaagtaagcagtacctttcaacatttctccacatagttgaatactaatggtataaataagtactcaatataactgcagagctggatagatttatgggtagaattgttgcaggagtgtcttcaagtttattgagcttgagctcctagaatatatccaagctgtggactcgtatgtgctgtatttactctcggcagaaaaatggaacataggtttggaaatcaattgcccctctccctgctactacatttgcctcccctgctcccccatcttaacaccttagttctatgaatttattaccagcattttggtttgttggtttgtttttgagacggagtctcactctgttgcccaggctggagtgcagtggcacgatttccactcactgcaacttccacctcccaggttcaagcgattctcctgcctcagcctcccgag

SEQ ID NO: 72368 - DNA, 1862 bp, Homo sapiens
tttttagagccctgagtttaagtcttactcccagtgttatgtggaacaatttagttagcttccctaggcctcagtttcttgaactataagagtaaattatagctactatcatggagttttgataattttattttctgtaaaaagcccattgcataatatctggcataaatggacttaatgctttctgtacaaggacaaaaaagatgcataaagataattacataattattttggaagaagtgattttggaaagaaaacaatggcaggagacacttgggaaatagggccatatcataaatgctgtagtaggtaaaagcatatggaatataagtgattatattaggaccctaagttattggtatttaatttaattattttgttactattttctaattcaaaggaaggcaggcattttttcactataaagagtgaataaagtgagtactataaattgattagaattttttaaaggactaccaaaattatataattaatttccatcaagctctgaagtaaacattagttaacagtagaggaaaaacaaaatggatatcaggtatcacaaaaaataatttgaaaaatttgcttgtgctattttattgtagtaaaatgcaaaaaccataacatactagaacttttttttttcttttctgtctctacaggttcattggcatggaaaaatgttcagtgggaggattagagttgactgaacagactcctgctttattagggaatatggccatggcaactagtctcatggacataggggattcatttggtcatccagcttgtcctttagtcagtagatctaggaactcaccagtggaagatgatgatgatgatgatgatgttgtgtttattgaatctatacaacctccttcaatttctgctccagcaatagctgatcaaagaaacttcatatttgcatcatcaaaaaatgaaaagcctcaaggaaattattctgtaattcctccttcttcaagagatttggcatctcagaaaggaaatataagtgagacaattgttattgatgatgaagaggacatagaaacaaatggaggagcagagaaaaagtcttcctgttttatcgaatggggacttcctggaactaaaaacaaaaccaacgatttggatttctccacttccagtctttcaagaagtaaggtaaatgcaggaatgggtaatagtggtatcactacagaattgactctgaaatacattattactaatgttacaaccttagaaacaggtataagctctgtgaatgctgggcaagatgtgaacataattattacatataaaacatcactatagaataccaacttgggagatgtcgctaaaggacttcagtcaagtaattttggtgttaatatacaaacgtacaccccatctttaactccacagaccaagactggagtaagaccttttaaccctggtagaatgaatgtggcaggagacttatttcagaatggagaatttgcaactcatcatagtcctggtaagcagtaagtgatactgtttctacctcaagtaaataagcctttggctgttctttttagtaaagctcatatctattttattcacattctgtggctttgctttttttgtttgcttgtttgtttgtttgtttttggagaccgagtttcgctcttctcacccaggctggctggagtacaatggcgcaatctcagctcattgcaacctccgcctcccaggttcaagcgattttttttttcctgcctgagcctcctgagtagatgggattacaggcgcctgccaccacactcggctagtttttgtgtttttagtagagatagggtttcaccatgttgaccaagctgatctcgaactcctaacctcaa

SEQ ID NO: 72369 - DNA, 1131 bp, Homo sapiens
gggggcgggttgggcgagggaggggcgccccggccgggtcttcgctgtcaggaccgcgctgccaccctgccgccggagccgaggtccccaggtttttcgggcgagggcttctgcctctgccccgctgggtcccctccttcgctcatcttttcccaggcgctgcgcggcttttactctttgctgctgatctgggcgagtttaatggcggatctggggccctgtcgtcgactgctggggccccagggcaacttcttgaggcaactgtgggcccagaggtgatgcgcgccgcccgttacctctgaaatggtgcttggagtgacagagatgacgctgggtgggcaaatttaggagggaatacaaatcccttgctggcgtcgagacgacgtttacccttccctctcccgtcctgggagcaggcctcggatccccgagcccactgcatccccagtactgcagttggacgaagcacttttagctttgtctcgtcgttgcggttcctatagttcttttttttcaacttagtttctcggtaacattagggtgggggagggtagcagagcccaggaactccttggcctcttacccctttgccacctcacggtgttgagttggttgtgcatccagattggttgtaccgaaattggttttcaattctcattctaggaccaggaatcaccttcaagcctatgtcgtgaggctttggcagaaattaagaaggaaatatctccattgtgagttgtttttttttttttaccccgctttgctgtctaatataattagtgcagtagtagggtgttcttcctgagggatttgcctttgtgttatcttgaaggccttggccttcaagctaattgcttgggtgcccctgtccccagagccaagccatggtagtccctgggaaggcacggggagtgctgacatttataccactggaactctctcaagttccagaacaagatttaaagttagctctcttttaagtgccttgaatttaacaattttttcttttccagtagattggaaaaacttttttactgttggattaaaaagaaacactactgaataatctgttgttttgacgttgatatttgccttgtatttgaggaagactgttatttatgtaccctgaca

SEQ ID NO: 72370 - DNA, 1031 bp, Homo sapiens
aatacaaatcccttgctggcgtcgaggcaacgttttcccttcccccctcccttcccgggagcaggctcggtgtccttaggccccctcccttccagattttgcctttcacatgggttttggccccaaatatgtattttgcgctgttttgccccacttacgcaggagggggctgttgtgcgcatggtgggggtaataatagaaggaccgaacctccttgacctcttattcccttctctgcctccttctggcagaaagggttgggttctcccaccaggttgtgtgtttttgatacatttttcttttttcctcctatcccaggaccaagaatcgccttcagccctgtctggtgcatccttggcagaaagtgaggaggaaaacacccccattgtgagtcctttgcccctaatttgttgctaatagaggacattgtcaggttgtaggggttaagctatgggacctggccctccccgttgttttgagggggaggagctttcccttgggtggcagctgcccccagggcgaagcctgggtaatggctggtgaggcagctgggagtgggcgctgctgtttccaccgctgcagacatcgctcctgctgctgcaataccaacctcagcaaccagacgacgggcttctgcagctgctcacgttacccgggaggaggggtggtgcgaaggagggcatatttctggtgccctctagagttccaaaatgggaattaaagttatttcttgttgaatgctgtgcatgcaacctgaacattttttcttccttaaacaatggctaattgattgaaggaattggaaacatagaaataatcatttatatttttgtttatgtctgctggaaacacatattttgacacttatggctcatgagttgctagatctttttcatgtatttgcttaggaaagggagtcaactcctctagtactatcttgttcaccaagtagtatgctgatcagtccagtgtactgatctagttaatttcttcgttccccatcttccatgttgatcatctttaacttaacg

SEQ ID NO: 72371 - DNA, 1418 bp, Homo sapiens
aagggaaaggattatagcatgtgactttatatgatacagtgaataaatgggataagtgtataatgaagtaattattttttgtcagattttgattttttttttttcctgttcagatgtgtgggaggatttatccatatttttagtgataaattttatggagtaaatagtgtacccctgaaaggaggtggtggtggtggtaggaatatattgcatatgattaccatgaatatattgcatatgattaattatccaataaaaattggataattgccttccttgttatcctgcaaaagttaacatgtaaactatatgaaatgattaatgaatggatatcacatattttcctgaatgttagacaagaatcacttcatttagaataaaaataaaataaaagtaccctttaaatcaatggtttcagttagagtaacataaaaagtcatactgacattttaattcttttttctatcttcctaacaggttctttggcatggacacaagttcagtgggaggattagaattgactgatcagactcctgttttattagggagtacggccatggcaactagtctcacgaatgtaggaaactcatttagtggtccagctaatcctttagtgtctagatctaataagtttcagaactcgtcagtggaagatgatgatgatgttgtttttatcgaacctgtacaacctcccccaccttctgtaccagtggtagctgatcaaagaaccataacatttacatcatcaaaaaatgaagaactacaaggaaatgattccaaaattactccttcctcaaaagagttggcatctcagaagggaagtgtaagtgagacaattgtcattgatgatgaagaggacatggaaacaaatcaagggcaagagaaaaattcctccaattttattgaacgaagacctcctgagactaaaaacagaaccaatgatgtggatttctccacttccagtttttcaagaagtaaggtaaatgcaggaatgggtaatagtggtatcaccacagaaccagactctgaaattcagattgctaatgttacaactttagaaacaggtgtaagctctgtgaatgatggccaattagaaaatactgacgggcgagatatgaacttaatgattacacatgtaacatcactgcagaataccaacttgggagatgtctctaacggactgcagtcaagtaattttggtgttaatatacaaacatacaccccatctttaacttcacagaccaagactggagtaggaccttttaatcctggtagaatgaatgtggcaggagacgtttttcagaatggagaatctgcaactcatcataatcctggtaagcagtaagagatactctacttcatgtaaatgaatttaaacttttggctgctgcttttttcattgtagtaactggtattac

SEQ ID NO: 72372 - DNA, 1027 bp, Homo sapiens
ccgacataccctttttttgtgctgagaacacttaaaatctaatgttaactattttaaagaatgtagtgcattgttaccgtgacattcttactccaaaacttgtgctatatacctctctgctatgttgctgttccattaacatcttaaaattgtacaaaatgggaagttaatatttctctgatataaattttaatatgtataaacaaacacttgtttcattattctttcttgtgcattttgtttttaagattcttggatctcccagtcagcttcatttccccgtaatcagaaacaaccaggggtggactctttatcaccagtggcctcacttcctaaacagattttccagccgtctgtccaacagcagcctactaaaccagttaaagtcacttgtgcaaactgcaaaaaacctttacagaagggccagacagcttatcaacgaaaaggatcagctcacctcttttgttctaccacctgcctttcttccttctcccacaagcctgctccaaagaaactctgtgttatgtgtaaaaagtaaggtttacctttcaacataattacatatagttgaattttggagttgtaaaattttaagaaaagtgaaacagatttgtaatacctttggaaacttccctatcaagtccaggtggcatatggataaaaggcttcctgtttggatggcattggagttgatttagataggtccttataattaattttgtctgtaatctccattggactctttgattttgtaacaatacatacttatttacatgattaatgagaagaaattagttcttatagccaaataaaaatgctaagcagtttatgcgtgattctgtgttaaaattggttaaattttaccctgtcttcagatcaagattataaaattggcaagtctttggattttatatgtgtttgttttgaacattaagtcattagaaatagtatttcaagactcaggtaccaatttttagccagccttagaaaggcaggatcctctcttctactgtttttttctttttct

SEQ ID NO: 72373 - DNA, 1787 bp, Homo sapiens
tacccaaacttggttttctgtcatcttctgatacctctagagaagtttgtagtgatgtcactgatgggtttttttcttttttcagtgccatacatgtgttcctgtgtgtataaaaacaatttaaataattatgaaaatggggccaggctcagtagctcacacctatataatcctagcactttgggaagccaaggtgggaggatcacttgaggccaggagtttgaaatcagcctgggaagcatagtgggaccctatccctacctaaaagaaaaaacattagttaggcgtggttgtgtgtgtctatagtctcagctactcgggaggctgaggtaggaggattgcttgagcccaggggattgaggctgcagtcagctttgatggtgccactgtactttagcctgggtaatgagtgagaccctgtctttaaaaaaaaaaaaaaaattttttttttccttttctccaaacaagccttattaggacatctttatttctgttcagaatgctttattatttagctacttgtcagattgatctgttttgtaagattttgtttatttttcttttagattcgccatgaagtcagctttaaaaatatgactcataagctgtgcagtgaccactgctttaatagatatagaatggccaatggtttaataatgaattgctgtgaacagtgtggagagtacttgcccagtaaaggtgctggaaataatgttctggtgattgatggtcaacagaaaagattttgctgtcaaagttgtgtcagtgaatacaaacaggtaattcatgttctaatcaaaattgggcattctttagaatgttcttgaaagtgttgtaatacttttactctaacagtgtttattaactggctttatcttagaatttcatttaattccattattgttgtcatatcatggagcatactgaatgcatagtgctttgtaccattaaagctgaaccatcgtaagtcagggaccatctgtatttattcatttgaggtaggtcatttccgtgatataatgatggagttaagtctgggtaaacccgttgtaagttggaaatgtcttagaatgcacctttgacctaggtattttcaacttagaatgggtttatcaggatgtaactccattcttagggaacatctgtgtatgtagattattggcagtaaatttaagattttacatataatggtaaatgctatcagaatgattcctcttttgaatttatttcctctttgggagttggagaggggctgcaaatatttcaaacttttaaacctcggcttgaagtggtcgtattgtttatatttaaattttaaggttaatgttgttatcattttttttttgagacggagttttgctcttgtttcccaagctggagtgcgttggcgtgatctcagctcactgcaacctccgcctcccaggttcaagtgattctcctgcctcagcctcccaagtagctgggattacaggcatgcgccaccacacccggctaattttttgtatttttagtagaaacggggtttcaccgtgttagccaggctggtctcgaactcctgaccccaggtgatccacctgcctcagcctcccaaagtggtgggattacaggcgtgaaccactgcacccgtccaggttaatgttattttaaggactttttgatttctagttttattccattgctcattggaaaggtagtctgtgtgatttcaatcttcataaatttatttattaaatgttttatcagaaattattattgctttaaagatctttttgttgtctgtggagaag

SEQ ID NO: 72374 - DNA, 1608 bp, Homo sapiens
atatttggacagttaaaaaaactttacaacgtaattaatttttgcataaatactcatttgatgtttttatgcttgtttttaacagctttttattttatattaatctttttgaaaactgttctaattattttgattattctgtactacttttttagttctcttcatgtctatgttcttaactaaaattgttactccatctaaaaaattacccaaaactgagttttttctctatatctatgtatgttttagtggcataatatcagagtccgttatgacaatattttaaaagtgcacataatcttcagtattgaaggtgcaaataataatagtttattttttaacagaaacttctatgatctcagtagttaagataaaaaaacttttttattactttataaacaaatcagatatgtaccttttctttcctaggtttgggaattatttgccatttttgtaagcgaaactctttacctcaataccaagccacaatgcctgatggaaaactgtacaacttttgcaattccagttgtgtggctaaatttcaggtttgtcgtttattttgcataacccatgcccccaataaaatacacatagaaaataatcagtgtaatataatatgctttattttatcttaatttttacgtagcttgttgagggtcaaattggaaggtggatatcctagtcacagaatatgtggctgtaccagttttctattttagcctggatagtctaattgagattataattattactctgatacagattttgaaggaaaagaaattttaatatagttcagtgctgatgtgtagttttttcttattagatagtttgaataaaatgtgaaccgtaaggggaactgttatgtgacaaacggatagaggacctagatgtatttagcctagaagtgataagaatacttgctttcttcatatgttagaaatggaccatgtaaagagggaattagattttttacactaggccttaatttaatacaagatcagtttagggagacatttttcattttggtaaatgtaaagaaagacttgctaacatagtttttcaaatttggagtatggatagtctcagaagatagattcttggaagcgttcaaacttaacctggttgaccactaggaaggaatagtttagagggaattcaagcattagttaggtgatacgattaggtttacctgttgtgtgtgaaaatttcagggtattacccaaaggttcaaacccgtgcataaagccatgcttcatgagttaattcatccaacaattctgctttattccaggtactgtgctctatgttaatttatttaaactgcaaatatagtttcttaagtataatagttactatatcacttattagtatttaaattgaggtgtttttgaattcaaatgaatgtcagtttttgttaatagtaatattctcactgagcttaggtgataaaccacgtttaagacttaacttgttatttcagaagttgggatcatggccattgatacatccttacagtggtagatattgcttttgccttgttggcttttcttaaactagaaattaaggaataattattaattagaagagaggaagacagtgtctatagca

SEQ ID NO: 72375 - DNA, 1050 bp, Homo sapiens
agtagctgggattacaggcgtgcgccaccatgctcagctaattttttttttttttttttgagacggagtctcgctctgtcgcccaggctggagtgcagtggcgtgatctcggctcactgcaagctccacctcctgggttcacgccattctcctgcctcaacctcctgagtagctggtactacaggcacctgccaccacccccagctaattttttgtatttttagtagagacggggttttaccgtgttagccaggatggtctcgatctcctgacttcgtgatccgcccgccttggcctcccaaagtgccgggattacaggcatgagccaccacgcctggcctaatttttgtagttttagtagagacggggttttgccatgttgaccaggctggtctcgaactcctgaccttgggtgatctgcccgccttgacctcccaaagtgctagaattacagatgtgagccactgcgcctggccaacataggcctatttcactggtagacttggaatgaaaattatagtagggatgcagtggcacaaaacattagtaaattagatatttgatgattattggagatagcaataagaactaggtttttgttctttttgtttttttaaacttctgttagttcagaacgtgggcaacttaacctcactattatttgcttactgttacttccttacattttcttaagtgaacagatgatgattgaatgtatgattttttcttattttaggtaaataataattctgtggttaaaaattaaatttaatttcaattttataaaactaacatatactataatttttaaggacaaaatttggaaatgagttttatgtgctgaaaagatatctaagcaagatgtatattactttctggacatcgtagatatatgacagtaatcacaaatagaaattcaaacatacatgtcaggcttagtatcttttgttctttgttttaggctctaagtatgcagtcatctccaaatggccagtttgtagcgccaagtgatattcagttgaaatgcaactactgcaaaaattccttttg

SEQ ID NO: 72376 - DNA, 1468 bp, Homo sapiens
caatctctgtctcctcagttgaggtgattctcctgcctcagcgtcccaagtagctgggaatacgggtgggcaccaccatgcccagctaatttttgtatttttagtagagacggggtttcaccatgttggccaggctggtctcgatctccagacctcaactgatccgcccacctcagcctcccaaagtgctgggattacaggcatgagccaccatgcccggccataattgtgttttaataaaacaatagtggcctatgaatcccactacaagtttattttcttttcccttttttcattagtttactgatttgctttgacatgtctccattagcaataacgctgatgattgacttttatttcataagggggcagtaatagatggatacatggccaagactgcccaggctgcccattgctttcttgagcaatgcttgcctttggccattgtttcttttcactgctttaggggtggggcagggtgggaggtagtgcatggagtatatgataaaatggtatacaagatttagaagatgtagtattaacactgttcttgagccaaaatttattaggagctgttggtgagtcattcagtaactaagtcttaagtgaaaggtggtacccagaactggattacatgattttttttctgtctttttttttttttttttttttttttttgagatggagtctcgctctgttgcccaggctggagtacaatggcgtgatcttggctcacttcaacctccacctcccaggttcaagcgattctcctgcctcagtttcccaagtagctgggattacagatgcctgccaccacgcctggctaatttttgtatttttagtagagatggggtttcaccatgttggccaggctggtcttgatctcctggcctcaggcaatccgcccgcctcagcctcccaaagtgctgggatcacaggcgtgagccaccgcacccagcctggattacatgatttctaaagtactttggaaacctgaaatttcattttaacagtttaatgactggaacattttttagtttattatttgctttggtgctgtctccagatcatttaaaccaatccctatttgagactgttgttggcatccagtgatgatttttagtgactgataacctttaagtaacagcagtaagaatgaaggcccagtaagaggtaataaaggagtgatgagggaatgaagaaagaaatccattagcaagcatacagaataatagtgtcatatagaaaatgaagatcctgcatacactgaattttgatactagatcaaaatgaggtccttttcactgcatttatgtcaatgctactccacttctgtagttgttttggtgtattgcttttatttacatggaggttaagtgttagaagcagttaagagacactgccacactgaatgagagttgagcgtgtccccctgggagattgagaattcagtggtctctttctcctc

SEQ ID NO: 72377 - DNA, 1034 bp, Homo sapiens
tgttcataacatttattgatatttaatgttttttgccaaaataatatatccagagtggctgcacaattttaatgtagctgaacaaaaaaaattgagtttacgtttctactgacttgtttcgttattttatatgtgtttgtagatctgggcttcaagatggttttatctctaaaaatttggtaacctcttatttcattaaagttttagaataaaataaaagcattttcatgccatgttatttctaaacctacatgttgtggtctgaaagttggttttccaagtggtttaaaattgttttccattagctccattttccctgcccagcttactacctaacctgcaaaggttttcaatatgtataccagaaagaaaatcacatatggcagtactaaaatgggaagatacttttaggtattcaatttggggtgccagggagacactgggttctgttttagtatgttcaagaattccctttcctcttatctacacttttgctgctctggtgccaggcagcagattatacagatgaattcaaattctaaatctacttatccagagataggaactaggattgtagctatgggttttggggttgtgttattcctgttcccaatgtgacattcttgctctaagctggctttcactttctatctttctttggtccatggcactgaactcccagctttcctgtctgctatcttcacctataattttttaatgaggaatatttttttctggatctgctttttctatggattcctgactgctagtttggagtaagagaaaggtgggaaaatcctaaatgtcagcagtagagaatgacagcaaaataaaaagatttatcagttcgttcaactagtgcgttcatttacagtcttaacatgtaatgtaaagtcatgtccgtaagagggtgctgcttgcttataaaacaaggcattcctatttaaatttaattttgtacatttcacctggaatggaaagtaaccatgtttcgctgttatttaagagtaaagctataatgaaaaatgacaaat

SEQ ID NO: 72378 - DNA, 1808 bp, Homo sapiens
gaaaagattgattctgaattagtctttttacatttgagttgtgcaatgacattcttactgattcataaatctgaacatgctgatgttgattgctcatatatgtcattaattgtctaccatttggattatatggactttactaaaatgaatagacaattagcagcaaataggtaattgacattcaagaagataattttcagttggagggatttatacattcagatcggtaatagcatgttgaaaaagaatgtgtgggtttttttcctgttaaatgacatattttttgctttctcttactgcacctagttctctgctagaacctgtcagaaataacaaaacacataatacctagtacgaccatcaaactctagttagataaagctaataaaggtaaattttaaagaatattttaaaatatagttcaaggtaacagaagtcataggatagtacataaatgattgctaaataaattttatagaaaacaattgcagttcctgtttgcagacaggaaatgtcattttaaactaggttgatcgtgggcagcatttgtggtagggggataatttgaggtccttatgaaaggatgaataggattttagtagataacatgtaagtcattctacttacatagcacagtataagtatagagtattatgtgatcctcgtagaggtgttatagggaataaataaggatatgtaaaaatacttaatgcgtttatgtagtagaaaaaagacatacttcgttaaaggactagataacaaaagtattttctctgggcaagtcaataaatctgtttttttttctgaaggtccatgtaagagaggtaagcttgaaaaattagctaaaatgcccacttaagttgaatatctctataaatttactcagagcctctcagtagtctacattgttcctttttctaaaatgcctatttgtggtatgcttagtttgatacttaagattctatctgtctatttcccaggcccaagcaagattctgtttaaatagaacaaataaaataattctgagacattactagattttaatatcttgaaacattattttaacccacatgttagataatatgttatctaataaaatatcccatattctgttctaatttttataggttgatattgattacagtagattttatagttttgatcaggagaggaaaaatcttgaccaattaagatctgtctctgctcaataattagttttcatgtgtttttttgttttaatatataaatcttatatttttcaggctgcaaattattatacaaacaggattttgccagacgtttaggattgagatgtgttacttgcaactattgttctcagctatgtaagaagggagcaactaaagaactcgatggtgttgtgagagatttctgcagtgaagattgctgtaaaaaatttcaggattggtactacaaggcgagtaactcctttattacagcagctactttaaccagtcttaaaaaacgttgtagctgttaccattacaaatctggcaactcatttattttaaaaatgtacacacttaaggcccagccctgataatactattcattaaaattgtcttgtcatttctgcttgtttgaagtagcatttttatctctttttttaataacttaagcattaccaaaagattaggatatacctatattttcagcattgtagtttaacaaaatggattgtttttctaaaatttgttgtgtctttatttcactaagtagaattttttttttttttttttttttttgagatgaaatctctgtcgcccaggctagagtgcagtggcaccatc

SEQ ID NO: 72379 - DNA, 1392 bp, Homo sapiens
aaagttcacaacctccaaaattttgattatggcattaaagttggaattattagtattgagttctcacttactgttttttcatgctgaaaaaatacatgcctattttgtttacatttgtaaattggtattaatcttgccccttttttctttgggtagagggaaattatctaaatttgttttgaacctttaaaagaagaagggagcttcaagtgttgattctataaaaaccaagtgtctaattgtagaacgatgaagtgattccattgttcaaattcttgaggtggaatgtgtttaattttatgcccttgatcttccaaattattgtataaacggaaatactactactaagagtcagcatagtacatgtaatgatttgaattaatacagatttctgttttaaatgttaaattgagaatcttcttgtagcattttatttgtattgtgttagggtatttattctctgctcatttatagtaactcattttgtctttattgcttagggtacaggctaaagcctaggttttgaattggttgtctgccttttgaatcctatctctgcatttttaatatttgaccttagtcaagtcatttaatctttctagatcttagtttgcagtacccattttgcagggctgttgtgaaggtttatagagagtagatacaatgggtttggcttttatttcaggttctcagtgaacaaggtagtcaggctgtaactctacttttggttcctgcattgttcggaatcagtgaataaagtattaagcttccatttccttcctttatgctttgtcttttctttgagcataaattataaaaagggaaaaagaaactgaaagaaagaaaagaaaccctggaacaattctatggttatttcgaagaacagtctcgctggtgagaatttaacaaagggacttttttattattgagtgaaaatatgatcttggttgatattaagtgctattgttactgagatgatcacataatactatcagcagtataaaatttggattcacaagtttttggacaagagttgtgatattgcatcacttagtagtcataatttatactataaatcttcatttaacatttattcagcaggagaaatacctgacctggagaaaaaaaaaagcctgtgttctaaccttggggtatgtttgttatgtaagacctgtttgtcaacacagtcatttgttaacattcctgaccaggaattttgacatggcatttgtagaattcctcttgaaatacaacgtgagaaatttcaaaatccacagtgtaaaactctagattagagtaataaaggaaaagccatggccacagttactacgaactacaaaatacttaacagttattactttatcagaatttctaagctgttaagccaaaggg

SEQ ID NO: 72380 - DNA, 1796 bp, Homo sapiens
aaatccgttcattactcataaatgttcaatgtaatgattgtaggagacaattctaccagtacattatatggccctcaaaattatttaaaaacattaaaatacattcatttggtctaccaatatatatttagttatcctacttttgtaatgctggtctttgacttctggtaagtataggatggactttgtcaactgtgaaattgtatttttttttttttttttcatttattgtagattttactgtttacaaatgatttatattatagttctactttttctgtatcagtcacggttttatcacatttggcaataatcactgataaacttctggaaatcttcaaaaataatttgcaatatctgaaaccttcctttttaaattaaggctgcaaggtgtgactgttgtaaatctcaaggaactcttaaagagcgagttcagtggcgtggggaaatgaaacatttctgtgatcaacattgcttactgcgtttctactgtcaacaaaatgagcccaacatgacaactcagaaaggacctgaaaacttacattatggtatgtaatgatttaggtgataacttgaaaaccctgtacatcagtctttacgtagttttgaatccaaagcactgataatgaatagttgattttggagatagcttaacagcaacttaaattccgtagattctctgggtcgaagtacccttgtatgttgtttttataaatgtattgcttttagttttattgtctttttgaaatttcatgctaattgagaaaaggcatagttgagagtgaggagaagctaaacagtgctataacacaaattttaaaaagaatagacatctaactatcgtgtcatctgcaattttaaatgaaaattatttttagcaaatcgtattgctagggagtaggttgggaggaagaacaaaaaccgtttagaagctgtaatttttttaaaaaaaatatcatttaagatataaatctaagaatatataatagtatttccccgaaagcagtgtatactttcagaggggacgaaaggagaaaaggattaatttcatttatttacctgtatatttctatactttatacaaatttgaaattctttccttaaaatagtctaaaatattttctttagtcacattttaaattggtgaaatttaatgagaaatagggatttagaacattctgaagaaagagtatttgtcttattttaaatttttttgtgttttttagatcagggttgtcagacatctcgaaccaaaatgacagtaagtattggtgaaatggagtgctgaattgtgatttttgtaatatggggtaaaaaataattaggccaatttaatgtgatcataatagtaatttttttggttttttttttgctttactgagacggtggagtattcagctgaattatattaataccagagactgtcatgcatgctaaagaatataaaggagaattaattatagcctctactcacaatggggcgatagacataagtgatatttgagttgacggatgtttccataatagatgcatctttaagacaatggcaatagtatgtttgaaattaagacaatggcaatagtatgtttgaaattaagacaatggcaatagtatgtttgaaatgactgtatttgttctgaaagatacgaataagctgactgtaaacagttgagtagaagattgccagataggcatgaaaagtaggagaataataaagtactaagcacgtgtatttggcagaactacttactagagccaagcctgaaggggatctttggtggaataatggaaaatga

SEQ ID NO: 72381 - DNA, 1048 bp, Homo sapiens
tattccgaattatgtacctacattttctccgtatcaatagatgatgtggagagtaccttatttttactcccttacgctcatatcttccacttatttcagattttatttatgtggggttttgtcttgtttgcaatgcaaataatgctgcagtgaacttagtgtgaaatatctgagagactgcatctgtagaataggtttcagaaattgccattgctgggccgcaggaaatacacaacttaaagtttgaggatatctttggtaattgttttcatttttcttttcaaatttataatcatatttaaagccatttatccagcagagggagtgagagtatcagagagccataataactgttggatcttctttttctgaaataaatttaaaagtacccaagtattttcatagttcaggtttgcaaccttgattttgtacttaaaagttagattgtctttttatatttttctaaaatcattctgatggtatcctttgaaggtgatataaatctatagaatgaataattgctaccactttgctagtagttaggatagattcatattgatccttatagattaagagtatggtgaacatagggataatagcataatttggttatcctcttctgcttttgtgtgttcccttcttaggactgaaaatccttcattgacactaggaagtattgaaaattagacataaaaataaaaatgtttctctttgcttctccatagggttcagcaccacccccttctccaacacctaacaaagagatgaagaacaaagcagttctttgcaaacctttaacaatgacaaaagctacttactgtaaacctcacatgcagaccaaatcttgtcagacaggtaacttaggacaatgtgacttacatacttccccataccttcatctcacctaatgaaatacatgcttttcttgaatgacacctccaggatagattcatttggtcaatttgtcattttctgttgattttgcttacgtaattttagatattacctggagaatacagcatctcattttaaatcattatgatcaatc

SEQ ID NO: 72382 - DNA, 1055 bp, Homo sapiens
actggaagccttgctgataacagttgattaacacatattttatatgctacatactgtatttttataataaagttagctagagaaaatgttatcaagagaatcatatgggagagaaaatatatttacgattcattaggtggaaatagatcatcctcattgtcttcaagttgagtaggctgaggaggaagaggagagaggttgatcttgctgtctcaggtggcacgattggaagaggtagaaggaggttggagaggcaggcacacagaaaaacatacgtgtccaagtggacccctgcagttcaaacccatgttgctcaagggtcaattgtaatttgcctttgttgagagatggcttgtataaagtaatgaaataatgtaggctttaaaaaagatattattatggtgttttttactaatagggagccaagagaaaggctgtatcaggataccagtctcatgatgatagttctgacaattcagaatgcagctttcctttcaaatatacgtatggcgtaaatgcatggaaacactgggtcaaaactaggcaacttgatgaagatcttctggtattagatgagttaaaatcttgtaagtgttttaattttgtttctcctaagtcctatttaaaatcaagatttctgttattgagtacctttaaatttaaaaaacataaatgtaacttaaaatacctgtaagaatgcattttattttacttcagagctcttacaaagaataacgtcagaaagtttcttaaccttaataagacgctaaataataacaattattttttattttatgtatttttagctaaatcagtaaagttaaaagaggatctactctctcacaccacagctgagcttaactatgggttagctcattttgtcaatgagatccgacggccaaatggagagaattatgcacctgacagcatctattacctttgccttggaatacaggaggttagtaatttgatggctgctttcaagtataacattaataagaaaagttgtggtagttcttgtttctgtagcattatggaacctttattgacttacc

SEQ ID NO: 72383 - DNA, 2076 bp, Homo sapiens
aacagtgtactcccaattcttgccttccattctttgtgctgttatcatataattttatgttattttctctttaagccccactaatgtttatactttaaatgattctgtaaccaccctcactgttaagatttttctaggtttgtgacagtaagttacaagattcataaatttgcactgttttacaggtggagaattaggaatatagagacaataagaaaaaagcgttagcctgacaaagtcagagtgctagaagagagctttcaatagctacagataacatttcctctcattcttaccactcagtgtttttctttagtcattaccttaattataactcttactttataagaaaaaaaactaaaaagaaaaaaacacttttattttaaaatttacatttttcttcatgcactatataataaacacgggagtcaaatattcttttttttttctgtctgacagactgaagattgtcatccagtttttacattcttgattctggggtgtgtatttcagctttgagtgtttcaagcaacagatttgttgataatttatgattctttataatttctaggtgcatacataaaatcagtcatgttttagtatgcatttcaaagacataaagctttatttttttcttaagaaatacggagtgtaatatgtttactataattagctgattttctttcaagaaagtttgtggggctttttttttttttatagtatttgtgtggaagtaatcgaaaagacaacatatttattgatcctggataccaaacatttgagcaagaattgaataaaatactgcgaagctggcaaccaagcatacttccagatggtaatgctattttcactaaaggtgttgctctcttgatattaggattgttatttttacagagtatgtttgaaaatattataattaagtcacttaaattagataacattttctgaacacttactcgagctcatctgcctttcatctcttgttgaattagaaacaaatgtggtcaataactagtgtttatgaagaactttgtaagaaatgtaatctactttctctggagtacgagactggatgttcatgtcttaagccttccagtggagcttctgatgtaaatttctcttaaaccactgttttcagtccgtgaagaaaatgtgtatgtatgtggagtcatcaatttttttcaggaatttaaattcctgaattttaattttaaaaggatttacactgttttctgaccactgtttgcttgtcctactgaagaacagaagcaaacatccagtcccttattccatagataatagttccatagtagcctctgtattgttaaagagctgcataggtaattctagaattattctagttgatctaatatgaaaggagaattggtatagatttgtccttaaattaactgtgtctgcttctagatggttaaatgaaaacttttatttattataattcttttaaaatagttctctctatttaagggtcaatattctctcgagttgaagaagactatctctggaggataaaacaactaggatcacactctccagtagctcttctgaatacactgttctactttaacactaagtattttggcctgaaaacagtggaacaacacttaagactttcctttggcactgtgtttaggcattggaaaaaaaatcctttaacgatggaaaacaaagcgtgtcttcgataccaagtgtcttccttgtgtggaacagataatgaaggtagtgtaacagatttctatttttatttttatttttaaattttttttgagacagagtttcactcttgttgcccaggctggagtgcagtggtgcagtctcggctcaccgcaacctctacctcctgggttcaagcaattctcctccctcagcctcctgagtggctgggattacaggcaggcgccaccatgcctggctaactttgtatttttagtagagacagggtttctccatgttggtgaggctggtctcgaactcccgacctcaggtgatctgcccacctcagcctcccaaagtgctgggattacaggcgtgagccaccacgcatggcccagatttcta

SEQ ID NO: 72384 - DNA, 1929 bp, Homo sapiens
tttggcaaagagtttcagattttggatttttgaattagggatgctcagcctgtatttctcaccatggtttagggtggtcctatttggctgcagtagtgtcagggtcttcagttggtagtaactatttgttagtaggaaattcctatctcactattaccttgttggtattttaaaaattgagtttctattatgtagtgctgtaagaattttttaattttatgtgctgccatacatatttcatcaattctaagacattttcacatttcactatttctgaaactgggatgcacagtttaaattgttgcatcttgaaatcataattggcagtgtttcacttgcttaatggtagcattaaaataatgagtggtgtgtctattgatagtgtcttggatttagtgaagtagaattaaaattgtgggaaataatctctatctcagaaaataactttgagaatattttaatgacagaataatggagacagtggggcatagggggtctggtcatataacgtgattaatggggtctgaattattcttgaaaaaagaaaaagttgtggaaattttgtgaaattgactttttctctttttcctcccgcctccaaagtccacagaatcttaatcagaggatggatgttttttatttgcaaccagaatgctctagttctacagatagccctgtctggtatacgtctacttcactggaccgaaacaccttggaaaatatgcttgtacgggttcttctagtaaaagatatttatgataaagacaattatgaactggatgaagacacagactaaaaaggaacgttgcagaagcaatcgggataaaacagcattagatagtcatgctgctagatctttattatggaaaacatttcaagtttactccttctgttttgagttttgtagcagtgtacccacgctgggtattaccatgtaaataatctgtgagtgaaagttgccattattctatgtagtggttttaggatacttaacaaatacattcaaattctttttttattattatttatttgattaggtatgtttgtaactttttacattacagaatatgaatgagaatgtgccatgtataatttttttcttgtagtaagaaacatccatattgcacaactctactgttgcaaagcttccttggaagggggctcttttactgggttcttaaccagatggttgtgtatgggtagcactactaaaagtttagaacttgcagtgtctttcggaatttttaaaataaactgtaaactaataggctggggtttttgttttgttttggggttttgttttgtttggttttacattttagttactgaagccttacaaggttatgtagagagataccatcttctgtaccaaaaatagacaagagaatgctgtcaatattggtgtactgtaatgtgaatctatgctggtgaaaacaattttttgttccccttattaaaaccttagtgtccttttctcatttgtggctttctgcatcacccaatcaataaaaaacaaatatatatatgtatatatatgtatgtatgtgtgtgtgtatatatatatatatatatatatatataaatgattgtaagttgaaaacaagatcatcaagacatttcctttgtaaaaatgtctggtgaaagtataaaattctgttttcttctatgccagccataagtatctgaaatcctcttcatttatagaggtttgatttttatttctttttttccctcttaaggatacagatcatgctgcaatgttagctgtgtagtactctaaaacttagcaattttatcagaattcttgtgcctgtttacattggataaaattgtttttagaaattccactcctgaaatagttacagaaagtcaagctatgttaaataagataggatcacattttataatgaagattaccagtgtagtaat

SEQ ID NO: 72385 - DNA, 1087 bp, Homo sapiens
ccatttaatgttagattgtttggcttttgaaattacttcttatagaagattgcattaaaaaaaaaaacaactttgtgcttctgcatagcaatttatccattcagaccttttcttttagaataaggaaacttaaaatctactttctaaagactgaacaaagtgctagctgcaaattatcttgaaatcatttggctcttttctagcatgtgtgtaatcatgttttcttctgattcctgaatgaccatggtagcattagtgtttagaaattgttcaggggaaaattgagctattttccatagtggctagcaattgctacacatccttagatactcctctctcccataggataaatgttacagcacacaaaagaaattttctcaattctgatttggaaaatttcacaggtgtcattattgtatatctaagcaataattatctgaatgttttggcataaaaaattataatgttctaacttgttttataagttgaatgacttttcagtcccttgattttatattgttgagtgataatcagactgatagtagcaaatctgatcatacattactaaaatagattgctgattgtctatttaacgaagacaagtgggtaacatttaaaatatataatacaaaaattttctctaacttacctttttccagaactacttctttaagcacttttcctattaatgcctattgttgattaaaaggtggttaattctaaccatcttttagtcttcaaagtggtgctatattccatcaagagcaataaagtttttcccaggtgtcacttattgtatatgttaccaaataccatgaatttctgccatagtactactatcaagcaccttgtcttgctatttacagtttcttcatttgtatatttttagcttttctaagtggaaatgtctacataattttgatcttgacatgattgaggatttagagctcttgtctttgtcttgattgcaatccaacgatagattaacttgattctcagggggaaaagaaaaacttattttatgagaattgtttgttctgtgaaactcacttcacctagaacacatttcattgattcttggatctta

SEQ ID NO: 72386 - DNA, 1038 bp, Homo sapiens
acaaacttatggaaaaactaggtttttagaaattttttggatctcagaattcgtgattagggattgctgacctctgtaaggaaactggtgtcaggtctagaattttccttctaatgaaatacgtagtcattttccccctttttaaattgcttagctttggtagaggtaactgaaggctttctttagaattcgtgtgttagattttaagaaaaatgcatgaaattgttaggacaggcataaatacaaatggcaattctagagccattacggaattttgaaacacttaacaattgctttcttttacttttcatcttgcctcaatacttgtagcattacaagtattccacgtaaataaacgtttatgaagagctgcagtcatgtcatggagccaggcatttattcattcaacaaataggttagtcttccacacacaatttcaggtgctgggaacacagaattaagacccagcccttcctctcaaggacttcgcgtagtttgggagaaacgggaatgggctggaatgtcagaataagatgggcacttaggccttattgagcatgatcacacttgtattttgaagtaaaataccctgatcaagtaatttaccaagaagctactttttgtgacacagctccgtctcctgaccgcggttccagacttcaccattacaccagtctattcccattctggaaagggagaggtatcagctcttagggggcagagattagcaaattgaaaaatagcagtgaaccagatggaaggctctcgatctttagaggttattaatcagtgtttgttcgttcaatttttaaccagtcaccttgctgttaagagcagaacataattggctggaatgtaatgtagggaatttttccctgttggatccctagcacctagaaaagttcctagcacctattaggtgttaataaatgattgttgaatgaatcagtgattacaagtacttttaagaattttgaaaataaaggaaccattggaaatacgacctgtgatcaaggaagaaatacctgttttttggtg

SEQ ID NO: 72387 - DNA, 1303 bp, Homo sapiens
ttgtgttatttgctaattagatattgttctgggaagtcaaaaaagccagtttaacgcattgcccagttgttagattaagaaatagacagcatgagagggatgaggcaacccgtgctcagctgtcaaggctcagtcgctagcatttcccaacacaaagattctgaccttaaatgcaaccatttgaaacccctgtaggcctcaggtgaaactccagatgccacaatggagctctgctcccctaaagcctcaaaacaaaggcctaattctatgcctgtcttaattttctttcacttaagttagttccactgagaccccaggctgttaggggttattggtgtaaggtactttcatattttaaacagaggatatcggcatttgtttctttctctgaggacaagagaaaaaagccaggttccacagaggacacagagaaggtttgggtgtcctcctggggttctttttgccaactttccccacgttaaaggtgaacattggttctttcatttgctttggaagttttaatctctaacagtggacaaagttaccagtgccttaaactctgttacactttttggaagtgaaaactttgtagtatgataggttattttgatgtaaagatgttctggataccattatatgttccccctgtttcagaggctcagattgtaatatgtaaatggtatgtcattcgctactatgatttaatttgaaatatggtcttttggttatgaatactttgcagcacagctgagaggctgtctgttgtattcattgtggtcatagcacctaacaacattgtagcctcaatcgagtgagacagactagaagttcctagtgatggcttatgatagcaaatggcctcatgtcaaatatttagatgtaattttgtgtaagaaatacagactggatgtaccaccaactactacctgtaatgacaggcctgtccaacacatctcccttttccatgactgtggtagccagcatcggaaagaacgctgatttaaagaggtcgcttgggaattttattgacacagtaccatttaatggggaggacaaaatggggcaggggagggagaagtttctgtcgttaaaaacagatttggaaagactggactctaaagtctgttgattaaagatgagctttgtctacttcaaaagtttgtttgcttaccccttcagcctccaattttttaagtgaaaatatagctaataacatgtgaaaagaatagaagctaaggtttagataaatattgagcagatctataggaagattgaacctgaatattgccattatgcttgacat

SEQ ID NO: 72388 - DNA, 1050 bp, Homo sapiens
gcccgccaccacgcccggctaattttttgtatttttcgtagagacgggctttcaccatgttagccaggatggtctcgatctcctgacctcgtgatccactcgcctcggcctcccaaagtgctgggattacaggcgtgagccaccgcacccggcctacacccaggtaattttttagtagagtcgaggtctcactgtgttgtccaagctggtcttgaactcctgggcctaaacaatcctccagcttggcctcccaaagtgctggaattgcaggcataagctacctcgccctgctgagcctgcgtttttaagaggtatgaggcataagcgggaatctgggagcttcatgttaatgaaaagtaagggacacctgcagaactcggtgctggccctgctgcatgtttttcttccggcttgggctccctgctgctcacctagcggtatcagcacgctgggagcatatctgctgacgcagagctgccttgctgtgtttattttcatttgaaagtcaatattcaaagacttgttgcccagtaagtctgtttgaaccactgggggaaatcaaaaggtttctttcaaggggcggcctttcacctcttatgggtctggttgacctgtatcagtccctgctgcccagcagagaccttcctgcctttcgtttttcctttttttttttttttttgagatggagttttgctctgtcacccaggctgtagtgcagtggcgcgatcttggctcactgcagcctctgcctcccgggttccagtgattctcttgcctcagcctcctggtagctgggattataggcacatgccaccactcccagctaattaccttcctgcctttcagaggccctggcgttcagcaagtatcgcattgcacatttgtgtgtgggaagacacctgggacactggagtagctatttctgttgttttggcagaggaggctgctactgtggtttcctctgagagacctactgtggtttccttccttcctgccgcgtgcgcaggacctgccccggaactgccgtgtgcgtggggcaggtgacacagg

SEQ ID NO: 72389 - DNA, 1017 bp, Homo sapiens
tctctacctccatgagacccactgctttagctcccctacatgagtgagaacatgggatcttcgcctttctgtgcctggcttacttcgcttaatataatgatctccaatgccatctatgttgctacagttttcttataaaatatgttgctgtggttttcttataaaaagaaaattattactatttagggaattgttcacaagcaggaggcagagtttgaggagacgcgtgtgtgcgtgcgcacacacacgcgcgcacacacacacacacacagactgcttgccacaatgcttcaactaaaaataatcccactgtcggatctgcccagccccagggggcgaagcccagtaatgggagtgtggttttccccagtggattgttttctacccaaccctagagggcggggagcctgggtcaggacgtttcctaatactctgctgaaatccgggagcacgcaagaaagaaacctgaatttctagaacttagtgcaattttgaaatcaaatcttgcctggcaagaaaacctactgttctggaaaaataagtttactctgaaaagctggtctcaagccttgacttttaaagcacattaaagctcattagccactatgtcgaggccttatctaatctctggaacttaaaaccggagatcacagtagctggtgggagccatgggaatgatttatagagttacgaagtttaaatggggtttccttacacaaagtcagaacaatctgcaatagctgaaatcgagaagttaaatggatattgtctatgtagatgatcagaatttgcatctcaactatatctttaaaatggagagaatgctaatcattttgaaaaggaccttcagacactgtcagtaattacaggaagtagcgttcttttggaaatttatttgttttcttaaaggattgttggactttcagtcttggttcactgagactcagaatatttcttcttttggtagagatgggtgtgggggtggggggttcaggcagcattggacacatgggatgg

SEQ ID NO: 72390 - DNA, 1811 bp, Homo sapiens
gaagaattgacaccaatataaaacagtagtttctgagctatgagattgtaaatgcttttgaaatattttccagatttttacaaataaaatattggcatactgtatattagtttaaggaaaattgcctctatttgtagataaaaatggtacattttcaatttcacagagttgaacttttaatagattttcttaacagattatattagctgggcatggtggcgggtgcctgtaatcccagttactagggaggctgaggcaggagaatcacttgaacccggaaggtggaggttgcaggagccgagatcgcactattcactccagcctgggtgacaagagcaaaactccatctcaaaaaaaaaaaaaaaaagattataagagtactgtagcatagcagagtataggctctgaagccagatgccttggctctcctactcagctcttactctccctgtgtctcagttcttttatatatgtaatgggattaactattataacctatcttacagggttaaggtgaggattataggtgaggattaaatgagttaatgcatgtgaaatgcttaaaatagtacctggcagctgggcacagtggctcacacctgtaatcccagcactttgggaggccgaggtgggaggattgcttgagcctgagagttcaagatcagcctgcgcaacatggcgaaactccatctctacaaaaaaatacgaaaattagccaggcttgatgttgcacacctgtagtcccagctacttgggaggctgaggtgggaggatcacctgagcccgaggaggtcaaggctgcagtgagccgtgatcacacccctgcacactagcttgggtgacagagtaagaccttgtctcaaaaaaataaaaaattagccagcctggtggtgtgcacctgtagtcccagctactctggaggctgaggtgggaggatcatctaagcccggggaggtcaagggtttagtgagttgtgatcacaacattgctctccagcctggatgacagagtgagaccttgtctcaaaagtaaaataacaaataaaaaaaatatatattagccaggcatggtggcacatgtctgtagtcccacctactcgagaagctgagtgggaagatggcttgagcccagaagttgagactgcagtgacccatgatcatgccacagtgctccagtctgggcaacagagcaagactctgtctcaaaacaaaactaaccaaacaaaaaaaatgtatgtgaaagatagttaagtgctgggcaaatgttaattattatatattattttcatattgagaaaaaataatatatgttgtaaaatcatctgtgtttttaatggggagtagagatatggatcatactaagtaattgatgattgaagcatttatatttgagtttagaattaaagtattacatatttgtactaacaaccccagcttctgtgtacttggtcctaatctttccatcctgatccttttatcagcttcttagaataggttagttcaatggagaatgtgattggtaatcagaaatatgaaaaagaaagttctaatttacataagggaaaatagaaggattaatttactctcccttttttaaaactaattagtagggaggcttattggaaattcaagttcgtggctggacatgatggcttatgcctatagtcccaatactttgaaaggctgaggtgagcaaattgcttgagccaaggaattgaagaccagcctgggcaaaatggtgaaacctcatctctacaaaaaatacaaaaattagccaggcatcatggcatgcccctgtagtcccagctactt

SEQ ID NO: 72391 - DNA, 1020 bp, Homo sapiens
atgcttgtagagcaattagcactgcccctgttatagagtaaacagcaaatattttgtgcttttataaagagatctatttaagttgggacacaaaaaattaaatatattctacaagttctgtagaatttttctcaccctgagagcatttaatatggaaaaatatgtggaaactgtcgtctgttacaaattgttataatagttaattcaaaaatgagaatgtaggtatcagtccaatttttacttaaaatgattagacattaaaataggctaatgataaattggataagaaaagtaatttagaactgaacacttcagtaactgaaaacctgtgttggagcaaatcgagtgcttacctttacagagtactagggaccctttaaaaaatctttgaaaagccacatttaagaaaaccaacagcatcaatatactaaaacaaaatcaagtaaggttttttatgctttcccttataggtgcgtggaagtggtgaaagcttctcaatatgtagagctagccaatgatctggaaataaacaaagcagttacatacttgagacaaaaagactataaccaagtaagttttaaaaaaaattttagatggaattccatatcttaattggtcaaagcattaaaaacaggtaaactcctttctagaataatgttatctgtgattattctgaagttgaataatatttttatttctattttatgttaattttcattaaaatagttttaaacttttattaatttttgcctgtttgtcgtttctttttttttttttttttttttttttttttttttttgagatggagtctcgctctgttgcctaggctagagtgcagtggcgtgatctacactcactgcaagctctgcctcccgggttcacaccattcttctgcctcagcctcccgagtagctgggactataagcacccaccaccatgcctggataattttttgtatttttaatacagatggggtttcaccgtgttagccaggatggtctcgatctcctgaccttgtga

SEQ ID NO: 72392 - DNA, 1034 bp, Homo sapiens
ctaacacagttacttttgcttctacataactgctttctaggagcaggaggcaccaagagtcaagcatcttctaatcagtaaatatattttaaaagaaggaaggaaggaaaacccagtgcctttctctacccttgtttttttctttctaatattctgtagcaatttctaggttgaatactcattcacctttcatgtaaagtgtctgaccgttccacacatcttacttggttaggattatctcagacctgccaggtagttaaaaacatactttcatttctcatgatttaaaaatgtaattatatttggatctactttagatcactttttgtaacactcccagaattattttctgttactggttttgaaaaattctgtgccatttttccttcttggccttctgaaactccaattacatttctattagaccttttcattatgctcccgtaagtctcttgtgttcttttctaggaacattttttagccatctattttgccatgtttcatttagtctgaacattttctgggaccttggccttaaagtcctgtttgctttgctagctctacagtgccttcaaaaaatatttttagtattttctataatctttctagttgttctctgtcaaagaatggtcttctataggctagtcagtcatggccagaagcagaaacctaagaattattttgtaaagatcaaatttgatcacatctcttaggcaaaacctttcaaggcctcactgcccaccccattatgcagaataaacactcagctgcatcacatgactcccaaggatcattattattatcatcatatttttatttttttagagagagtctcacgcctatgcccagtctagtctcaaactcctgacctcaagcaattctcctgccgtggcctcccaaagtgctgagattataggcatgagccaccatgcccagccttccaaggctcattatttactactgacctttcttccagtcaccaggtctctcttcagctgtatctaatctgctgttagaacatctatgttttctta

SEQ ID NO: 72393 - DNA, 1063 bp, Homo sapiens
cccttttgtgcccttccctggtcttacccttcaggaacactgatcttttccccgaccataagcttgagtactgtcatattacagtggtagtaaccttcagatattccatttctaggctgtagagatcttaaaagtgttggaaaaaaaggacagtagagtgaaaagtgcagctgcaaccaatctctcagccctgtattatatggtaagtttttttactactaagagttaatcatatgctatttttatattgctaaatttctgcccaaggatcatgcctagggagaggtccaaagaatattggtggagaatggtaagtggactgaggagtatagaggatctgatcctgacaagtgccaggccaggggctgagttggcagacatgagtgagaacaccatctctgaaggagaagggaggaagaaaaattgtagtgataagcatcgcatcatagattatgcaacatacagctggaagagctagagatgtatttcaactcctttgtgttattggtaaagaaagtgacatcttaggttaaaagatttatgtaaggttacagagtatcaactctaacaagcatttattgagcatctcactggatgccagtcatgggaataccaaaagtctaaaagctccctaaaggggagcgttcttgtctttggaacaaaggaggtagactaggaaggaaggtttaaagtagagaacaataaacgaatgcagataataagtgcttcagaaattcagaggaggcaaataacattttaatttaggactttcaggaaagatttcatagagagttggatctttcaggtcagaatatagaaaggggcatttgtagggagaaggggacgaaacagaagtacagaggcaaggaactgctgggagggaagtgtgtataagagtcatttcttttcaccagaaaatacagaatttctggtaggctttttctgaatattgaaaattgattataggtaggtgtggtgcctcaagcctataatcccagcactttgggaggctgaggtgtgtgaatcacttgagcccaggagtttgagaccagcctgggcaaca

SEQ ID NO: 72394 - DNA, 1050 bp, Homo sapiens
cccaccctaacattattctttaaaaaaatcctcagttggccgggtgtggtggctcatacctgtaatcccagtactttgggaggctgaggcaggtggatcgcttgaggccaggagttccagaccagcctgagcaacatggcaaaatcccgtctctactaaaaatacaaaaaattagctgggcgtggtagcacgtgcatataatcctagctacttgagaggctgaggtgggagaatcacctgagcctgggaggtcgaggctgctgtgagccatgtttgtgccactacactccagtgtgggcagcaggagtgagaccctgtatcaaaaaacaaaaacctgagttcatcttcattttctcttctggataaatattttcatatattttgagatttattctgttatgttaaataaattaataccaataatgatacttatagattttcttttttttcttctttttttaaggccttacctatgagaaactaaatcggctagatgaggctttggactgtttcctgaaacttcacgcaatcctacgaaacagtgccgaagttctttaccagatagcaaatatgtatcttatttgaaaaccttagggacagttattaattctctcaattggtgattgaagatcaattattaaataagtttaactaatgaagtaattgatgaggataatatttgaagtaagtgatgaggataatctggcagattattgtgtgataaatatcatttgagtaatcctattttaagatgtagtttgcatcgaaagaggaattaatggttaaaactattatttattaaattttgaaaataactgaagtaattaggacattttcggtacatataagccattcattgaaagtcaatttggtgctttagaacgttgtattaattctgaagcttgtagggtatcattgaagcactaacttactaaataaaatactgtttattactgattactattgattgaatttggataatttttcttacttttttagctggcctgtagatataatgaggtctccaaagactgttaccctctaaaatta

SEQ ID NO: 72395 - DNA, 1050 bp, Homo sapiens
gatatgaataaattatttgtatatacaccgaagacttagtaggtactaaaaggaagctacaaaaaaaaaaaaaaacaacactgtccttgggtttataatctaattagggaaaactcacaggaaaaacacatggaaataatttccttaatatgctgaacatgttaagaaaaagaataactggatgcaacattcaggacatttttattaaggacaatttttggacaatactttgaataattctaccagaaatttgggagttgatcttagtggatagtaatggaggaaaagggaaagcaggctatatacatagggagcaagagtgttacctccacagtactgctgcattccatctccacccctgagatatccagaggaaacagtatacaatagcacattactgtaggctaagaaatattgttactgtaatgttttttaagtttgcttattgcttaatgaatttagaaaacatgttttccttaactgacattgcataagatatgaattaatggaaaatcccagtcaagctattgaatggctaatgcaggtggtcagtgttattccaaccgatcctcaagttttatctaagctaggagaattatatgatcgtgaaggagataaatctcaagcatttcaatattactatgaggtaggtgtgttatcttaatttccttctgtgttttagcattttatgaattgttataaagaaggcagcaaggctttaaaattttagaagatcttaccagttttaaaatgatttatttaaaataaagcattcttggaaaatgaagttagtttttgttttgttttgttttgagatagagtcttgctctgtcgcccaggctgctgcacagtggtgcagtctcggctcactgcagcctcctcctcctgggtttaagcaattctcttgcctcagccttccgagtagctgggattacaggcgcctgccaccacgtgcagctaatttttgtatttttagtagaggggtgttttgccatcttggccaggccagtctcgaactcctgacctcaggtgatctgcctgcctcagcct

SEQ ID NO: 72396 - DNA, 1061 bp, Homo sapiens
tcctctttctcagaaagtttcccccaagctgtataagcttctggccccacacattctggatctgccccactgtcaccattctttatccttccagccaaagaacagtgtgctttatctatacttgatctttattttctcacttcccaggtgctcttcaaatcagtctaaccttgactgcttccattcacacagctaaaactaccctcactaagattagtcacttacatagcagtcaatatgatggacactcttaactttccgtctgcctgacttagcagcagctctgtatatgtggcgtttgtgacacacccctcctggcttccttcagttcctttgcactgcactgaggccactttacctccatcacactcttaaagggcaaggtcagctgctgggccagccctggaatacccggtggggcatcacagagtctgtcctgttgcctggtgggattgctgtctgcagcagctctgtctcttgggtgtttactttgcatctccgaaggaagcacttagatcatgcctgaaaacactactgagcagagctctgttgtgtgaatggtatgagagatgtgcagttaactgagtcttgacagttgagatttctttttttttttcttacataataggcacattcttagagagttctttgaacttagaactttatcaaactaaggttttgataaatgttttggttttacttttgaagttgccttctctgtaacttccacaagaaatccttgctacagctattacaatggtacagctattacaatggttagtacacaagactccttatggtggagttcactgattctcaactgcaaataggcattcagttggaaaaaaacaccacattctctgtgcacaggaggatgatgaaggagaaagacaaaccggtagagtcggaccctgagcataatgagagcacatggagccagtcccgaccaggggacacacagggggtctcctgaggagatgagggaggaggaaatagctgaaaagatgagggagggcaggcagacagggattagcggacccatccatgcagggtccatgcca

SEQ ID NO: 72397 - DNA, 1037 bp, Homo sapiens
taaacaggccagcaccatgaggtttagctggagacgctggactgactcttggggaatcaagtggcctggctagaacccgatgccactgatggctgtaactgcctactaagttataaattgaatttgactgcaattgggacgaagactccttgaatttcaaagcacagctctgaattcaaggagtctttgtcccaactgcagtttctatccctaggaaagtttgaaaactcatgtacatttctctaccatggcagcatccacagcaccattagaagctgtgtgtctttccaactagattctaacttctttgagcatggggaccacgtcttatttgttcccatgtccttggctcttagcacagtgtttggcacacagtatgcatccaataaacactgtgaatggatgaaaggcctgcctaactaagagctacatttgtctttgtcctgactcctacatcacaaacagatatgacagaatgcagctggatagttacatggagctaggtcatatatgcatgagagtgctgagtatggataggagagaatgtaggtatatttatagaccccaattcgacatttatttttaaaattagcttctttaaaatcaccaaatttgtactaagtttaacttacactgcctgcctgaagtagagaaagaaggtagattgttgatgggaagaaggggtggaaaactcaataaaatgtcttattatgtaatgatgtcacaaggagtaaaagaattttagagatgcaaagaacttcagaaatcaccaaaagcctatagcatttatgtggttggtccaaagacatatatacatcgtcacgatcaagactgggactcacactatgtctcctaattcctagcttgtcactaattctacactaaaagtcagactaaagatttagggctgtcagcattccataggaccatcctccttctcgtggcacttccttcaaatggaaattttaaaaatgtaacacagcaaaacctcataagtacgcccatctatgataatctgtccaacctgagagattaat

SEQ ID NO: 72398 - DNA, 1031 bp, Homo sapiens
atgcagacatccagatgggaaatatttgaagcaattctctttttcattatattcagtaaatatttattggtttaaagatgtgttattaatgttttcattcataccacgtgccactttgaattgtaccttgttttaattgttatagtcattttgaatgccatcttgttttatttttatttttatttttatttttttcgagatgtagtctcgctctgtcacccaggctggagtgcagtggcacaatctcggcttactgcaacctctgcctcccaggttcaagcagttctctgcctcagcctcccaagtagctgggattacaggctcctgccaccatgcccagctaatttttgtatttttagaagagatggggtttcaccatcttgaccaagctggtcttgaactcctgacctcatgatccacccacttcagcctcccaaagtgctgggattacaggcgtaagccaccgtgcctggcctgccatcttgttttgagtgatttagaaccattccatattagtaagaccatccagataaaccttttaaaaggtccaataatagacaagcagagagccaaatcatgagtgaactcccattcacagttgctacaaagagaagaaaatacctaggaatacaacttacaagggacgtgaaggaccctcttcaaggagaactacaaactactgctcaaggaaataagagagaacataaacaaatggaaaaaaattccatgcccttggataggaagaatcaatattttgaaaatggccatactgcccaaagtaatttatagattctatgctattcccatcaagctaccattgactttctttgcagaattagaaaaacctactttaaatttcatatggaaagaaaaaagagcccgtatagccaagacaatcctaagcaaaaagaacaaagctggaggcatccactacctgacttcaaactatactacaaggctagtaaccaaaacagcatggcactgttgccaaaacagatatatagaccaatggaacagaacagagatctcag

SEQ ID NO: 72399 - DNA, 6008 bp, Homo sapiens
tgctcaggctggtctcaaattcccgggctcaaacagtcatccctcctcagcctcccaaagtgctggcattaaaggcctgagccactatgcttggccaggccagctttttttgagagcttacctctgtcctggttgaatttcccttaagcccacaccttcttccactttcctttataaggctttataatagagtattaaaaacagaaaatttcccatattcctatatttactaaagtcctcttcctgccctttctctaagagctgctgggcacagtgctggtttggagctttcagagtgccctgctccacttggagaaggcactggaatatatttctccgccccgtcctcccaaaagactcctgcctgtcctgtctttgtgcacattgctgtcctcagaactgggtggaccagatatctctattaacctctggggaactattgcagacttagattatgtgtcaaacgcaacataaataggaataatgtgctttgaagaggcagcacaacaaagttgattatcacatgggtcttggggctagattggtggactcttgcttgatctgggccatatcacttcacctcactgagtgtcgaaaccttcacctctggaatgggaatagaaacagtacctgtctcgaagcattgttgtaaatgatagatgaattaatccatgtaaaaggttttcaaacagtagtacttaaatgctgaattattctaaatgttaactcttaaaaatgtgtccctgccttttagaaccccacagtccagtaactgataagatctacttgtatgatattctaaggaggatacttgtgtatactttatctcttcaataggctgaatattctgaactggtcgaaacattactatcaagtcagcaagacccagttatttaccagagattagcagatgccttcaacaagctcactgcaagcagcactcctcctacgctggatcggaagcagaagatggccttcttaaagagtttagaagaatttatggcaaatgttggtggtctcctttgtgtaaaataaacaacagaactttatgcttaatttagatcctttctgcaaagtgcactgaattgctgaaagttgacttgagtcttgtcctattcctcagttcatttggccattttggattttggagagcctgaaactttgatatgtatgtaatacagtgaaacaggagaggtcaacttggcatcagcttctgctgttaagtgttagccacaatctgtcatatatatgtcttttagattctgaatggtgatttaaaattttcaaaatgaaattccatatatgtgcaaacagatatgggcaccacgaaatacatatgcagtgccttttttccttttaacataggtggctagccaaagtttagaatttttgtcattaaatatgaaatggatatatgctaggcagtgtttctcaaaatctccatagatcgcctgcatcacttgaggagctggtgaaaaggcagattcttaggcccaactgtagaccttcagagtcagaatgtctggttgttgggcccaggagtcttcatgttaataagcttctccctttcgtcaccccaaaagttttgaatcaatgaaagagacattgaaaactcttaagaggttttgtgctttctagcttttcctccctttgatgattgggttttataattcagcaggaaggggaaacatcaccaggggtttgttggctttttcttagcttgctttcttgcttgcttgctttcttgcttttcttgctttctgtctctctctttcttttctctctctctctcacatcaacccagtgctgcaggttttgtgtaatacaagtcactaatcatactctgatgcctgaacttgaggaggaaaatacatgtatatttttgttccgtaaaaataaccttaggaactgtagccatttcattgccttaattttaagaggaaaatacaaaaacagctgatttgttttagtaagaaaccacgtcttgatgcttcagagttggtttagggtgttagctgctatgaacctgttgcccctttcgatcgtgtatttatgtaggtttatcagtgaaatgaaaggcttgtttccgtctagtctaactttttgagtgtgtttctatccagccacatagcccatatctactctaaatggcttgcttaagcaataattattttaaaggatgtgaatcactgattcacacagactattgcacgttggggcattaggggcaataattcttatccagacatgggagccagtgaatttaatttcagagattaaaaattcactttagatcctctagtttgatctcttaatcaggatttttatacagctgccaggctcccctaattcagtgtgccagcttacaatgtggaaatgaaagctaatttatacacagcaggcatatgaaactccactcattgcagtactttcacagcacagtgacaggtagaggactctggcacaggtgcactcatgaaactctgcttccaccatgttcctgacacctatctattaaaccattctgcaaatacggtttttctacctgattgcatatagcatatgtgtcattacatgtgatgctgtgcaaaactttgtataattctgtgttattaacagttaacaaaactggagcatctgaattacatccaacctgtgcatgtgatgttaggtagatgtgaatgcagggccttgggccataacttacatttctctcaatttgattagctttgagtcacaattaaggggaagcaaaaacatcttgaaaagactgctaggaaggaaattaatatcagtcatccagaagtacacgtttctgtattttaaaaaatactttgatgcatttatttttaggtgttttttttttccccttaaaaaacttgaagtgatatgcagcagtaatctatttgttttgcattgttcttggtgttttgtgtttcccagatccctcaagctttctcagctgttgtgaattatgtgtatctgtgtgtgtgctaagtacagtctctttaccaaagggcactgaaacacacaattgactggacaggtccacgcgccatgacaaaactataatcaagttattaaaactaaagaggagtgggaaaggaatgccttggtaagtaaaaaggcatctatatttaataacttttatccagatggcaacatatttgcaaaatttgcccagatcctattacaatactaaaaatagaaaatttcacctccatattcctgaggtgtaatttcattagactagttttagtttaaaaagaccttcttcagattggaccaaataatacttataagatcagcagaatgttgaatattagctcactggggtggggagaagccactaccattttttaggtgatggggatgccactgagttgcaacggctagaccttttcagggtggttgtgtccatgtttgcctgattggatgcttattcactttgtgttttcttttgttttattttgtccaattttgtctttagctgtgtttattaacttctccggtcttgttttgttttaatgctcttggcccagtgggtgtcaagaacactggcttaattcaagtcagttgattttttttctattaaaactgttgttaaaatattttttaaaacaaaaacattatttgtgccctcttttatatatgtcaaagggacactgtcaagtatttcatttttagatttttgttttataaaatttctgttgttcatatagtatcctttaacctctagttttccatacatcctttgtttgtttctcattttattttccttgacccatttatttcccaaggcacaatcactaaagactttgtactttcacagtctgttaatgtggtagcacctgtaactgtgttcttgttctgttaaaaggattgatttgcttttatagtccttgtgctggatgagtggctgcctcagtagcaaaactacctgacagtatttgacagtgtcctttccagcaccattatttgggtctttcagggtggccatctctgttagaagacagtagcatgttaacatcactgcattgagtttttgtctggtgtaaagtatgacttttaatgtaaacaaactgcaggtttttttcaaactaattttaagaatttagtcttatttcgttgtaaactgtgtatctaattatattacattactctgttcagatgggatggttactaccacttgtccatgattttcatttgaaaagcaagtatctatatcatttccccccagtcagcattatttaacactccccttaactgtctttgaactttctcttttaacaaaaatgtcaagtctttatagttgtaatatcaccatgtttcccatttctgttaatacttctatgaacccctaaagtattgaagggaactagctgtcagtttcaaggattacaagtttgagtctcctagtattcaacatcattctgaaccctgaaataatatttttctctgttaaacaatttttatctgtttgccacctctgttgttagaggtggttgtcaattgaccttactaagttagctgtctttgatgaggaattattgttattggttcctgaataaaacattaaccttttaagtcagaaggaacctcggtacttcttaaggtttgtttgtgttttctaaaaccagagaataaggaactgatttggctatgaggtttaacattataattttctgtaagctttcccacaaaaaaacattgttgatttgaggatataataatgttttaatctttttaaaatataagtggttattctctgacttggtaactatgttctgaaaacactgcatttaagaatttttaaaaattggttttctaaaattaaaatgtccaaattaggcatattgctgagctcaaattgatgtgaaatgccatggttccagttgaattttaagcatattttcatttagatataaaatatatgaagtatgctttgttgattatagtgagaacccatgacatagttaaccaaagaatatgtttggttcaaataaaaatagaagcttaatactgggcattcatactttttaaagagaatgaatgaagaaatcggtttcctgctgtagttctctatgggtaagtcttagtaaagacgagaatgctgaagtcggccgtggcgattccctcctaggaactgggaggtgtggcttgcccattacccgcttgaagctcacatctttaccctcctctcccactgtggtttgatcttcacctattcccaggccctcccagcaattggagaggtgtctttttttttggttttggttttttttctccccgtctgcattcttaggcctcttagctattaggaactgtcagatacatactagtagctaattttcctagcctgaaattatatactgcatctgcactatgtacctactagggatctgacctcaagtgttttctgagcccaggcttcctggtgtggtgtcttttaccacataaaattattacaaattgcaaatgttggtattgtgatttgattatctgtacaaagaaagaagctctatgcagtgagtttgtggtttaatggtcacaaaaatgttagcactgctaccactcagcacgtgtaaaattttttaaatttataaatattaaaattttaaacttacactaagacttttcagttttatttaaagacccagggatgagtgtactgtttaaatatttacctctattaacataactaatgaaggtataaaattgcatttagtttttcagaagatgctgcaatatgattttaggaaataaggctatgtattgagccagttataggctgaatatcaggttgataaaattttatttgtatttttaaaattcataaatgggagttaaaatgtgtcttttcactaaatatttttattacatttttgttttgaccatgtgtgatttgttcatgggtatttagctagactcttttatgaaatgcattgaaatggtgctagtttgtttaccattataggaagattgacactggggacattacacggtcc

SEQ ID NO: 72400 - DNA, 1976 bp, Homo sapiens
cacaagaaacagactcaccactttttctagcaacacggcactttcttaaggtaagatgtctgtgcggtaggtcagaaaatcagctactttcaaaagtgtggtcggtgcacataattctgcattcaaatgaggaaatgcttccattctttcgggggcaaggaaaccatgacttcctgttcactgtttttttctggagatcagctcttcatggacacattctcatcctctattttttgtgttcttggaaattgatgtggtacacattgagggaatttgatattgttgattattcagataccacagcaagtagcaatatctgtaaggtattttttttaaaacattaaggaaaatttcagattgatttaataaatagaataacaaccaaccctctcttcttcttttttggactggggagggactggaggatatatgatcatcctatgtttttatttagaagtcttatgtaatttcagctggtttttgatatgctggttttgcaaaagcacaacacagagatgaccactgcggctggcgaagctttctacacgttggtgtgtttgcaccaggtactggacatgcctcttttcaggggactcttctcattctattttgcaaagagattgttgagatagatggtgggtcattaatccccccttataggatctgtgactcagtgcttcagttctgtttcagtgaggaagtatttcttagcttctttattagctttcacatgtcagtttgtgtttatctgacagctgtttgtcagttcaaagcatttattttttgtcctccaccattatgaaccatcctttgcaatggtcactgccccaaagcctgtccttaaacaactgtgctaggaatgaggaatacataatgggtgtgtgaagaactcatggttttttgtaagggagacaggatggcagacaaggaagagtctgccttcagacagtatggaagacagtattttattgcatattatagaaaacagtatattatttcattttgttgatcttttaaagattctgaagcatcactgataatggggttaatagaagagttaggctagcttacctgtctccccacttctgatcgaataggtgcctgtgaaatttatgaaaaggaccgtattgaacagtttgctgcctctgtttccccttttcctctcccatgcatatatatacacacatatatatgtaaggtacatatatatatatatatatatacacacacacgtatatatatatatacctcccagcatggccaagaagctttggcgttttatttccatctttaaaaaagggtttagaggaggtcttccatactatttaaagacctcctttctctagacttcccgtaacatctgtgccctaagctgaaggtgccctggggcttcatttcttgctctctgccctaggctgccacttcctgcaggtggtacctgctctcaaatctgtgccctttctctgtcatttgtcttacttgttgcttactagcaaggtagtcgtcttgtctgatccttccttccttccttccttccttccttccttccttcctctctttttcttttcttttttctatctttttctttcatttttcttttctttcctttcttccttccttcctccctcctctttctttctttctccctccctccctccctcctttcctcccccgttcccttccaccctcttgtctcttcctcccttcctttcttccttccttccttctcttcctttatttctctctctccctctcttttaacatatttacacactgcaggaaagagcaggtttcaggaatggccagtatgatacttgctgcctggccccagaggctctactatctcgctttttttttttttctgagacagggtctcactttattattacccaggctggagtgcagtggtgcaattactgctaactcctgcctcggcctcctggcctcaagcaatcctcccgcctcagctccccaag

SEQ ID NO: 72401 - DNA, 1347 bp, Homo sapiens
atgaaatgttatcatttttacaaattatttttaatgtaatgaatcagaagtagtatctttttaaaatttgtattgcttgattaatagttggaatggactgttttcctttagagtcagactttgataaacgtttgtttagagatgttaatttatctgtttaggtcttagtattctcattaatttatatatatatataattcatatgtattaagaatgataaccctttgtcatattggttgttcttttttaaactactttcttttttatgtaacattttaatttctgtatttctcgcattccttttaagcttagaaatattatacacacttgaaatcaaatggatatttctatagaaattgtttaactcattatggctagtatgccagtagattttatatttcaaaacattgattaagcattagttttatttctagactgtcccctgctcttaacctccccaatacttctgtatcaagtactcatatcccctaataaaactcaaaaggatgacacagggctggggtctcagatctttttttcacccctggatgtgctgtctcctccatcccctcaccagagaccaggcaggacgaggtcagattctttattattcactcattgatttatttagcctctaggggtgagtttattttcataagggtagaatacacacttggaagatttattgatgttaccaccataagcctgcatccttttattttaatagatgaagtgtttagaggacatgagccaggtcaagcagcaaacagatctgtgtcagcagcggatgttgtgttgtatggagtaaacctaattctgcccttgatgtcacaggatctcttgaaggtaattaatgaaattgaatgtgaacataccactatgtgtaactgaagttcaaagatactttagacaagaatatatctgtgatttaatttagtagttgtatctgctaagtgcacatgaagatacaatttttgtattttcattaacggttacttgtgcatgcttctcagtaacatgggcccttacttagtctctgtttctgccccaaagtcctgcaggcacccatacattagtgactcgttttgtcagggagtgctacagaaaggagcctgtccttttagaaagtacattctgttagcagttttgattacctcataatttgtcactaagggaataaagtaagttaaaagtttcagtgttttcctctgatactttctgaacatcattctcaagttaagggattgagcaaaggaaggcattttccaaggggcaccatgtaaaaatgggatggtatgcttccaagactgatgctgttttaaagtttttgcacattctgactacatt

SEQ ID NO: 72402 - DNA, 1896 bp, Homo sapiens
atatacagggcaggactgattatctgaagttacgttctgtgccaagaggaattaggtaaaggaaaaaggaaaaaaacagacaagaactttgaattgggcttcactctgtagaggtcggcaagctgcagcccatgggccaaatgtggcttactgtctgattttgtaaacaaagttttttttcctttttgactcattacttggaaagagatggagggaaatggcagaattctttgaatggcagggagacagttatgtcccatgctttgggtgttctggctttacatgagcggaaagttaggatgaccctcaaaatggggagtgtaaagtctggtttagatattctttgttatgtgcttgtcctgcctccaacaattagaaatgttttggaaagtgaatatgtatccaagcagaggaaataaagcatgagaactgagctttaagaaaattcctggtttatttttataggttcttcagccacttcagcagcgattcttaagagtgataaaccaagaaaacttccagcagatgtgtcagcaagaggaagtcaagcaggaaatcactgccacactagaggccctgtgtggcattgctgaggctacccagattgacaacgtagcaatcctgtttaattttttaatggacttccttaccaattgcattggattgatggaagtttacaagaataccccagagactgtcaatctcattatagaagtttttgttgaagttgcacataaacagatatgctatcttggagaggtaagcactttctaattttatcccctcaggattaaaactctttgaagctgtaataaaataatagatctttgcttaaaatttgattagtattatcttaaataatatttttattccttcaaaagatttttaaaaaagatttttgaaaagaacttataatttagagaaagtcatgttgaatgaatgtaaattttttttttaatttcttctaaaaggaaacaggatacatatacagaacgttcagatttgttacataggtatatgtatgccatggtggtttgctgcacctgaatataaattcttgtcctaaaattttgttagaaaaggggtaaaattaaaaaaaatatactcttaatatatgctttctagaaattattgttttaatgtagtttaaagcaagaattattgctactgttggaattcggagttaatttatatagattatattttaaaatttttttaatgtcagtgtaccaagtagcataatttgtgcatttttttttttttcagtccaaagctatgaacttatatgaagcctgccttactttgttgcaagtgtattctaagaataatttagggcggcaaagaatagatgttacagcagaagaagagcaataccaagacctgcttctcattatggaacttcttactaacctgctgtcaaaagaattcatagatttcagtgatacaggtaaaatgtaacgtgatggtttttaaactttgttgttatcctcctttttattaaatcaaaggattgttttctgtaagagacatctcatgaggaaattcaatttatggaataaatgaaagaagatctttgtggtcaaagtgagggtgaggaccagtggccctcctgcttgcctttcctcttgtaagaataatagaaatagtatctctcattcattgagatcttactaaatgccatgcactgttcttacctctcacaatggtatgaagtcaatcccattgttattctcactttatagatgaggaaacagaagcacagagagcttaagtcacttggccacagatacttagccaggactgggattcaaatcccagcctgtgactccagatgccagtctcttcagagttacacttcctgactaatcacttctccatgttcctcacggtggccac

SEQ ID NO: 72403 - DNA, 1034 bp, Homo sapiens
aaagaataaatgacttctgttttatacctacaggctgttgtctgccattctcagagtttcagaagttgaatctcgagcaataagagcagatctcactcatctactaagtccccagatgggcaaagatattgtttggtttttaaaacgctgggcaaagacttatctcctggtggatgaaaaactgtatgatcaggtcagaatgtaaaacttaaaacttcatttggatttatgatgatagcagttatagaagcaggaacatttttcttggtggtttttcatcaaaatagaactgtttaagagcagtttaacattttctgtgtggaagagaattatgtgactggaatgctgttttaatgtgtttttgagcacatcccttgatatcgtttattttaactgctgttgaagatacagattattatttgggaatagattatgcttttttgtatttggtttaatactatgttaattttttaatactatgggaataatagaagttgacgggaaaatcacactggaaaatgtgagtggattgaggatgtctttttttttgaccagtggaaatgagtacatgtgtaaagttgatgtgaagtaagcactacttcagattagatactaatttcagttcgatttttctctgttttttttttcttgagttgatctttcttgcttaccttaaaaaatttgtttcctctcttaagataagtctgccattcagtacagcgttcggagcagatacagagggttctcagtggataattggctacctcttacaaaaagtcatcagtaacctctcagtctggagtagtgagcaggaccttgcaaatgacactgtgcagctccttgtcactttggtggaaagaagagaaaggttagcccattgttggaggctgactgtgtgtgtatgtgtgtgggtgagaaactctttttcacttcttagtgtagtcctttgaactggcaaatggttacacggtcctaattccagatagagcctacatttttggagtaatgggttttaaaaactatgtcacagtact

SEQ ID NO: 72404 - DNA, 1799 bp, Homo sapiens
cagcctggcgacagagcaagactctgtctcaaaaaaaaaaaaaaaaaaaaaaaaaaaaaaaagggtcctgaaagtgaatttgaaaacaacatgtgaaatttcagtatctttaactttattttaaatgtaggttgcaagcagagatgtcagtaatgatattaacattggtttttgtcagctgcaaaaccagtaactcaaacaggatgctgtccccttcattctttttagtatgcaaaaatatatggatatcatttaaacatgcaatagaaaatgtggctttttaaaaaatagttgaaatattaagctgataaccaaggaaatgttggggaatttatttcctttattgttgcattctcttgtttgaaatgaaatcatactttattgaaaaagttatatattcattttaggattaccttagtcattagatttagtgtctctggaaatcagtgctttgctctggtttggttggtggtgaatgttaatttaaaaagcagttcatttcagggtgctgtcatattatatattctttgttatattttttgcttgggcagtagcatcaggaatgctttccttgtattttaagtgctttttccatttttgtcagatgttagtgtgggagcaaaacattttggtatctgagagcacagactatggaggattgggaccaaaaaaaaaaaagtcaccatgtttttaatccaaagaattaatatgaaatttaatgttatatggtagaaacatttcttgtttcactaaaaaagcagctcacatttcttaaaacaggtatcatttgagaaataattattgactgctgacaacgtaacagggagccttcgggtatttgaacaaaacagatagaagtcacttctcttttagaactctttataaaggagagagaataaataagtaaattatgcagtatgttagaagacagcaaatgtgacaggtaaaaagctagagtgagtatcagtagggattgttgtagttgtcattagtgtgatgagtgttggctttatctagaaggtgacttgggagcagagatgtgaggttggtaagggaggccatgaaggtgtctggggggagagcattccaagcaaaataaacagtgaatgcaaaggccctgggcctgcttggcatgttcaagaacagcaagaatgccgtggtgggttgagcagaatgaggtggaattttttaggagatggagttaggaaaatagagggaaaacagagaaggtcttaggcctttgtaacatctttggcttttgttctgaatgaagcagcatgccattgtagggttttgagcagaagagtaacttaaatgttaagaagtttactctgctgcattaagagtaaatgatggaggctgggcactgtggctcacacctgtaatcctagcactttgggaggccaatgtgggcagattgccttagctcagaagttcaagaccagactgggcaatattgaaaccccatctctactaaatacaaaaaattagccgggcatggtggtgctcgcctcctgtagtcccagctactcaggaggctgaggcatgataatcgcttgaacctcggaggcagaggttgcagtgagctgagattgcaccactgcactctagtctgggcgacacagcaagaccctgtctcaaaaaaaaaaacaaaatgcaaaaaaacccgagagtaaatgatggaagccaggagaccagttaggagacaaattgtagtaatccaagagaaagatgatggtggctcagacctatagtggaggttgtgagaggttaaagctctgtttgatttattgtgctga

SEQ ID NO: 72405 - DNA, 2924 bp, Homo sapiens
ggatgttgcctatgtatattccttttcaattttcagttacccacctctttctgtctagctgtcaagagatatgaataatttgggccatggatgtctggttatttcagtgacagaagttcaattctcccatatgggaggtgggttgtgggtgtgcagttagttgtgttgatcaccatggagtgattcctgtacttcttgctcttgtatgttttcccccttttgataactaccacggctgtcagcattgttagaagggagttcctagatagctgtgctcaaaggtcggctgtgtcccctctccttttgctatgcagtgcttagctatctaagctatgttatggagccacagaagtgcacgttgaataggcaatgcagttcctcattgtttatttcttttacttgcaatagactgccaatggtgtggcctctcgtgaggaggaagaaataagtgaacttcaagaggatgatcgagaccagttttctgatcaactggccagtgtaggaatgctaggaagaattgctgcagaacactgtatacctcttctgacaaggtacacacagtccaaagaaaccccatggagcaaatattctctattcacaattccctggagagcacttaaagtgtttaaagactttaaacacccccaccccgtgtcccagcacactggaacaaatggacagaaacatactcatgattgcgttccttggcttagacatttggagcccaggcactacagcatagatggcagagagattatggaaaacatggtatgagaaatgatttgacccatatcagtaaaaacttggaataaccagttttcaaatgcctgttgtaaaccttgattgtttgtaaagcagtgttttaattctatgttataaaaaataaatcataattcctatagtgctatgacaacagttgtgtactataatgtttttgtatatgtgtttttacgctaacattcaattcatgttgtctaatatatggaagttgtaagttgttccatgtctttgcttattgaactttatgaagctactgttttcttctcttttagtttattagaagaaagagtaacaagactccatggtcagttacaacgacatcagcaacagttacttgcttcaccgggttcaagcactgttgacaacaaaatgcttgatgatctctatgaagatattcactggcttattttagttacaggttggttggtggtttctttttaaaatgtaattgccaactgagcaatttaagccttaaaagaagcttcctatatgaaaaacaatagtgtatatataatattggataaaatttggatacagccattttctgtcatagaactatggatgcatttttaaaaaatactggctaatatgtatgcagtgcctattgcataccaaatgtttcatggatctcattctacccgctgaattagtattgctaggtagtattactattatcatcatcatcgtcattatccccaactaatagatgaagaagctgagactttgagagtataagaaactagcccattgtcacactgctattaatttttagagccagaatgtaaatctaggcagtctgactcttaggatcttcttttttgaccaccatactattagtgtttccatattttaaataataagcaaaaaatcttgacttttgaaaatgaattccctaatattgacttctaatatagatagtagcaaaatttctattaactttacagaatacagtactgaaaattatttaaggtagtagattaaaaagcccctatgaattacaaaattggtgaataaaacatttgtccttttctgtagttttgagggttacttatctgagacatagaaagttttttttgcataaacttgaaattaacaggttaacatttataatttacatcaatttatatgatgtatataaatcaaactgaaaacatttatagtacaatttgataaatgtagatttgttaagtgttcatttttaattttttttaaactgaaggctacctcttagctgatgatactcagggagagactccgctaatacctccagaaataatggaatattccattaagcattcatctgaagttgacattaatacaacacttcaaattttgggatctccaggagaaaaggcttcttccatcccagggtacaacagaacagattctgtgattaggtaatataaactctatagctgtgctcttgtaatttttatactgttttataaattctgagttgatgggtagatgactggagtgataggcacgttgtaaatctgatacatgaaaaaaatgaaaacttggagaagccttgaaatacacaaggatggcaagtactcagtatatttaggcagtgccactctagtgagagttgacagctatacccagtactgaagaaaagtaatgtcaaattattctgaatacaatgagacttggaagggacattgaatgtagttaggaacataacgcctgtccatcagagagcaatactgatgcatgcaggcgccctaaatgaagggaaccagatgaacgtcaacaagtatcgttcataaaagctaaaactacgtttcggtggctttctcatggaaaatgatagataaaaatttgtatctcgtaaaatggaaatatgtattctaaatgtgaaacttaagagccctgttataatacaggagagtgcctcaaatgaggtgattcactttaatcttcctaatactaatggcaaaattttcgttaattcttaatggtgaaattaaggagggataagcctgtattaaaaatgttccggccaggcgcagtggctcacgcctgcaatcccagcactttgggagaccgaggcgggcagatcatgaggtcaagagattgagaccctcctggccaacatggtgaaaccctgtctctactaaacctgcaaaaattagctggat

SEQ ID NO: 72406 - DNA, 1046 bp, Homo sapiens
accaagggcatgagcacatagtgtctagcttggtctccttagtcatctctgtgcacgtgctgctgccttggctgctgggttttggccagagtggccatggagcagggccagggtattatgaaaaagcgctaggttaggtttcagttttctgtgattagactgaaagatttagttgccaattgtcaacaaccatatttctcacactttgctcgatgagttatattatctccaaaagaaaccagaaggctgtttagaagtccatagtcttactgtaaattgccatccaatgagttgaggctcttgcagtctacctctgatcttctgttctaatatcagagtgttaataggagggattattgaaaactttttttaataatagaaaggcatataagacttttactttttagttatacttttatgtatatgaataattaaaccacgataacatgtgttagatatgtacctaaaaaacaaccaagataggtcttagaaaatatcctgcttttttttttttttttttggagactgggtgagtcagaggatgctattcctaaattcctcttgtgatatgttaccagtctgtttattttggcaagataaactgttaagacttaacaaatgatggctgtaaagcacatgctttgttaagtatataaacaggccacagatgtttctatggaaagaaagtatcttattcatctccatattccagtgcctggctcttagcgttcaatagattttttttttttttttttgagacagcgtcttgctctgtcacccaagctgaagtgcagtggcgtaatattggctcacagcaacttctgcctcccgggtttaagcgattcttctgcctcagtctcctgagtaggtggaactacaggcatgttccaccacgcctggctaatttttgtatttttagtagagacggagtttcgccatgttggccaggctagtcttgaactcctgatttcaggtgatccacctatttcagccttccaaagtgctgggattacaggcatgagccaccatgcctgactgagagctct

SEQ ID NO: 72407 - DNA, 2010 bp, Homo sapiens
attgtaagttgtgttggttagattctgccaacgtgtatgtgagttttttcgtatcccttcagaggtgttcagagaatagagaactcgagaatgattatgtttatgtaatcgggcactttcatgatttgatgaggaaaggaaccaggtcagacaagtgtttatacggtagagaaaatgtagtaacagaaaaatagaagtttaaaggcatgatatgtacagttgaatgtttcagagggatactttacattctaaacataaaaatccagggtaattttaagtatttaacattttaagtatttacagtttactcaaacctctttcaaatgatcacagattctgaactagtcaggttttatttaacatgaattccttgcactttccctctccaccttggtttattttctcttctaaaccaggtggattaaagagcatgttgatcctatatttagaaactaagctccttttagttctgtttgtgagttaagcgtgttcctaaacgttttaaagaattgctggaagatatatggcatccttggtttgcaaattttaagtgcagaatttatttgaggacactgacatcttgacaatttttccttcaagatttgacataggagtgttggaatatagaaagcctgcatgcatttgcagagaagcagatgtgtgttgtgcttatttcacagcaggcgtgctctagtgaagatgaacctaacaggtttcattcaagaaaagtattatttcttttcatttattttactcttttaattaatttttaattgagctgtttatgatatttaaaaattattttttaaaataattggtcacctattgaaaaggacagagggaaaagatctgtttaaagttttgcattagtcgtagaaaccaggttggggatgtgtggtgaagttgagggctaatggggtggcccaggcatggtgactttcttaagagtaaacctcctaaatgtcatctcaacctcaagcggtttccgttgtatcttctgtatgctgggagtagaggaccaggggagtatacagctaataccagaaatataggaacaaatccagccaaaccaaattggacctctgggacagaaaccatttcatcttttgttttcttgggcacccagtaattgtagtaatagtacataatacgtagttgtcctgagatggaaaagtatataaagacatgatctttttttttttgagatggagtctcgctctgtcgcccaggctggactgcgatggcacggtcttggctcactgcaacctctgcctcacaggttcaagcgattcttctgcatcagcctcccgagtagctgggattacaggcatgcgccatcacgcccggctaatttttgtatttttagtagagacggggtttcaccatgttggccaggctggtctcaaactcctgacctcgcagtccacccaccccagcctcccaaagtgctaggattacaggtgtgagccaccgcgcctggccaagacatgatcttttaagtaaaatttgaaaaattgaggcatattaaagatatgagtttgggagttaacatgggatgaaaagatgatgaacttttgagggagactgcacagttacaggccaggcagtcatgaagagcaagagttcaagcaagctgcttcacttttttttggagcatgttagcttattggtaaagtcagggtatgaattccttctactgctttatgacgtggattaactgcatgaaaagtacctgtataggccgggctcagtggctcacgcctgtaatcccagtactttgggagactgaggcaggcggattgcctgaggtcaggagttcgagaccagcctgccaaacatggcaaaaccccttctctacttaaaaatataaaaaattagccgggcatggtggcgggcgcctgtaatcccagctacttgggaggctgaagcaggaggatctcttgaacccgagaggcggaggttgcagtgacccaagatcacaccactgcactccagcctgggtgacaagaa

SEQ ID NO: 72408 - DNA, 1030 bp, Homo sapiens
gaaagaaaagggctagttaagtacttcggcaagtacaaaatggtacatccaacagtaagtgttggatggattaagattaataatgatcatattccttcactaaattttccttggctctaatatgtcagattacagaaatgaaacctttaacatctgagaatattaatactataaaactagggagcagtatttcaagagcattcccttcatacaaaacactctaccaggtgtttcatgtccgtattgtatcactgaagtaaaatataggttagctttaaatggatttaagtataatttacatttggtattcaaaatcttttagcatttattaatagcaatgatgtaggttaaactgagattcaaacaaattgtaagcaaactgagaattaataaaagaacgtgctcattatattttggttgaatgaatgcatgaatgtctagggattcaatggtatattgcttttctaagtgcacaactgtttacttccactaaagcagcatctatatactctttattgaacttgtctgctaagtttagcaagaagctgtagctaggcatagttagcataatacagatgactgtcattgttgctgtttttagaagaagcagtatgtctgactggctggcatctgtttctctctttgtcataacatgctggagacagatcaattttcaaaatgtaggtagccctcagttaaaaatcaattgatatgtttaaaataatgacctgtaatgtaaagtggactgagggacaattttcaatttagtttaattcaggaattaattttctagaaataaccagctacagtgaatttttgtcttacctcattcggcatggtagacacgtgacccttacaaaggaagaatttatatttatggattagtaattctttctaacaggtacatcgaaaaatcagagaagattcagatatggcacaagattctctgcagtgccttgcccagttagcttctcttcatggacccatcttcccagatgaaggatcacaagttgattatctagcacacttc

SEQ ID NO: 72409 - DNA, 3131 bp, Homo sapiens
cccctaaagtcttgtcttctcatcagtatggctgcttaaacagaaattattttaaaaggttcttgctaatttataaaaatgtcacatggttatgaagggcttaatatcctgcagcagaagttctcaaacttttaatttcaggacccctctatactcttaaaaatttattgagaactccaaagagcttttctttatataggttatatttgtcctgttaaaaattcaaacaaaactttacaaaataatgtgctaaaaagtaacagtaagaaacgattacatattaacataagtaacattttaattaactatatttttgaaaacgaagcaagtttaatgagaagaatagcattgttttgcatttttgtaaatctataatatcagacttaatagaagacagtcagattatcttacctgcttctgccttcagttagttgcagtatcgcacatcgtgtggcctcggggaaattccactttttacctgtgtgacagtgagaatgggaaacgcagatactgtcttcatattattatgcaaatagtttttttcctcacaggcaacctgacaggcttttaaaaagcttcagggatccctgggccatagtttgagaactgctattctagagtgtaggttttatacttattatatttatgagtcattggttaagttggtattatggaatagcagtttatctcatgtataactttagacagtcctctttattattggctaaatatcaagatgtaagcagtatgttcccacattggccagtgtgtatccccaataaaacggtcaaaagctggaaaaacaattcatatgtgtgtgtttatgtgttggatgctaatttgcagttatagggggaatatacaagttaattagatataatgacgtggacagaagcccaagtaaaaatcaattaaaagtaaaaaagctattttgcttaatcccaattgttaattttagtttcttttcatttgttgtaaaaatatagatgagcccttcaactgcctttttctgattgaaccatttaaaataaagtagttatgtggtatgtattttaaaatatctagaacaaggttatctatccatgggtatatataaaggatattttctatagaaatattcagactgagcattaaatcaccttgtggtttctttttaaaatcagagaaatgatggctaaaaccactatcaagatcaaagagataattgtaactaaattttaaaattccgttgcctgcctcatctgacaggaattgttttgatacgaatccaagtccaagtctttgtattatgcacttgactgaaagtagattccactccagcagtttttgaaaaggtgaaaaacttgctggcagtactggaaacaactctaccagatctgaacagctgtctagacaaaccagacagctgctcctgtcagctgtgaacaaccacacgcaaataacttgaatttgaaagttaacccttttttgctttatttgaacaatttttgtgtttgtagctattttcacttaagcagtttatgaacaagtttgttacttgttttaaaaatgacaatggctaatctttttatttaactttggttaaatttagttttagttatatgaatttattgcctactttaaagcacttttccactggatatcacttgtgctagatttggataagcatcagtatactgttgcataagagcaagactttaaatatgttaatcataagactttaaatatgttggaatactttgggttgcattctgccctatagaagtttacaaacttcttgattttttttccttctataaggtcttggaaaaaaaacccactttcattgtgttttcttcctacctttttgaccagagtcttcttgatctcgcttatggtctcttccttctttgctcatcacataaatattggcattcctatcttagttctcaactttgctgactctgtacactttcctgtggctctctctttgacacgtaggacttcaggcaccggttcccagatgactcctacatctatattcagcacagcctgctccagagtttcagagccttataatcccagtgcttactggatgttttaatttggatggccaacagacatctcagatttaacatgttccagtagaattcgtcatcttccttacttgcttctccttccttgtcttccttttcttgatgcatatccttgccattcatctcactgggcgtcctgctgggctttgctttcccttatccctctgtcccttttccatattcaggtggtgattcagctttccgttttatgatacagtttatattgaaatacatgttcagatatggaggaactcttttgtaatgatgacattggaagaaaggcaagaatttatattgtataaaaattaagcatttattattagttttatgtggtttatatttcaggtaacataaattaagcttgaacagcacacaccgtctcgaaagacagttatttatttattttaactttatttttagttatttcattagctatttcattgagggtattctttcttctgattgctcgcttcgagaccataatgaacattcaagattgtgagatgtattcttattgtcccagattacattctatctgttgacagaatatatccctggatatcatgcttaaatgctgattagattctaaggcatcgtgacaaaaatttaattacagatttcggataaagaacttataagagtgagttgtgttcagaagtttatgaactagacagtgtgcatatatgaatttgtctattgtacttggaatttactatataaaacttaaaatacattggaatatagtttgaaaaatatttgtattttagaccaaggatttgcagacattttttgtatagggccagatagtaaacactttaggctttgcaggtcatatgttcatattcaacactgccattgtagtacagaagcagccatagatgatacataaataagcacggcggtgttccagtaaagcttattgatggtcattaaaatgtgaatgttggccgggcgtggtggctcatgcctgtaatcccagcactttgggaggccaaggccggtggatcacctgaggtcaggagtttgagaccagcctggccaacatggcgaaacccc

SEQ ID NO: 72410 - DNA, 1063 bp, Homo sapiens
ggaggctgagccaggaggatcacttgagctcaggagttcaagacttccctgggcaacatagtgagaccctgtctcattaaaaacaaacaaacaaacaaaaagtacacacacacacaaaacacaaagaattgattgccttactcagaacatttatttcatatactatagcctttggcatcccgttattgtggaaaatttcaaagatacacaatagtggagagaatacccagctttaaacagccagtcttgtttcatctgtgctctgccatccccagaatattttgaagcaaatcctaggtgtcagataaatcagtatattgtagtattgggtgaagaacacaacattgaccttagaccatgatcggtgcctcttaagaaaatgaactcactctatattgttagctcttagggttcacgggctgattttttccccctttttaaattcgggcttctttcttttggcttttttggccttcacctctttccctgtacctccacaagggggcagataaaggaagagagaagggaagtttaaatgaaccagatttgagtttcacttttgttaatcagtcgaatagagttgcagaagattttgggggtgacttttcagaaacaagcagtgatttttctccttgaaacaactcatagtgcccctccttgctcttcagagacagaataatattagctattttaaaaggggttaagcaattatcttaaaaaaaagtttccagagcattattacagcctttaattttccctgtgaataataatttttctgtaaaaataacgatttagactttactcaaaatatagtatttgaatttctatctacttttttcagacgatagctctgggtgattatcattaagatttctcattgagtgatgtgaatgttgcatagtcgaagtattttagctgggcaattgattaccaatggaaggggcataaccactgttttttgtttgtttgtttgttttgagacagagcctctccctgccacccaggctggagtgcaatggtgtgatctcggctcactgcaacctctgcgggagagtgttttcaa

SEQ ID NO: 72411 - DNA, 1869 bp, Homo sapiens
taggcaaaggaaattttcagattgtccatatttgcttgaagataatgtgtagctactgtatgccttatttaattatttttttgagtgtcattcacaatcacaaaacgatacccttactgaaagtgttagtggataaacttaattgcataattacggacctgtgtatttccagagatgatgttttccccactacatgttaagatgtacgtatttaatgacaatgctgtttgttgtatgagaacttgagacagaagatttagtaggattatccagtgacagtcagtacagggtgcgattaagctgtccttctggctcttggcctggtatatgtttgtctctggccatgcagttacagaatagggcaggtggcatgtttatatatgcctttgatttcacagaagttggtgagctttcctaagtggagaattttagagctagataggattgttgtgggagagggggcagggaatggagagttgattcttcactcttctgtggtgcagttgaatttacatgtagctggaactgattttccaagggattatgatggcaatgagcttagaagattggttgggttttagcacttcagaattggatcccttgccggaacccttgctaagagggagtggacttgtatttggtacagagaccaaaaaaaaaaaaaaaaaaaaaaaatcactgtactaaatgtcctgattctttaatttggtgagaacatggatgggaaggtaaagtaagattagatgtgtatgatagattttttttaagataaagggttagcaaaagactgaaagcagctctgtttggctttcttattgatggaattgtgttttgtttggttacaaatgaattattctgataaaaatataaattgcatgcattcagtatttattttagaaaaatatataaagccatagcccaagaaaattcttgaattacactcttatttgaacttcggtgaagtaatagctatttagttccaatcttttgtgacttgtgtgtctcataaaatttgactagcatgtaataaaagacagtttagtaaataatcagttcattgtcaaactgttctttcgtggtgacatatttgttgtaaaagataaaacaatgtaatgtgcagatattataaaatgctaaagtggtgactataaaccaaacttttgaaagttttaaaaggaaactattgttttattaaaattatttttaaatgaacatcttgctttatttaaccttgaaattatttttaaaatattgctttaagaatagtagtgctagatttctgaattctggtggtactggttctgtttgttttttaagttaagaatttaagaattatctggggtagaaatggtattttttttgatttcttataagaattattaagaattatctggggttgaaatggttttttttatttcttatacatacagatagaaatagtcatttgagaatacctgattaaaaatgaattaccttaattctttatattattttgaatgtaaagatatggtccagatttgtgtatcattattctgcccacattgtgatatgctcttcactagttttgtttttcaaattgaaaagtaatgcatgtacgtgaataataacaatattttaggtaatattaaacattatacaatgcatagtaagcctttctcccatataaaagccagcatagtctgttattcggggcagcaacttcagcagtttcatggtacagtctgataactaaaacatatttcttgtcaaaataacattgtctttaaacatttgttctgtataaacattatgatgctgttccatataaacgtttattatactgttctttttgtttcatgttttttatttaaatgcttttgggaataatta

SEQ ID NO: 72412 - DNA, 1713 bp, Homo sapiens
tctcttacaaaaaattagccaggcatggtggcacacacctgtagacccaattatttgggaggctgaggcaggagaagtgcttgaacccggcggtcagaggtggcagtgagctgagattacgccattgcactctacctctagcctgagggatagagtgagactctgtctctaaaaaagaaaaaaaaaggagaagaaagaaaacaaatcataactctttaacattgattctcaactaggaacaattttgtatacttgggacatttggtggtgtcttgagacaatttggattgtcacaactcgggaaatgctactgccatctattgggttgaggctacggatgctgctaaacatcctaaacatcctacaaagcacgggacagccccacacaagcaattattgggcccaaagtatcaatagtcatccacacaaaaacttgtacatgaatgttcagagcagtactatatgaataggctattcataatactatatgagtagaaacaacccaaatgtccatcagctgatgaatggataaataaaatgtggtatacccatataatgggaatattacctgtcataaaaagacatgaattactgatacatgctacaacatgtgtaaactttgaaaacatactgagtgaaaaaagccattcacaaaagaccacaaattatatgataacatatttatgaaatgtccaggatgggcaaatctatagagacagaaaggttagtggttacctagaactggagtgattggaacaaagtaggaggtgactgctaaagcatatggggtctttctggtaccatggaaatgttctcagattagatcatggtcgtggttgcacacatctgtgaatatgctaaaaccattgagctgtacactcagtgggtaaattgcgtagtgtgtgaattatgtcttaatgaagcctttaaaaatacccatcatgtcacggtgtagaaacccacttcacacaggtcaactgcaccattagtagaattatagagggagattaggggtggagataaagttgtgggagagtggggccattgaagttaaggaaataggagaggtggtccaagaaggagcagaggatccatgtcaggacctttaggtgcatcagtagtgaaaaagcaggaagaagcaaaagaaaataagaaagccaattaagacaagtggatgggagaacaaggcaaggagtgtttggaaagcaaagatagatgatgtttcaaggaatcaggtagtcaacatcgtctgttaccgataggtaagatgtagattgtttttgatctacaccgaatatcagttagaacatagttggtcatatggaagtctgtttatgtgaatgacaggggcaaaagccgtatctcagtgatcaggtagtaattagtaattgatgaagtatagagtgaagtacaattgacccttgaacaatgtgagggttagagacaccaacccccatgcggtcaaaaattccagtataactttttactccccagaacgttttactaatagcttactgttgcctggaagacttactgataacataaacggtcagttggtacttattttatgttttatatgtactataatatattcttaaagtaagttagagaaaagaaaatgttgttaagacaattataaggaagataaatgatatttagtgttcattaagtataagtggatcaatcataaatgtcttcatcttcgtcttctag

SEQ ID NO: 72413 - DNA, 1063 bp, Homo sapiens
acagttggtagagagtgactattttataaaaagaaatagttctctgggagtttggaaacaaagcttgtctaaaagatacacacacataaaatattttataaagtacttagataaagctttggaaaatctgtcatctgaaaatgataagcaatactgcagtgttgccaaaggaaataattccttgtttaaagaaagtatatcttggtttttgacttgaggatattttgcttcatggcttatgagtgagttcttgtgtgaccttttcatatagtgccatttgttggctgactgcactacagctaagtattctttgagtggattagctttaagtgtgggagaaagaacttggcagtgagattaaactaagctacagatttagcactcattagggaaatcaatttcaaggaactcaattctgactaatttctaattttggaaattacctggagatctaccattcaatcagtaaggaaaagaatggaataattatgcagccttgtaccatggagagggtctaaataatcaaatttaacttagtttaaaagtgttgaattgatgccttttaaaagatggtttatctgctgggtgcggtggctcactcttgtaatcccagaactttgggaggttgacatgggaggattgcttgagtctaggagttcgagaccagcatgggcagcatagcacaaccctatctctacaaaaaaatacaaatattagctaggtgtgtggtgtgtgcctgtagtcccagctgttcgggaggctgaggtaggaggattgcttgagcctggaaggttgaagctacagtgagccatgatcatgccactgcactcaccctgggcgacagaagagaccctgtctcaaaataaaaataaaataaaataaaataaaaggtgatttgtctcttaggatagacaaataataaatcatggaaaatttgtgtatttagtgttaaatattttgataatttagaatggtatgttaaatgaggctgtgttaaattatcagtaacaatcccccatttattaattttttctaatctgctttcttttttgtatctatattt

SEQ ID NO: 72414 - DNA, 3097 bp, Homo sapiens
agttggtgggtgggtatgacagtgttcagctgttggataagcttgcataaatagtatcatcttgactttaatctttcggttgttcagaggtagtgtgcatatttctgtttaactcctggaaagttgccaaaataatttgtatcctctttccatcctttgtaccttgactgttttagtctgggaataaaatcaatgagttgatattaggagcctgttggatagaaccaatgagaagaaaaatcttcatttttctatttaaaaaacttttgggtattacctggctataatattttggacactataaaatctgtttcacttttcatctatttgggaatgcattttacaaacagaacggggtcaaacatgggttgaaatctcagctggccttagataagtactccaggtcacttctctcaaatgtaaaatgaggatataggttgttctgcgaattaaacaaaataataccttcaacatttattatttttaaatatcatttgaattccactattgagtaggaacagtgtgtcctgagttcaagtcttagatggatttgtataactgcatttgaggaagtactattaacactgaccagaccacttagaaaggagagctaatatttattttgtcatatctgattttctgactagttgttataagatctaaagatacagtggaagatctaaagttagggagaaaatgttctattatgtttgaacaaatgcattgaaacaaagcgttgaaacagtaatgcctcacaattatttcttatcaaataattacagcaaactctggcctgttctattctgactgcgctattgagtgaattttcaagttcaagtaaaactagcaacattggattgagcatggaattccatggtaactgcaaaagagtttttcaggtattggtagttttgttcttgagttttaattattggatcattcactttttactcaatctattcctaatgacatgagaatatttattttatgtagttgaatggtagcctgtacttcaggatttgttttgtgatttcaaaggatatagtaaaatgataggtttggtgaatgtagttgatggtttaaaattacttgtttaattctagtcttaaaaacaatacttctataaagatctttagtttattatttatttcttattgtgtttagatataactaattcaattgaagggactctgctggccttaaaaataggtctggaagaatgccagaaggccgtgtatttcaaatgttattgcagatggtgcgggctctttgtcttgtatgtattgtttggctctggagtaaagttatgtgaaggcattggcttaaatcctagggctctgcactatagcaactgactcctctggctccgcagtagttgtcaaagactctcttctctatggaagtagcatttatattcaagtaaaagtattccatctggcgtcacttgaaagcatactgcgatgtaaattacaagtagaggcctaaaaatggaacacgttcttaaggaaatggtgttttccattggaaattttaaggtgtttgttttgtttcatgattctaaaaggggatacattttgaataaatttttcatataaaatatttgtgatttattgactataggaagaagaccttcgtcagatcttcatgttaactgttgaagttctgcaggagttcagcaggcgggaaaacctcaatgctcagatgtcttcagtatttcagcgttaccttgcactcgccaatcaagtcttgagctggaactttcttcctccaaattatatccttttaacaaatgaatagtttatctgtggtaattttcataggtgacttaattacagctcggagtctttcacctctgcagctttcataaaacatattgaaagaaaataagattttttttaagaaatagaatttaatttctttataatgccaaaagacagtggatactaggataatactagaagatttaaaagtatttactcctttgtagaagaagtttgaatacatagaaacgtggtggatgacggagctgttgctaattcaggattagcattattctttgggaaggaaaaggaaacaggtagaaattaccttttaagaaaccgaatcattttttccttggacaagtaattatgtttgatttttttgactgacttaaagctagtttggagtgctctaatttaatctttatggatggtgatgttgttcaagtataggtaataagttagtaatatgtttactcttcaagggcctttaccagtataaaaaaatgagaattttgtttttaggaaattattcaaaagtttaagtgggttgtattatcaatgcatatatctgctttttaaattagttacttaaagtagagaaatttgtatttcataaactttaaggaactgctgtctcatttactatgctgggacatctgctgcccgttgatagtaatatacagtgactacccatttgttgtgtaaagtccaatagatctggattcaaggctctgctcatcttaggcaaatcacctgaacctctctgagtctcagcttttccaaatgtaaaatgggggtatggattgttgtgtgaattaaatgaaacaatacatttaaaacactcaggagttagttactatttattgagctcttaatagcctccgtgaattaaatagttcattatataactaactgtcttttatactcttctttgttgaactaatacgcctctgtgtggtataggaaatttaatgcgacctgttctagatgtttttaatctgagagtctgttcaggagaaaaagactgatgataagcagacaggaaatagatgtgaaatcagatcagagatctagtatgggactcatttttattgtaacaagagccaagaggagctacatttacatatacagaaactcgctaattatttgtggctggtaaaattatgacatttaaaggagtgtggtggggtataactccttcttccatttaaacttagtctattcacgtagtagaatattaactgtgaagggctctgtcaggtaaagtgagtctgactcgtgagctctccaggtttctttcccaaaagcagtcactgagctgctgcattatgggg

SEQ ID NO: 72415 - DNA, 2427 bp, Homo sapiens
aattttaatctgtatttaaacatataattcatatttgtcttatttcctttgaaagcagtaggcatacgttaaatcactttaaagctgtttaatttagcatttaagtctcctttcttcctctttgccatactagagagaagtgggtgagaaattcacttgtctacggcagcccctggatgtgatagccaagttaatctctcttatcataagtctcattgatgtttgcatagaagagcagctggaagtctgctttatgtatggcaacctttcataaagtttattcttggtaataaagctcctggggtaagagccaggctattataagagacaatcctctctctgaacaagagtattttattttgtcagctggagttagtgtttgagtatcttgggcttgtgacagtaagctggtgagtaaggcaagctatctctgaagggcattttttcactagcttgaaattaatggcttttgctagaaataaatgagaatgctggtctaagactttcaatgtgaagataagagttacttaaattgttagccagtgaattaacttgtgaattttcagtacttcaatgaaagaagacaattagacttttttttataactttgacacctcattgcattgtcttctacttgtttgacatattaaaattgtcttgtagaaatttataaacaaccaaaaaatagggaacacatcatttattttccaacttctgttatgttaacatagtgctgggcatagaagtaaacactgattcattaatccaaacagcatttactgaacatttactatattgctttagtgatacagcttcagttatagctctgttttttaagtggtgtaacacatttagtaattttaattttgcagaatgtagatcatcatcaaggaatagaataaagctgaaataggtggttgtcattttctatgataatgataaaaaatacagctgctactttaccttcttgtaacctggtgtaattacatggtatttttaagcattatgcaatttgagccttaggacaattatgcaaattaggtatggcagagggtggtagcccttactgtagatgagaaagctgaggtcaaggtacatgaagggctttgaccacagttatttgaagaaggaaatcttggactgttagagcccagattttctaactgattcaaacaacaggattcttgtattggactcctgaaagagtcctgcagaatgtttttatttatcatttattttagatgtaattttaataaattttatttggtttctaacctgtgagcaaatgaaaatgatccatttagaactacctgttagtggcagtcaaattgccagcagcagtgaatgatagacaacaacaaaggatgattgagaaaagctatgaagcagacataaatcaacaagcattgggatctggcaccacgttgccaacgggtggaaggccccttatgttttagtagcttccaagtagtcacttaagtataatatcatataattgccatagaaataattccttaagaaaaatttataggacgtttcattaaaaatgtttgcttgctgcatttacaaaattaacatattaacttaattcttcatgatcttagataagtgaagtattgttgtattaacctcttagaagtcttaagatttgtattttatactgggcaaattcctgtgtattttagtatggcagtcttttatcaattagttagttagtcaactttgatccgaattcactgacattaattactacagcttttgtttccggctgtcttaagtatcagagccactgtctctgatatggaaaaatatctagctctgactttgacaaaggccagagaggcagcacttgaagatactggtcagtagagggtgagttagggggtagtgcactcggaatgcccattgagacctaacagtctgaaggaggcagataagaacattctttaagggtaagaaaagctgaagctggtgatctcctttaggcagatttgatgctttaattttttttctttcctctctctttcctgggaagaagctgtcctctgttctcccttgggagttttatttttggcttgcttccctagctatcttcattacaacccacaatgtgagagtaacttcattttaaggggatttaatccataattaaatattgaaaatgagcaaacatatttagaagtgagtcctagacatttagtgatatgtttaattcccctatgaatagggagaaatactttgttgatatgtgttgaagtactttgctctcttaatgtataatcaatgtttaattattcatcattccccaggagtctctattcatttggcacctttgagccagactagtgtagtatgattaatatttatgatggtaatctcatattcctacaggatttccaaattaaggagagcttatactatttggta

SEQ ID NO: 72416 - DNA, 2341 bp, Homo sapiens
atatgctagtgtgcatagagtgggtggctgatctgggagctagtgaaccagtagtaacagatatgtcctgtcatgtgagggtgccgtgggagcccttagtaataactttctggagaaagtgacgtcataatcttgggagagggaatagaagttcagaggcctggaagtcaaaagagtgtggagtgaggaactgaaaggtcaatatgtctgcagttgtgcgtgtgtgtggaagggcagaagtcaaggagaggagcagccactggtggctataggtgggtctccaaactgggacacttttgagagtgaaataaagaacgactaataattatttggggcaacaggtgaattgaggctgtcccaggaaagctagaatggttcccactgcttataagccatgttaaggggtttgggtttattccaggggcacttggtggttgtatctttgtgggattccagaggctagattataaagtttgggattatgttttctgatccttatctttcagaaaagattgtgaaaagtcaattaagtttctgtgcccttgtggtcaaatgggcttggtaaaatgcctccacttgggatgggtgcttctgtcatcacatggaggaacagaacctagatatgaacattttgaatgtttgtgtgtgtgtgttttacaattttatgtttccataatgatgtatctcggatagctagtatgttgccttttcacattaaagggaaatgggatttaggattagattagtagttgtagacgtaggttagatcagaatttatctccagactagtggaatcttaatcttagtgatttttttccctacaaatatttaacagggagctgacttacatctgttgaacacttcctggagcaaataacacttgtatagtgcttagtatgtactgggcacagttctaggaacatttaacccttataataacactagtagtgttattctcattttacagattgaaaaccaaggccctgaatgctaactgtcttgcccagggtcatacagcccgtccacaatggagcctgggtttgaacccaggcctcctggctttggagtctgtacataaccctttggctcttctactctcacatgtaagcaatgttattagtagcttcaggcatagagagaagtttgggagtattcttgtattagatttaggtaaatttttcacaatgatttttatgttttacagccttcaaaagtatgttcgggaacagattctactagcagtagcagtaattgtaaaaagaggatcattagataaatcaattgactgcaaaagcatttttcatgaagtcagccagttgattagtagtggcaatcccactgtggtaagtgtgctatttgtatttataaatattaacaatttatattttctgttacacaaatagcattatagcaagagtaatggatatctacataaaaatagtgaaaaagctatcagtcaagcaattttcatttgttcaggttttcttctagtctttttttttttttttcccttgtgacaagagttttgctcttgttgcccaggctggagtgcaatggcatgatcttggctcaccgcaacctctgccttccgggttcaagcaattctcttgcctcagcctcccaagtagctgggattacaggcatgtgccaccacacctggctaattttgtatttttagtagagacagggtttcttcatgttggtcaggctcgtctcaaactcccgacctcaggtgatccgcctgcttctgcctcccgaagtgctggtattacaggtgtgagccactgcgcctggcctagtctttttaaatatatatgtacataatataaatgcagtgtactttgctttttcgtttgattctgtattttccatgttgccataaatattcataatcattattttaattgttataaaatattataagttaatatgccataatattgttagccgtttctattgaactttgttttgccatttctaataaacctttgacagctactagtgaatacagaagtgtttgaataaagtagaaaatatctgacatgaaaataattaaaagttgctgtcctaataggccatgggacttcaggagttactgtcaactgaacaaattaggggttattgttcttggctgaattagtttgggaagcatggttctcccaccctctccactctcctgtccaccttttagagagctggagttgtgcctggagagtggctgtttggttgtaatcactctgtctgaggcaggaggagttgcggttgctattaatgattagctgtgattctttgtttaacctatcaacttttatcacctgaatgatatttaactcatatagaa

SEQ ID NO: 72417 - DNA, 1655 bp, Homo sapiens
ttctaataggttcacatttttagaagctattcctttattttaattatttattatattttaaagtttctaaatttgtatcaattctgattatcatctcaattagagttcatgttaagatagcatagaataatcaaaactttaaaaaaaggttcaaattggtttctcttagtggttttggtatgatcaaaactcctgtgtagtagtctaatacgataggaatttatatagggtacaccttttctcatacatttttatagctaaatgtgtcaagaacacttgtaagatttttaaatgacctgagcttgaataggagagaaaatggtgtgcttgactgtatatatcttcatgctcttctgatatattcttgaaggtgccagtctatgcctagagataatttctcatggctttcagatatgcatgtccagtgatcttggcaaataatctggagtctaatcatgagcttttcatggatttcacatgatggttattttttagagcctcagaaaatttctgctttttcttgacttcatttcaactgtttctccctgttgataatgctgtttgggaaactgattgtagtggtattggtgaataaaggaaaaaatagaaaattaatataaaacatttttaaagtgtgttaattttctattttttctcccctgatttagattttagatcagatactataacttgctagctaaggctgggtctttctaagtgtagctttgggattttactcagtttgatcagtactgcaatcagaaaattcacaagcacttctcaccttgtgtaaatgtgacttatattgttttttatattttgagaaagaaaacctaaacatgattgtttttatttctgaacttgctattggagatgggtcatcctgctgaaagcttaatacttaaaaatgaaatattttaacagcatggctcatcacaggtagtaatgttcaatgactagtttattaaaatgtttttcagatacaaagttctgttttgcacagggtgagaatcttaggaaattttctgattgctttatatttttatttttattttttttaaagctgtgttattttttagttcttcatgctttggaagtaacagttgaagagaggtgaggaaagtttgtgaaaattgtgatcggtgattagctgccacctgcctgaggtgtcttctgagaggaactaacctctttgtggtgctagagcaaggtcactggataaaaaaaagaacaggtaaccatcttattccttgtctgaaaagttctgttttaaaattaataaatgcaaaatgtgcaaggtaaaatgaattattgtttaaataaagtttttaattttctcctcagaaactagtaaagtggactatgtcctctttcaagctgccacagccataatggaagcagttgtccgagagtggattctcttggaaaaaggtagcatcgagtctctgcgaacattccttttaacctatgtcttacaaaggcccaagtaagtacatggagggggactgctgaaatacttttgctgagcttatgtgtatctttttagagctttttttgtttgcattttaaaaacttttgggtgggtatagtggctcacacctataatctccactttgggaggctgagagggaggatctccttgagcccaggagttt

SEQ ID NO: 72418 - DNA, 1119 bp, Homo sapiens
aattgtttcgtgaggtgaaaatgtaattacttttcattatgtaaaagcactttgtgaacagtgaggtaaatgtcatggccatatacttgattttaaacagcttttaaaaaatgtaatcggctttaaaaatgctgtgttctgtgtttgcaaggaactagcagcagtggtgaaggtggctctgtctcatttaggagttaggtcttagcagaggaacaggttcaacaactaccttttaaattctcactgaagccattttaattaatttacttatttcagtggtcagcttttatagttgtgtggattcgtttctggcactaagaagatttaacatatacctgtggaggatatttaactcaatgttaaaggaagcaaaactaaacggcataaagagtttaaggaagcattaattcatccttactgccttgaaattgttcagcattaatagatttagaaaaccgttgtgttaaactattaacctaaaataatttgagtctggttttcatggcatatgccttaacgacattgactaggattccatcagtgtttcatctgactttctattggaattcagtgtcattgtacactagttgggaaatagttgatctaacttacaagtattttattagagtgtatttgtttataccattctttcctttttagaatatgtatattttatgaagtattgttgctttgttatgattgagcttgttttggaatacttttgttttcctgataaaattttctaaagagtagtattgctagttctggccatgcttttaaaatgagtttgggttttgagacactgactatttaaaaggtggagtgcatgtattacaagcataatcattaatgtactgcaaagccctgtgttacattaatgtttacatctaaacttcacagaaaatcttttcactccttattcagttgccaccagcacagaagggtaaattcctctaagaagacttctcatacaagtggcagtcaatcgcagttcagaattttcacattcttgtttagggattatgtgtcatttttatagaaggtctgggtaatatattctactaaaggggagactttctttgatgcttcccttttctggcctcttaaaattcttccttc

SEQ ID NO: 72419 - DNA, 1010 bp, Homo sapiens
gtctttaactctcaaggcaccaccttccatggtcaataatgaacaacgccagcatgcagagcacatattcttatcatttaggaaatcaaaatcaccatttgcagtttgcaagcatattttgggtaagtattcacttaaaaaatataaaatattttggcataatcagatctgggtttgctgtcttaaacattagctattttaaattcctttttaaaaacctggtttgtgtagttacaattatttaaattaataatcattctactggagtagctttaaagatattctgtaaagccagacgggaaactttgtttttactttggatttttcccccctagatatagtgttcataatttgttttattattgaccataacatgaaggctgttaatagtaaagagaaaaatttagtattttttcagttttcaaatgtcatttattacagggtatgtactatagtatcttttagcccagtcttagttttaaaattgagattgtttttggagatttctacattttcttttagttgttttccatagttttttttttttttaaccatttagtttgtactcagcttgcttaatgaatatcagtcatttctgcgtagggtatcactgtatgtatcctaaaataaagcactgatttttacttttgtcaaatatgttttatgagtatcttatgtctgacatgtacagaaaagatttcttctaaaagaatcacaagaaatataactcttatccaaagatggcattttctaagagttatatatgatgtgccatctgtcccttagatatttttcaataatagtaagagagacttcattggttattgttattttataagctgattactgctggctgatttttttagtgggagccatcttttgtaaggctctagtaggctacttgagtcatctgtgaccataaaattggttagttgagtattaggaactagaacatctgacttttattcttgtgcttttagtaaggcttatctatagctaccaataggctg

SEQ ID NO: 72420 - DNA, 1591 bp, Homo sapiens
ctggagtgagctttgattgcaccactgtacttcagcctgggtgacagagcaagaccctgtctctaaaaaataaattataaattaaaacaaaaaaatagccaggcaccatggctcacacctgtaatcccagcagtttgggaggctgaggcaggcagattgcttgagctcaggagttccagaccatcctgggcaacatggcgaaaccccatctctactaaaaaatacagaaaattagctgggtgtggtggtaacgcacctgtagtcccaactactctggaggctgaagtgggagaatcacctgagcctgggaagtcaaggctgcagtgagctgttttcacaccactgcactccagcctgtgcaacaagagtgagaccctgtctcaaaaaaaaaaaaaaaaagttaattaattagttagttaattttttaaaagatgggcatatttgtccagattatacatagcagacagcaaagtagaaccagttatcaattatctactgttgtgtaaccaaccatcttagaccatcccagaatttttagtgacttaaaaataatggctttttggccgggcgcagtggctcacacgtgtaatcccagcactttaggaggccaaggtgggcggatcttgaggtcaggagatcgagaccatcttagctaacatggtgaaaccccgtctctactaaaaatacaaaaaattagccaggcatggtggtgggcacctgtggtcccagctactcaggaggctgaggcaggagaatggcgtgaacccaggaggcggagcttgcagtgagccgagatagtgccactgcactccagcctgggcgacagagcgagactccgcctcaaaaaaaaatggatttttaaaatttgttattattttattattactatttttttgagacggagtctcactctgtcgcccaggctggagtgcaggggcgctgtctcggctcaccgcaacctccatctgccaggttcaagcaattcttctgccttagcctctggagtaactgggactacaggcacatgccagtgaaataatggcttattatttcttatggctctgtgggttggctgtgctcagctgggcagttcttctgctccagtggtatctgctggggttccatgtagctcattccactgggaactcagctggggctgaatacccaagagggcttcactcatgggttagaactgcaacacagttaactggatctgtctccaaccatggtgcgatctgaggactgaaaatggaagtagccagccttcttgagggtgaggctcagaactggcacagcagcacttctgctcattccattgatagagaaaatcacaggccagccaatattcaaggggaggggaagtagattccgcttcacactgggggctgcagcccgtacatacagggatgggagaaattttttagtgcccattttttggtagcactgttacacatgaatagaaatataggatccaggacccctgaaaccatgccatgtgtgtgtactaatagggaactttgagtatattaagtttctgtggaatgtgcttacctctgttcacctatctccattgtgacaaaagtcttatttt

SEQ ID NO: 72421 - DNA, 1043 bp, Homo sapiens
tgagtgccagcagtgccaggccatgtgttggaccccagggatacggcggtgagcgcactaggcctggcctgccctcccggagctcacagttgaggctcatcaacctgccaacaaacatgctgtcagtacctcctttcaaaactaacgtgtcataaagcagacaagatcttagaatagtttaaatcatcccagctggaaaaagaaggttgcatggtatttgtgagttttgagaaaggagtttccatttggttgaatctgtaaacttaaaccactcaacaaacattcttttttaaaaaggtatcatatttcttctttccttgaccctgtgatgtttatttttgttgctcacattggactttcaggctgatggcagcagtgctggctgcataaacagatttttccacttcagtgaaatcagcagagcttgtttcagttgctgcatggatggtcagcgtcgttccttctcatgtcctcctagcatccatcctcagcattgccataaaaccttcctggtgtgtagttttctaaaaaaatattatctagcatatacatttcactcagaaatacttcctttatggcagttccttagccaaggccgtgctttattcatacttcaggatcagctaagccaaaccacggtggcagtgaggagtgggtcctttggtttgttgaccctggttgtcagggctgtctttggctcatgtgtctctgtattgagatgtggtttagcctgagagagtggccggctgcaatgctaattgtcctccctggtttgctggcatctgtgggagaacaagaagaaaaggccttgggtttgggagagccctgtcatccatctggagtgacctgggagtgacctgcgcgcctttccccctgcccccgactcatattaccctgttcttgttctttttaaaaatacttttatctgtttttcctacattctttggcattttaatctccctcccttcctttcctccttccttccttccctctctttgtttctctctccttcttcctcctcctcctcttcctcctcttctctt

SEQ ID NO: 72422 - DNA, 1037 bp, Homo sapiens
ttaccagcattacctcatgtaaccacaactgagatacagtgactatagttgctatttataggtgacaatgaggcccagattgaggggctactttaacagctcaaaaatggggcattggacctaggtagccaaaaatagaggattagttgaaacatttccagaaataatgttctttcatactcagtttcttatagtctggcatccacccacactacactgacacactattcttgtagtgatgttattccctacaagtagcaatttttgcctggttatctaaagtagacctcttcagtttttaaactcaaaatgcctctcaaaaaaaaaatatgacatggtcatagtttccactttgaatgtgttaagagcagccagatgtctgcctgttctggtttgtcttctattacttaaatataggttgcttttgcaaataactaatttcctggagtctgcaatggcacaagcttgaaggaagttatgtttattctgttagaaaggattaatcatgactaggcaactattctgtgaagacaaaatcacggattctcccccttaagaaatccttaggggaaataagctaaacataaaagtaattttaatactaaagagtagttgcaataagcaaaaaagtccttagcctgggaatgttaatgcagactattataggaaggtgtaatgatatccctacctcataaaacttggggaggagtcagtgaaattaggggagagcctggtgggcagtgaatattctgtaaaggtaagctattttaaagagaaagaaggtatttctagcctcttcaatttgtgccttcagctgtttagaatttcctgctctacccatggtaccatgtcaacccagttacaactaactcatgagaaaatttaaccaggatttggccgggtgcagtggctcacacatgtaatctcagcactttgggaggctgaggttggcagctgacctgaggagttcaaaaccagcctgggcaacacggtgaaaccccatctctactaaaaatacaaaaattagccaggcatgg

SEQ ID NO: 72423 - DNA, 1625 bp, Homo sapiens
ttgctgccagccagctctgccttcccatcatctcctttcaggaccgtcccacaccttttacttgctcagtgctgtctgaagatgcagttgctgtttgcaaacaacaggaacaccagttaaactaattaggaaaagagggagatttccaggcctgggtaactatatactgtgaccattggaggtagagacaggtctcaacagttggaaccaggaactctgctgtcaggttgagagttttgtttctcttccagcttttcactgtgtgggggtcttttctcttatgtcagctctttctatcacatggcagctgacctctcacgctccactctgcagcttggacacccagtagaccctgaatttcactctctctaaaaggttctgagggctcatcctgggccaggggccctcctgtgcactgttagctatggccacgggagcctccagagctgcctggtagcttcaggttgacctgcttatcaggcctacgatccttctgatttaagtacagctggaaagtattatctaattaagttcatgatagtgcttttggagaacttgtcaaattacagccaatgagaaaataaggacctagcatactgtggagaaccattaaaaatttgagaagaaacaacaagtattatgtcaacttacttcaaaggcgtagttttgggaatttgatgcagtaaagattaccctgttttatgattgttccttgaaagtcaaatgggggacctgtccattgtgctctattaatcttgtcagaaaactgtcaccaaaacaaaacttgagtttgtccttgttctaggagttactgggtagttgtaagtattatttttattaaatataatgtaaaataaaatgttaagatacttagttttgtttttcaaagtaaagctgtagtcagccttatgtatgccattgactctgaaatgtataccagcctttcactgtgtaccgtgtgtatataaatccacagaaccggatgagctgcttagggagggaatatattcaaagtgtaccaaggaccaaatcctggagttctcccaactttagaggatggaaaggggcagagtaatctagcaaaggagactgaggccagtgaagtaggaagaaagtatttcaaggagagtgatgattctgtgaatattgctgagaattcaaataaaaagaggactgagaactgactgttgggtttggcaaagtcgatgttattgacaacattgattaattttgatggagtgctggtactagaagtctgtagtggatggaagagaaaacagctgaggaggtaaaacagtggctttagacagctcttgaggagttttgctaaagaagggaggcgagagaaggtgtagtagctagaagaggttatgtagtgaagaggttttttaaagatgagtgtattagtctgttctcacgctgctaataaagacatacccaagactgggtaatttataaaggaaagaggtttaatggactcacagttccacatggctggggaggcctcacaatcatggcagaaggcagagggggaagaaagacacgtcttacatggtggcaggcaagagggtatgtgcagggaaactcccctttataaaaccatcagatctcgtgagacttattca

SEQ ID NO: 72424 - DNA, 1064 bp, Homo sapiens
tcggcctcccaaagtgctgggattacaggcgtgagccaccgcgcccggcccacgtgtggaattcttaatagccattctagaagtcttcctgacttatggagacccatgagaaggataaatcacttcggaaaatactcagatgccattagaactgactcatgctaggatatcaataaagtacttgttatccttttttctctgtcttttctgcttttctggaagatataataaattgcatgaagaaggagcatcttctgtctttatgaaaattatatagtttccacttccctatggttgcttcatctctccttatttctttgtaaaaggaaggaagccttatatttactatatcacccctttatgcatgaaaaaattatagctgatacttcatgttctcctttcataatttttataattgatgaccttccttttgagcattcgttttacatctttcctttgtgtattttccctaacatctttgttaaggcttaatttcctctcagggatatattgctacttgttttcactaacctcagtcagaatacattttaagctttaaaaatcagtccttcacatccaagttaaatttctaatatctccatcttttcattgcagttagcatgtcttttttttttttttttttagaccaagtctcgctctgtctcctaggctggagtgcagtgacatgatctcagctcactgcaacctccgcctctggggttcaagtaattcttgggcctcagcctcctgagtagctgggattacaggtgtgtgccaccactcctagctagtttttgtatgtttagtagagacgaggttttacctgttgtccagcctggtctcaaactcctgacctcaagtgatccacctgccttggcctcccaaagtgctggaactgcaggcgtgagccaccatgcccgccccatagcttttattgaacattttgtaacttcttccaaatttaggttatattattcatatggctcgataaaaaggaatttccttttttttttttagcttttatcaaaatacaactcaaacctagctactccaatagcaattaa

SEQ ID NO: 72425 - DNA, 1008 bp, Homo sapiens
ttacaacacaactatttgttattgtgtattactcttgcatccttgctgaattttagtagtgctaatgataattacatatgtaaatatgagattttcttcctgtccagttaagcatactatagttatagttttttaatgaccattttatgtgtcttttagatgccgaatataccaactctcctttggtacctacattctgtactcctggtttgaaaattccatctacaaagaacagcatagctttggtaactttccataaaattgaaagccacagtctttctcctaaagactcaaatacactactgcttgcaggctcaaagagtctgtttagaagacatggatgaatccagcttttagggatgtatttacagtgcatttctggagggtagcttggcagcataaatcaattgctctaaaaaatatttttcatacctttaaaccatatctctgaattttttctaaggcaaattgggacaaagatttaaacaagttatagagtaaggaacagcattatttataagcacaaaacatgggaaacagtataaatatcgaatgatatcaaagaactaaaacacagcaaggcatatccataagatcaggtgttacatatactatcatgttttgaaaaacagatgagagcatataaaaagaatgttttcaagaaatattaatcatatggaaaatgatgtgtgtgtatgtacacacacacatatatatacacatattttaaggaaaaagtggatagaaacagcagtgtagttatctctgggtgataaattatgggtgattttgtgcttttttcccctaaattttaccaacaaataaatttaatcagatttcatcaaatcaaaaccttatccctctttagtcagtatggtcacttaaccaatgctatagaaaaccaatactgtattagggtatccaatagaattttctataatgatggaaatgttttatagtctgcactgtccaatatggtagcctctaatcacgttattgagcactgaa

SEQ ID NO: 72426 - DNA, 1867 bp, Homo sapiens
ctaggcaacatggtgaaaccctgtctctaccaaaaatacaaaaaattagctgggcatggtggtgcgtgcctatagtcccagctttggaggttgaggctgcagtgagccgagattgccactgcactccagcctgggggacaaagtgagaccctgactcaaaaaataaaaataaaaaaaaaaaggaacaaagttgttgtgcctgcaggttgtttgtgattagccttttctcagaacagttgttcattgttcgccccaacctggggccttcccccattgttgcctacttatctgtgattgtgccactgcactccagcctgggcaacagtcaaagctacagaaaatatattctgatgctcactgaagtctgagaaagaaaaaaaaaaaagaaagaaaaaatattatgaaaaactagtaaatcacattaaggatgtaagaaaattggacttttatttgtgaatattaatttttcatcttataacacttttaacttgctttccttctctaatgtataatcacaatgagatatgggtgcacaagagatacatgtcagaactttattaaagggacaattgaaataacatttcagctgagtgtggtggctcatgcctgaaatcccatcactttggggggccaaggcaggaggatcatttgagcccaggagtttgacaccagcctgggcaacatgatgagaccccactctacaaaaaaaaatttttaaaattagctgagcatggtggcacacctgtagtcccagctaccccaggggctgagatgggacgatcacttgagcccaggaggtcgaggctgcagtgagctgtgatcacacctctgtactccagcctgggtggcagagcgagaccctgtctcaataaatactaaataaataaaatgtttagacaattggaacttttgctgatttgggaaatttcagataagctgttttctgttgtttttgtaaacgtgaaattttccattttgagtttgaccagaatattctgatttttcctcctagtacacgagcaagaagccattaactctgacccagagttgtctaattgtgaaaattttcagaagactgatgtgaaagatgatctgtctgatcctcctgttgcaagcagttgtatttctgagaagtctccacgtagtccacaactttcagattttggacttgagcggtacatcgtatcccaagttctaccaaaccctccacaggcagtgaacaactataaggaagagcccgtaattgtaaccccacctaccaaacaatcactagtaaaagtactaaaaactccaaaatgtgcactaaaaatggatgattttgagtgtgtaactcctaaattagaacactttggtatctctgaatatactatgtgtttaaatgaagattacacaatgggacttaaaaatgcgaggaataataaaaggtaagcagctctgttaaaaggcatattttatctagctttctaaaccttttgtatttattgattttttttccagaagaaataaaatgtttcagacatttttgctttaaaaagttttcagatatttatttatttattttatttcaataggttttaggggaacagatggtgtttggttacatcaataagtttttttttggtttttttttttgtttttttttttcgagacggaggcttgctctgtcacccaggctggagtgcagtggtgcgatctcagctcactgcaaactccgcctcctgggttcacgccattctcctgcctcaccctcccgagtagctgggaatacaggcgccagccaccacgcctggctaatttttttgtatttttagtacagacggggtttcaccatgttagccaggatggtcctgatctcctgacctcatga

SEQ ID NO: 72427 - DNA, 1031 bp, Homo sapiens
cggccgggaatgcggccgcgccagaggagcgcagtcaggaacatggtgcctgcggaagagagggacgggctttgcggaggcgaactggcgcggccggacctggagagagcagcgggcgcgcgctccagctcacgcctacgggagttcccgcaccgcctcccctccagagaagcggggagcccaggtaaggccagcaggcgaagaaggagctccctagagaaccgaattcgcacagctactcacctgccgcgctgctcaagactctgcgtctccgcggccgccagcagacgccgtggcgtaagcgcacccgtctcgcggggtctcctggggcctcggcgagagacttcggctctcgcgagagaggactgcgcctgcgcagagccgaggacgcgtccggcgccgagattcaaactagtggcgggaggctgtgagctgagcggtggggtctgcgtacgcctggagtccttccccgctgtgctcagcatggaccctatccggagcttctgcgggaagctgcggtctctggccagcacgctggactgcgagacggcccggctgcagcgagcgctggacggagaggaaagcggtgcgtgaggcgggcggccagggcacggtgcgtggggtgcgccgcgggcggaggggcgtggcgagtggacggtatgtcccacgggaaccgccaggcactgacggcgtggacggctgccaccgaggcgcagggcgggtgctgcgcgtctcactgctcggcgtttggcgttagcgtagctcccgggcctgtttatggtttattcctaggaacccttgtcgcgtgtccgttttagacccatgtacaaccccacggctctcttgagataatgaaagtagcactattacgttataaacagagacagcagcacttaagaataagaacctaaattaacagattgagctcataatacatatactaatttatacgtgatatgctttcgtcacatacaatatgtgtgcttgtcagtaaaataccatgtaaacctaaacagtttctcttagaatca

SEQ ID NO: 72428 - DNA, 1572 bp, Homo sapiens
ccctgtcaaattttagaagtactatctttggtccttcaaacactttgtgatgacaccttaagaaaaataaagttgaagttcaggtcttgccattgccattacagacaaattaggagacttggtttacctgggaacaaatttacttgaatattcagtacctgaaactatgccaaaccaaagagcagctgcagtacattcgttattttaaatgaacaagtttacaaagtttattttcatctatacgtaaggatgatttttttaaaactttttacatattagtggttatgatccaatgtgtcatgagtgaatttaactgtaaggtggtttaaatcaaatatgcaatgtttacttgaattgtatttctattagcagattttgactatgtttacaggacggtttaaattaaggattatcaggcatgtgagatctttcagttatctttaaagtagatgtatattaagggcttagatttaggatctacatattctgggcattgaataggcagtaacttacaaataagttttgcttaccttttgttctagggactagcactgctatcaatggaaagtatttttaactaatctgttattaagaaagtcatatttttgcatttcagccaaaataaagaccgcctgtaataatctgttagaaacagataatacatgtctgaaatccatatgtttcatatgatctaaactgtattttccaatttaaattaaaaatgtaatatagattcagaaaggttcatatttttctaatgacttcattctatattattttgttaggttgcataaagaagcaaggaattgtacttgtattaaaagatgaagaaagctattaggtatatttgtacatgactgcaaatgagtctatgcccgtttaaaagaaaagatggacactattttaaagtgagctttaatatgcttttatataaacaaatttgaagtacagtttagtttggttgtgtttacctaacaagtaccataagccttgtgtttgttcttatttgtataatcctagcctgtgacttaatgttgatgctttgctttgtcttttggctggcctaacctacattgacatgtacacagaacattttaaaactttttttttcaaaagtcataatgaattactttattaataaacaaagtcttgtatttgaagtgttttctttgttataaagtggtatttaccaaatgagagagtaacttatgtttatcaacttgaaaatctggtaaaatagtgcttggttagagaaagagattggctaatagtttggggaaaccacttttaagataggtattattttagtgcaacaaaattgttgtttacttaggtttattcaaaacctaaagagtttaacttagctttttactgaacataatttaatttcagaagtcatttaggatcttgagaaccttcagatcactgtaagttgttgaattgtgattgttaaaatgctgaataattaatagattttattatgtagaattattttatggcatctgtgttccagtgcccttccaaagaggccaagtttgttattaaagccatttaaagatttcctgtagctat

SEQ ID NO: 72429 - DNA, 1043 bp, Homo sapiens
aaatgggactgcaggggagggggtgttgtgaataagttggactggatgacttctaacattctgtgatgcctaattttgcaaaatcacttttcattcacccaataaatttttttcttcttttttccacagagttttgctctgtctcccaggcaggagtgcagtggcgggatcttggctcgctgcaacctctgccttccaggttcaatagagtctcctgcctcagcctcccaagtagctgggattacaggctcatgccaccatgcccggctaattttcacatttttagaagagacgaggtttcaccatgttgaccaggctgatcactaactcctgacctcaaataatccacccacctcagcttcccaaagtgctgggattacaggcgtgagccaccacgccccgccccggtaaattttttggagtaccttctgtatgctaaataataaactaggaatagctctgtcatttcctagtacagcataaattttatggttgctactgtaggtttataatttgtttataatttggcctaatttccatcagccatactaatattggattttaaaaggaggcaactttttttctttttgaaccaaaggaatgagttagctttgaaaacataatttgggatattatagtatggattcttctacctttgtttcaactccttagtaatcttgattctagcaaactagaatgagatttaagagataccaattattgctgggtgtggtggctcatgcctgtaatcccagcactttgggaggccaaggctggcggatcacctgaggtcaggggttcgagattagcctggtcaaaatggcaaaaccctgtctccactaaaaatacaaaaaaaccccaaaactgtccaggcatggtggcacacgcctgtagtcccaactactcgggaggtggaggcaggagaatcacttgaacccaggaggtggaggtcgcagtgagccgagatcgtgccactgcactccagcctgggcgacgagtgaaactccatctcaaaaatatatatatatatcaattaccaacta

SEQ ID NO: 72430 - DNA, 1039 bp, Homo sapiens
gagaatcgcttgaacccgggaggcggaggttgcagtgagccgagatcacaccactgcactccagcctgggtgacagagtgagactccatctcggggaagaaaggaaaaaaaggctgggcacggtggctcatgcctgtaatcccagcactttgggaggccgaggcaggcggatcacgaggtcacgagatcgagaccatcctggctaacatggtgaaaccccgtctctactgaaaatacaaaaaattagacgggcgaggtggtgggcgcctgtagtcccagctactcgggaggctgaggcaggggaatggcgtgaaccccgggggttggagcccgcagtgagccaagattgcaccactgcaccccagcctgggcgacagcgagattccatctcaaaaaaaaagaaaaaagaaaaaaaagagcacactgaatatattttaaccttttctaggtgactcttaatcatttatgaattgaggattaaggtatagaatagtcagtaaaattgaagtgggaattttcatcagacctgggtttaaaatattgtctggctacttaactagcattacagtctaaaacacatctgttttttaatgataatagtaataacactgattatttccttgcactatagaaaagtggttttgggtcaggcacagtggctcacacctgtaatcccagcacttccggaggctgaggcaggaggatcacttgagctcaggagtttgagaccagcctgggccatatagcctatctctacgaaaaactttgggaaaaaaattttctaggcctgatagcatgtgtctgtagtcccagctattcaggaggctgaggtgagaggattgcttgagcctgggatattgaagctacagtgagctatgatcatgccactgcacttcaccctggatgacagagcaagaccctgtctcaaaaaaaaaaaggaaaaagaaaaatgattctggacatttagctccatttgtactaactagcaaataccctaaatacccttaaagacctactgttcgaatttctgaggtttttt

SEQ ID NO: 72431 - DNA, 1084 bp, Homo sapiens
ccctccctggatcttttagctagaaaaataagtctacgctaaatcactgaatcattttttccccttagatctaaactgcagaggtagaaagcagaaaacttggcaaatgacaggtaattgttttgtactggccacagatatagatcctcacctgtccttgtactacctatggctcctgattaacatattaagaacatttcagactggcctctgaagctttttaaattttgactaattgttttcattggcagtgttggaatacagattcttgggtctagagagccatttaatggggggttgtgggcctatttttattttgaagatagttttttcagagtgctaagatctcatgagttgccctcacatatttaggagaaggaatactaatttgctgcttattaatttattaagtatccatagttgagcattaagctgtttactaagttgtttgctcttcttttcagtagtggctcaaatcaaccttttcctatcaaaccacttagtgaatcaaaaaaccgcttgttggacagtgaatctcagtggctggagaatggagctgaagaaggcatcgtcaaatcaggtaatagttctcatttgaaacactgctttgtctggttcaaatgaaaagcaccagatataatacatgtggaaaaatcaaaataatgtaacattttaaaaatactaaaatatgtgaaacttttaaatatatgctgggcgcggtggctcacgcctgtaatcccaacactttgggatgccgaggcgggtggatcacaaagtcaggagaatgagaccatcctggctaacacggtgaaaccccgtctctactacaaatataaaaaattagccgggcgtggtggcgggcgcctgtattcccagctactcaggagactgaggcaagagaatggcttgaacccgggaggcggagcttgcagtgagctgagatcgcgccactgcactccagcctgggtgacagagcgagactccatctcaaaaaataataataataaaaaataaataaataaataaaatatatatagggtgtttgtgtttcttagtagcttctatgaggaagggatagagcgag

SEQ ID NO: 72432 - DNA, 1060 bp, Homo sapiens
aacatggtgaaacccggtctctactaaaaatacaaaaattaactgggtgtggtggcgcacacctgtagtcccagctactcgggaggctgaggcacaagaatcgcttgaacctgggagacagaggttgcagtgagctgagatggtgccaacacattgcagcctgggcaacagagcaagactgtctctcaaaaacaaaacaaaaaattttagatgttgctaaatgttatgcttctgggttgcatttttctaataagaaattgtgataactcttatttttgttagtctatatatgttttttctatggctacttttaagactatcactacttcatgcaatttgattatggtatatcttgatctagttttctagtttcttgtgcttggtattagttgagctttttggatctctggttttagagctttaatcaaatttggaaaatattgttaaccattattttgtcatctccttccccctattactgtgaggactccaattacacatgttatcagtcactcacagtcctcccacagctcactgatgcactgttcattttttgtcttttttctgtgtttcattttgtatagatcctattgctgtatcttcaagttcatcgatctcttttgtatactttatccattgtctcatgtattcaagattgtccccctcccattggttggaacacagattacttgttttgaagttatttcctctaaacagaaattttgaagttattttctgtaaacagtgaattctaagtcgataggattttgttgttgttttttgttttccttcctttaaagatgttccattatcttctggtctgcattgtttctaatgaaaagtcagcctgactcccatctttatttcattgtttgtaaattactatcctttcccctcctgtagctacttttaagagtttatccttatcattgattttaagtggtttgatgaggttccttggtgtttatcctccctggggttcattaggcttctcggatctgtaagttcttagttttcatcagatttgaataattttcatcagttacgtctttattttttt

SEQ ID NO: 72433 - DNA, 1045 bp, Homo sapiens
cataaggtttgctatagctacagatttaagatgttaggcctcatggagggccttagctctgtttggcagtaatgtcacatgtttctggtcaggtccctcacctgttacccaagatggttattccagattttcataattctcccactctccttacccattttatgagttcctagtagaaaaattagaaggagtcacaagtaaactctcatcttcacatctttatagcctcatacaaacatttcttgtttcacacccatcactctcaccttcctctaacttctgaggaagaaagatgtcttttctggtattcaaggttaacctttacaacttttctagactccttcccatctcttctaggatccctttcttcagtttttattttacttttttatatcagcaatccctcccaatgccctgggttcttatccttagcttataaaacacactgaagtgccttgtttttaaattaaaaaacattttttgtgaagcctgtatctttctccagacctcactctacatcacttaacaaccaagcttgaaataatggtctagtcatcctcagcttgctcacctttccctacaagcacccccgaggcacacatatgtctctatcgagacaaaattagcttccttcacctctgtgctcccagtacgtcatggccatgttagcacttataacactgtaatttttgctagactctaggttctttggtaggaattttatctaatttatctttgaatcccaaatacctggtacagtgctatcaggaacatagtaggaaattcataaataatgagtgaagttgcaggagttagaatatcttgtagaaaaaaaaagccaagagatactgagcacacaatactagattttcagtaatatttgataattattttgacatgttactttataaggttgatgaaatattaaatgtgctattttttcccaaaataagtttcataaatttatcttttaattgctactaatgtattatttattttaaattatatttacagtttttgtgtcaaagatataagcaagaaaatt

SEQ ID NO: 72434 - DNA, 1642 bp, Homo sapiens
tcacaaaatggtcagaagactcacttgatatgtttgaaacatttgaaacatgttggttactctggaagaaaagagaaaaagatcaatgtcacaataacctaatgctaatagtcttcttttagtctgtaatactttttaaatcaagcagaacagcctcgtgttctggtggagtagatgctttgcctatatggtttattttaagagctaacatttaaaggctgcctccttctattaaaggtactaatttcttctaggctctagtttgcttctgttaaaatgtatatagccataagaagggataccagagaagctgttttcattcattaatacctgtggtaaatttatttatcaaaattgctaactatgcacaaaggctctgtagacatacagatgaaaaaagtaggaattgaagcagctgaaggcatgggtaaggtggtctgaaaatagagattaaagaagtccaaaaatatttcacaattagtttttagttagcagcaaatctaaataaaataagcaaatatttttgtatagatatggggagcttatatatgtcggatgttggagaaagcttgaatatatacataaagtacaaaagaaaatttgttgggtagaagagtcgatcttttcactttattactggaagtattgctattgttttttttttttttttatgagacagggtctcactgtgttgcccaggatggcctagaactcctaggctcagtgaccctcttgtctcagtctccccaatagctgggattacaggtatgcaccaccatgccaagctaaaattaaaaaaaatttaagagcagtattttaaataactcttcctgaactcctagataagcaggttgctttggtaataccaattctttgcttttgcccttgttgcattgggatatattaagtaatttattagttttcaaatatggcaagtattttgatatattcaacaatctttagacagaactaacttgtaagttatattttagaggttgacctcaaaattaacttctttttttcctcagaatgaactgacagatacacgtgcaaaattccacgtactttttcttttctttgtgtctgcaatgttcttcatcagcgtcctctcacttttcagctaccactgctggctagttggaaaaaatagaacaacaataggtaagtaggttaaaataaattataattacttaggacaatgaccataaataaatatgaaatctagagaagaacaagggtcagatgatacagaagtgtaagacaattctgactctggaattggtggcacgtgcctaataatcccagctactgcagagacagaggcgggagaatcccctgagccctggaggacaccctagacaacatagggagacccagtctctaaaaaataaaaataataaaataattctgtagtaaaattaattgtgactggatgggaacaatggttttataataaaggttcattattttggagaaggttgaggaaatgagattgactttttaacacattttcagtaatgtgttatatataaaagtggagaactattttataaattttaataaatgaaaactttcctgcattcatacagtgtcgtttcaaaaattaatctataagaggcagggcacagtggctcacacctgt

SEQ ID NO: 72435 - DNA, 1020 bp, Homo sapiens
atgaattttggcttttgatttcccccttagctgggcacctttgttcagttcacaacatactaaccataccccttatttaaacagatttagtgccagatagatgaaatctaaattacctaatttcacatttctctatcagaaaattcagcaatgtttgtgtgcaatgatttattaaagaatgaataacttttttggattaattctgagtaaaaaaagacttgtaaacgtaaatatacctttttcttcattcaataaatatgtatttagtacttactgtatggcaggtagtactctagagacttgtagtatatctctgaaaaaacgggcagagttctctctttgtagagcttgcttttgagaaggagggggacaagtaataaataatgagcagggtaagagatttaagtattgggcggtggcatgatagggcaggtggcaatattgaatagcacagtcagggtagaccttatttagaaggtaggatttaagcaaaaacttgaagggaattaatggatatctgagagaagagcattcaggcccagagaacatgatacgtgtccctgccatgtttcagtaacacaagaaggctactgtggctggggtagaatgagcagaaaggagactgaaaggaatggaccaagagggggccaaaatgacagagggccttggagagtattgaaatgactgtggcttttactagcagccaggttgggacatgatctgatttgtgcaaggctcactctgattgctgagctgagaatagatgggagagggcaagtgccaatacacaggctgacatggtaggctgttgcagcatcccggctggaataaggtagaagcagtgaaggtggttagaagtcatcagatctagtttttggaaactagtcagaggtttgtttgtttgttttcaatattggctaaaaacattttattttattcttccccagactgaaatgtgtctgcaggcccagcgcaggtggctcacgcctgtagtccagcactttgggaggccaaggcggg

SEQ ID NO: 72436 - DNA, 1071 bp, Homo sapiens
tttatttaatagttttcagtaatgagttaccttcttaatagaaattacaacagattcaaggatgttaacatactggcattcacctacattccaaaccctttcttgtgtgccaggcccaggggtagatttgcagctgcattcaaggattgcacgtctacagagtggtctgcaatctagctgcaccctgggatgcagcacccttcctgttgtttcagaggtgggagctgcagacctctgcccagagcatccaatcgccactatcaagacttcatcattcaccttggcatgtgcccttcaatccagcgtttgtagctctcactagagctccactcgtgtatttgcagcttccaaaggatagctgtacttgaatggcctattatgcaaagcttcaagctcctacaatactggattcatcatttaaaacctaatatcttgggggaggggccaaaagtctgcctcgttcacttctatatttcctgcatctagcagtatttgtcacgtggtagaaactctaaatatttgttaatgaaaaacactaccctcacacaaactcagctctatttctatccttggcaccgtcattcttctagctaccctagaaactcagatttcctttgattgctactttttgagttcattctgctcagtcatcaagcctccttttcttacaaggtctgtttggtttaatcccatctcagagcctaggtaatttcacagcctttgcaatgtcagaatgttgagtggagaagggtaggggaaagagaaaagaagatactcattcctgatgttaccactcgcttagccatacaaccttcaacagatgactttctaacctttggggtgtctttgatctgtaaaatggagagattgaactaggaaatctctaaggtcctttatagctctactttttctacattatatggttttacctccctagtgcctaacccaggcaaggtgttatagaaggccctcaataaaatataacatactcggtcaatcggggcaagatggccaaataggaacagctccagtctgcagctcccagtgagaccaacgcagaaggcaggtgat

SEQ ID NO: 72437 - DNA, 1051 bp, Homo sapiens
cttggccttcatgagacatttggctagaaattagcgggaccccatgactgtgatttagcctttcacccaaagcaagtaaatctttggacattcttgcaaaaattaaaaatctcttgacagtaacttttaaacaactaaaatttttactaatggagactatatattaagcctttcctgtgtagaaatttaattttatttgtgaaaaacgaagatggaaaaatatttagttcatattctttgccatctggtgtggagggcaaatattttttaatatgccaaaggtatacagtttttgttaaaatgtacttgatttatctgcttttttttgaagacaagttttgtcttcataaaatagtttttggttttcttttttctagataaaactttttctgagcatgataattaacatcatgggattaaaaaaatttaatagtcctctttccttttatagttctacttgtccaattctgaaaaggaacgttatgaaaaagaattcagccaagaaagacaacaagaaattttgagaagagcagcaagagctttacctatctataccacatcagcttcaaaaagtaagaaaaagaataagttttccttttcaaatgatttttaaagtatgcttattcctgccaggatatatttgcatggtttgactattaaatggatactatgattgccataaataatatctgtagcaacaagactttcctgtttccttactgtatttcagatgcagaaatagatatataaaaataataatcaatataaattgtttaaggggcccgctttaatatgaatctcttctgtacttgtttttttcccccaactcaactttcatggctaaaaattttaattattattcttagtaaactgtcatttggaagtctgaatttgagtattatgtgtcatcactgagtaattaaaaaaaaatccaaaagtgtgctaagaatggggaacagtaagagacacaaataggaagaaacttgttcagatgtataaggctaatattctgagagtcaggctgtgaactcaggtttgtctagttccaaag

SEQ ID NO: 72438 - DNA, 1060 bp, Homo sapiens
tgttatttgtttttatttaccaggaaagaccgttgtttaccttgtggctttccatctgttctttgttatgtttgtatggtcctattggatgacaattttcacatctcccgcttccccctccaaagaggtaaatttaatgttggtaaattaccaaatgttttaactgattatggaattttttttcccttgtgttacctttgttaaaactttacataatgcatgtgttctgtttccattcataaaactgcttggttgctctgtactgtgaatgtgagtcatcagcctattctcagatacagtccactgacacagcatagtaaaagttcagcggtatagaaatgcttactatttttctgccatgctatgtgtctttaaagacatactttatattactggaataaaaagtctcaaggaacagaattgcgttaggaaagtagagtttatttttagaaactctcaacatttatattttctcaggcatgaacagatatgctgcaattaaagaaagttttgtgatggaaacaaattgtctaggctattgcttgctgcactttaatatgactagtgtttcttctaattggaggttccatttggaaaataatataggtaaacatttatgtggagtaggttttatgaccagtgtctctcttacctctccatagctgactgaattcttccttcaccgaaaatttcttatagcaaggtggttaagaatatattctctagagttagagttgtctgagtttgatcttttgctctaacaatttaatctctccaagctgcagttttcttatcaaaaaatggaactaacaattgtgcctgtctctgtaggatgtttgtaaagattgtgaggtttattcagttaaaacatgcatgtatttatatatttatttatttattgagatggagtttcgctcttgtcacccaggctggagtacgatggcacgatcttggctcactacaacctccgcctcccaggttcaagcgattctcctgcctcagcctcctgagtagctgggattacaggcacgcatcaccatgcccggctaatttttgtatt

SEQ ID NO: 72439 - DNA, 1011 bp, Homo sapiens
ggttgggttgcaacagggttgtcaattattattattattttatttgaaaagtacaagcaatttttaaaccaaaaacataaaggaaaataaacctcagtccaaaggaaggacagtacttcaaactgaatacatgttagcttttacaaaagcttccttacattgttcttggtctttcttttcttttttttttttcagcgcagaccagtgaacactttatcacttcttaaaattgagaaacactgataaagggaatgcacaaaaaggaccaaattttggagaaaatcattaaaatacctggataagactaatagtaataatattaataatcagtatttattgaggatttattgtgtgccaggcatccttctaagtgttttgcatgtattacctcatcagtattaagcagctaactttactgaaataagtactttaattgaaatctaagcaaattatttggagagtgcaatatgaagaagtaatgaattctgaaagtaacagaaaagacctttgtggaaggagtagcattttatctaaactttaaaaatgagtagaatttcagacttgtctgaatttattatcttcagtgggtttatggtgctgcattacaaactgaaaaagagtttaagcatctgatagatagttcttgcttcttaaagaaatcagtactgcttctttcaaatatatagaatacaacaaaaatcttttgaaatattttggaatgttaacattaatctacttgggaaacagttatgttagatattcaaaatggccaaaactttttcttgttagcctgtattgaacaggggaatgaaatttaggtcactttttctgaacaatacagggaatgagttactcagatgtattcatcatttatggtgatggtaacttatttactttcagttgacagttccttggatgtaatgttcatagtaatagattctgttttaaataattttaagtcatttaaaatgagcttttggagaacttgaaatatagtgcgtgaagaaagtg

SEQ ID NO: 72440 - DNA, 1011 bp, Homo sapiens
gagatagaggaatgtctggtcagtggagtggtagaaacaccacatttattaagttttccatcgtatatggatgcagttggtggtactccaaaacaattacaatagtaacgtcacagatcactgatcacagagcaccagagcagatattatgataatgaaaaaggttgaaatactgtgagaattaaccaaaatgtgacacggagacacaaagtgagcacaaagtgttggaaaaatagcacagatagacttgcttaatgcagggttgccacaaccttcgatttgtaaaaaacataatgtctgcaaagcacaataaatcaaagcaccttatgagatgtgcctatatgtattttcagcaagaatgtcacagaagtaatgctgtgtcattataacattttggggaccattaatgttgatcaacacccaaggtagtgtgtgctatgtttctccattctataaaggtacagtttttctttgtaattaatattctattagaccaccacatcacacggattcctttttgaggaaggacttgttgctcagttttggtcagtgcagtcagcagatagcttccagcactttctgcatgactcatatcacccaaggtcacacccttcctggtgcagcttgcacacaatgcctgagtgagatggggtggaactgcccacttcagagctccctgccggttgctgaagccaggactatattgcagtgagattgctcccttagcccaattatacctcttcccccttcctttcacatatgctggtccctagtaaatacattgcaccccaaactctgtcttagcatctgattccagagaacccaacctgagtcatttcttattgggagacattttgaaaccctgtgaataatctgtttgttattactttcacttactccttttagcatctattgagaattcttgcttgaaacagttattactgtcctggttgccaaatggtggttttctaattccatgatttcttctacatttactagttagaattctac

SEQ ID NO: 72441 - DNA, 1022 bp, Homo sapiens
ggtgttctgtatacatctgctgcctatatcaattttttatgaaaacctaggaccaaatggtaagtggtgtttgtaaacgttattgttattccagaatgttctactcttagtccttagactgaatctaccattttatgaaggactgttaagtgttctttgaataacgaaccacatcagctagaaactaatgttatgaatgagaagaatctgtaccacccactcttgaaagtggcagaatcaagacttcaattatgtttggatttgtacagctttcaaccaagtatttggttaaaaccctagttctatacatggaagagaatgctttggctcagaaaatttataagttttgaaattaaaacatccagttttaaaattactttgtacctatagaacgtttaattttgggacgactatccctgcaggtaggcccagaataaattagttgtggaatacatttccaaataatattaatcttttcaatatcattgtttagtctcatgcttttggataccagaatgtttactaaaaatgatgtttgagtcaattaaaattactagattttaatatttctgggagctacttccagaaagtggtagtgatcataggattctcatcaacttatgatgatacctcctttatcttcttatttactctgaagtgggcatttattctaaaagttatgtcattcctattctgtcagaagattattcctaccgtattttaattcccgtagtggttttgaagtaaagctgaaggaacactaaaaatgtgcatttatgttgagattccacagcttaacctgtagatggtttttgtcaaaaatattaagaaatgagatcaaacagtgctgtgaaaagtcttaaattgcttctgatttctttcaccacttcaaataaagaaggagaaatgaacatgaattgagaagtgccatgtgctagtgggcatagaggggacatttcattcaccctctcctttaattctttcagtatgtcacagcataggtatctctacaggtggaggac

SEQ ID NO: 72442 - DNA, 1013 bp, Homo sapiens
gcctctccttccccggcctcccgcgtccgcccagcctgtccgcatccagccccgccacgccccatgggcggtcccgagctgcggccccgccccctcaccgcctccccggccgcggaaaccccgccccaacgacgcggagaccgggggcggcccgcggcccgcggcgggcgggctggcggggacggacgcggggggaggggggcgacgggatgtggggtgggggcggggcctggctgggcgccgggacgggaggagtcccggcggcgcctcggacttttgctcccacaagtcctgcctcggaggcgggggagctggaccagcagccgcctggagcgtccgagtcaccgtcgccggggctcccgcgctccccagaacggtgggacgcggggctcggcagccgccagcggaacatggcgccctggacgctgtggcgctgctgccagcgcgtcgtgggctgggtgccggtgctcttcatcaccttcgtggtcgtctggtcctactacgcgtacgtggtggagctctgcgtgtgtgagtaccgtccccggggactgcggcggggcgcgggccgcggctagggcgcgagataggcctctgcgccccacacccgccgcctttctggagccagcgccggacgccgggcgtccggccccgaacgcgctcggaagcgccgaggttgctgcacccgccgctttgttcaatcctgcggcgcggccttggggcgacctggggctcctgaagccttgcggcggcttcccgggtgcaggtctggcccagggaggccccaagagcttcctggttcccgccgacaccgggggtctgcatccttctgggaaggaacgtgcagaacgggagtagtcgagcttcttagaaggtttaggttgtgtttgtggcttttttggcttttgttcattttttttaaaaaaccaaatctgttccttctggattgtttttgttcaaactgcgcgagaagaaacgcctgttacctgtagagccggctgtggcgggttggggga

SEQ ID NO: 72443 - DNA, 1008 bp, Homo sapiens
gaaaccccatctctactaaaaatacaaaaactagctgggcgtggtggcaggcgcctgtaatcccagctattcaggaggccgaggcaagagaatcgcttgaacccgggagacggaggttgtagtgagtcaagatcgtgccattgcactccagcctgggcgacgagcaagattcatctcaaatatatgtttagagcattgattaaattacaatagctcatttgtcttgcagtgactctcatgacattcgtcggcttatggtttgaatattttcttcatgggtatttttgtttttgttttacttcccaaataataaaaatttggatttgcttttacttctcaaataatgaaaatttagattaatttcacttagactatttcacatagttgataagttgttttatgtttgttttttagcggagtttaagagagctgtgaaagtagcaacaggacaagaactctcaaacaatattttggacactgtctttaagatctttgatttggatggtgatgaatgtcttagtcatgaagagtttcttggggtgttaaaaaacagaatgcatcgaggtttatgggtaacagattttttttatataatacatgtttacattgtcattaactgatattaaacctagaatttgggcaattgtacagtctttaaatggagttttcatcacttataaaaagactataagctgtaattgaaatacagaaatatattttatatatgagattaaacatctttgctttttaaaaaataatgtgaatctaataagaaatcactatttaaagtgactgtgagctacgatcgcaccactgcactctagactgtgcaacagagcaagcccttgtctccaaaaaaaaataattttttaaaaaagaaattactattcagaaatgtagcctagctggacatggtggctcacatctgtaatcccagcacattgtgggaggccgagccgggtggatcacttgaggccaggagtttgagaccagcgtggataacatcat

SEQ ID NO: 72444 - DNA, 1028 bp, Homo sapiens
cttgctttaactctctcagtgctgcttcattagtaaaggcctagagatcatattttgaagtaacatttatttcactattctaaacttcctttttggcctgatctaagatcttgtttcatgctgaagtccaccttgagtattttatcccttattgtttattgcctacttgaacaacgatggttatggagtgttatgcaaaataacagaaggaatggctctatccctcttttacaacttttgttgttgttgttgttgctgtaagaagaatcctttctggatattattctaagatttctactctacagattctatttttattcttatttataattattttaaattattgtgatttttttaataggaagcaatagtgaaagaacctgaaattaacacaactcttcagatgcgtttctttggaaaaagaggacaaagaaaacttcattataaagaatttcgaaggtaaatgcaaatatttacattcatttagggaaattttatgggtaagaaataaagagaaacagaatatattcattttctagaactgcagatcataaaactaaaatactgtttgtggattttgtggatctgtgtagtatttatctctgagaactaaacctatgaaatagaaactaaaattagtatgctcaaaatatcgtaccttactatagaaagtagtatctgtttcatagaatacaataattctttttagtaacttaatgtttgcaacaaagaaccatgcgcctagcgtcagttgttctttaggcgaaacaaaccaacccaacttaaaacaacaaccatttgttatttttgtgagtctttgagtcggttgggcagttctcctgattggaacaggattggctgatcttgacagtactcttgcatttgcagtctgctgatgggtttgctggctgctggcttttctaagatggtctcaactgggacacctcagctctgcttcatgtagtctctcattctctagcacaagggttggcaaacattttctgcaaaggcctaaagagtaaatatgg

SEQ ID NO: 72445 - DNA, 1021 bp, Homo sapiens
aggacattaacaaattcaattaaaataacaggctaaactgtaggctggctgctttgcggaagagaactagggaaagagacagctataaggagccctcctggggtcattacaaatattaaacactgacagtggaaattattccttcaaaggaccccaaattagtggagcttaacatcttggtatggtcaagaaaacggaaactagagtgctgcccaaattactctcatcccagggtgactgaaggcatacccaaaactgcctccctgaggagcaacatcagaggcttaacactggggggcgatagtcttcattaaaataatccagcttggcactaaacaaatagcaaataagcagatagcagtaacaaccctgggggagcagggaattgttaatagtactcagagttgctacagtatattatctgaaatgtgagtttttataacaaaatattatgaaatatgcaaagaaacaggaatatatgactctactggacaaaagcaggtaacagaaactgcttgtgattgcaaccagatatcagatataccagaaaaagactttagaatagccattgtaaatatattcaaagaactaaaataaaccatgattaaagattataatgtttccacttttattattcattggaatgcaattaaactatcagaaggcatttagctaaatcaagaattcagtaattttgcaggccaaataatacatcctttatgcatgtgatgtacttcatcttcatttttcatcatggataagaaggataataatcttggttgcattcctacagatcattatgaacagcaaaataaggaaaaacagggccaacccactgacccatgatctccatgaataaacagaaagatacaaaacagtctaagatttattagatcctaaactcatttttacgtagtatgtatctttttggattttttgcaaataatacactttattaatagtagttaatgaggcttctgtaaaccatctccccatgctcctttcaagtagatactcattc

SEQ ID NO: 72446 - DNA, 1045 bp, Homo sapiens
tttagaacgatacctccagtcctggctgttgcattggtgataagtgatgtagctgaggcagactacttggttttatttaacagcctccaatcctccattctttggtcttcacttttcctgagtaactctttttaataaactctttgttcagcctctgaaatgtccccagctattagaagctttagttgggcatgcagtaacggagccaacatcaaaggggccaagactcctaatcacataatcactgctgtcttgaagttttgcacaaaacaaaacttcaagaaacaaaaacaaaaacctgtcacacgaaatctaatttgatcattcagtggaagttccgtggatccctttgttattatctgcccttaatccttgctccctttctcttagcccgcttgtctaaattaatctgcagtcagaggttcctcacttttccgtcagcttctggacttacttttcagtgtgccttcccaggtaggaagtagagagatgagcctcacttcaccgacttgtgagccagacctcaaggtttgaatcttagctctaccaggatgatcactgtggtttggggcaaattatttaatctctctgagtctccattttctcatttgtaaataactcacgatttggtagatgatcactgctatttggggtaaggtatttaatctctttgagtctcaattttttcatctgtgaacaaccctcttacagtttggggtggggaagctaaatgagatattttatataaagtgactagccaaatgcctggcacatggtaggctcatgacagatgtgcgtttactgtggtcaaggtttggtttacttctgccctgtgaacacaaatgagcttgactgaatgtccatgattccagatcactagcccatcttaacctgagattttcctgcttttttgtatctagcctgactttgtcaacctctggactgtttttcacctctgctaactctggtagctttggcacatgtcctgcttttctggactattgacatctagcttgtttcctggtgataataggacttccaggat

SEQ ID NO: 72447 - DNA, 1049 bp, Homo sapiens
tttcaaagtacagtggaatgataattcaatactatatgtcatagtttataatctacaatagttggtaaattataattatggcctccagtatctaatctctgatttaccaaagttatttgaaatttaaggccatgccactttcattctcgccctatgggaacatttggcctctatataacttgttgtctttgccctggaaacccttcctactctggaccctgccctgtccccttacccttccttctgctgtcctttggctgaataccaccctagaattcctctcctgaaggtcattatcctctcagtgcctagtaacttacaaattgttttccatcaggatgcagttagctggtggcctttcataaacaaatagtcaaatatgtcagaggtgtggaggccggccgtagggtagtgtagaaagtgctccaggtgtggaggctggcagtagggtagagtggaaactgctccaggtgtggaggctggcagtagggtagggtagaaactgccccaggtgtggaggctggcagtaggggagtgtagaaactgctccaggtgtggaggctggtagtagggtagagtggaaactgctccaggtgtggaggctggcagtagggtagtgtagaaactgctccaggtgtggaggctggcggtagggtagagtagaaactgctccaggtgtggaggctggcggtagggtagagtagaaactgttccaggtgtggaggctggcggtagggtagtgtagaaactgctccaggtgtggaggctggcggtagggtagagtagaaactgctccaggtgtggaggctggcggtagggtagtgtagaaagtgctctaggagtggaggctggcggtagggtagagtggaaactgccccagctgtggaggccagcggtacggtcatgtggaaagctgctccaggtgtggaagccagcggtatggtcatgtggaaaactgttcccgcatgctcctttccagctctgagttcctctcacctccctgggttcccagactgcaacacagcttcttactactctgtactagattt

SEQ ID NO: 72448 - DNA, 2753 bp, Homo sapiens
aaagcttcaaacaacattaagagttaaaggttttaatcctattccccacagcagaagtgaaacttttgcttttttgaagcgatttggtaatgcagtcatcttgctctacattcaacattcagacagtaaagacattaatttcctgttagcattggcaatgactcttaaatcagcaactgacaatttgatttctgacacttcatatttaattgctatgctaggatgcaatgatatttacaggattggtgagaaacttgacagtttaggagtgaaatatgactcttcggagccatcaaaactggaacttccaatgcctggcacaccaattcctgctgaaattcattacactctgcttatggacccaatgaatgttttttacccgggagaatatgttgggtaccttgttgatgctgaaggtggtgatatctatggatcataccagccaacatacacatatgcaattattgtacaagaagttgaaagagaagatgctgacaattctagttttctaggaaagatatatcagatagatattggttatagtgaatataaaatagttagctctcttgatctgtataagttttcaagacctgaggaaagctctcaaagcagggacagtgctccttctacaccaaccagccccactgagttcctcacccctggcctgagaagcattcctcctcttttctctggtagagagagccacaagacttcttccaaacatcagtcccccaaaaagcttaaggttaattctttaccagaaatcttaaaagaagtgacatctgtggtggagcaagcatggaagcttccagaatcggaacgaaaaaagattattaggcggttgtatttgaaatggcatcctgacaaaaatccagagaaccatgacattgccaatgaagtttttaaacatttgcagaatgaaatcaacagattagaaaaacaggcttttctagatcaaaatgcagacagggcctccagacgaacattttcaacctcagcatcccgatttcagtcagacaaatactcatttcagagattctatacttcatggaatcaagaagcaacgagccataaatctgaaagacagcaacagaacaaagaaaaatgccccccttcagccggacagacttactctcaaaggttctttgttcctcccactttcaagtcggttggcaatccagtggaagcacgcagatggctaagacaagccagagcaaacttctcagctgccaggaatgaccttcataaaaatgccaatgagtgggtgtgctttaaatgttacctttctaccaagttagctttgattgcagctgactatgctgtgaggggaaagtctgataaagatgtaaaaccaactgcacttgctcagaaaatagaggaatatagtcagcaacttgaaggactgacaaatgatgttcacacattggaagcttatggtgtagacagtttaaaaacaagataccctgatttgcttccctttcctcagatcccaaatgacaggttcacttctgaggttgctatgagggtgatggaatgtactgcctgtatcataataaaacttgaaaattttatgcaacaaaaagtgtgaagatatttaacgaaaaaaaaggtagatcttgaatgtgttgtagcacgaataaattgctgtacttcattaagcttcattgccaattagctaggaattgttaagcacattgcagattgttcttggagaattctggagttgttatgaacatgaataccaacggaaaaccttaactgaatctaaaagaaaactattttgaagatggtggtgagctgcaaaatagctggatggatttgaatgattgggatgatacatcattgaactgcactttatataaccaaagcttagcagtttgttagataagagtctatgtatgtctctggttaggatgaagttaattttatgtttttaacatggtatttttgaaggagctaatgaaacactggacatataattggtttaaacataaggggaattaagtctttgtagtctgtcatttttttaagtggatcctcttggatgcgttattttctcatcagctggctctgatcatgaatttgttgtaattttatgttgtactcagtgcatttaagaaatggtagagtattttaatcctattacttgactaagagtgtgaaggtagtactttttagagtgcactgagtgcactttacatctttatttaaatttttttttaacatcttatgtttacaggcttcctgtttgatgaagatagcaacggaaaactcaaaatggtggcagttcttattaccagttgttagtattgtttctggaaactgcttgccaagacaacatttattaactgttagaacacttgctttatgtttgtgtgtacatattttccacaaatgttataatttatatagtgtggttgaacaggatgcaatcttttgttgtctaaaggtgctgcagttaaaaaaaaaacaaccttttctttcaatatggcatgtagtggagtttttttaactttaaaaacatcaaaaattgttaaaatcattgtgttatctagtagtttataattatcggcttatatttccccatgaatgatcagaactgacatttaattcatgtttgtctcgccatgcttctttactttaacatatttcttttgcagaatgtaaaaggtaatgataattagtttatataagtgtactggctgtaaatgatgctaaatatactttatgcaattaagggcttacagaacatg

SEQ ID NO: 72449 - DNA, 1078 bp, Homo sapiens
gttcctttgttgtcatgtcacacagcaaatatagagagccccacaagcatcttgaaggctctacattatatggtccaaacttcaacatttagagcagaaaaattagtagaaaatgattttgaggcacttttgatgtatttcaactgcaatttgaatcatttgatgtcccaagatgatataaaaattctaaagtcacttccgtgctataaatccatcagtggccgctatgtaagcattggaaaatttggaacatgctacgtacttacaaaaagtatcccttcagctgaagtggagaaatggacacagtcatcatcatctgcatttcttgaagaaaaaatacacttaaaagaactatatgaggtgattggttgtgtacctgtagatgatcttgaggtatatttgaaacacctcttaccaaaaattgaaaatctctcttatgatgcaaaattagagcacttgatctaccttaagaatagattatcaagtgctgaggaattatcagagattaaggaacaactttttgaaaaactggaaagtttattgataatccatgatgctaacagtagactaaagcaagcaaagcatttctatgatagaactgtgagagtttttgaagttatgcttcctgaaaaattgtttattcctaatgatttctttaagaaattggaacaacttataaaacccaaaaatcatgttacatttatgacatcctgggtggaattcttaagaaatattggactaaaatacatactttctcagcagcagttgttacagtttgctaaggaaatcagtgtgagggctaatacagaaaactggtccaaagaaacattgcaaaatacagttgatatccttctgcatcatatattccaagaacgaatggatttgttatctggaaattttctgaaagaactatctttaataccattcttatgtcctgagcgggcccccgcggaattcattagatttcatcctcaatatcaagaggtaaatggaacacttcctcttataaagttcaatggagcacaggtaaatccaaaattcaagcaatgtgatgtactccagctgttatggacatcct

SEQ ID NO: 72450 - DNA, 1036 bp, Homo sapiens
ttttccctgagtgagagtggaagaagactaggactggttccatgtggggcagtaggagttcagctgtcagaaatccaggaccagaagtggacagtgaaaccacacattggagaggtgttttgctatttacctttacgaataaaaacaggcttgccagttcatatcaatgggtgctttgctgttacatcaaataggaaagaaatctggaaaacagatacaaaaggacgatggaataccacgttcatgagacatgttattgtgaaagcttacttacaggtactgagtgtcttacgggacctggccactagtggggagctaatggattatacttactatgcagtatggcccgatcctgatttagttcatgatgatttttctgtaatttgccaaggattttatgaagatatagctcatggaaaagggaaagaactgaccaaagtcttctctgatggatctacttgggtttccatgaagaacgtaagatttctagatgactctatacttaaaagaagagatgttggttcagcagccttcaagatatttttgaaatacctcaagaagactgggtccaaaaacctttgtgctgttgaacttccttcttcggtaaaattaggatttgaagaagctggctgcaaacagatactacttgaaaacacattttcagagaaacagtttttttctgaagtgttttttccaaatattcaagaaattgaagcagaacttagagatcctttaatgatctttgttctaaatgaaaaagttgatgagttctcgggagttcttcgtgttactccatgtattccttgttccttggaggggcatcctttggttttgccatcaagattgatccaccccgaaggacgagttgcaaagttatttgatattaaagatgggagattcccttatggttctactcaggattatctcaatcctattattttgattaaactagttcagttaggtatggcaaaagatgatattttatgggatgatatgctagaacgtgcagtgtcagtagctgaaattaataaaagtg

SEQ ID NO: 72451 - DNA, 1018 bp, Homo sapiens
ctggaagaatacccttcagtgtcagatatttttaaagaactacttcaaaacgctgatgatgcaaatgcaacagaatgcagtttcttgattgatatgagaagaaatatggacataagagagaatctcctagacccagggatggcagcttgtcatggacctgctttgtggtcattcaacaattctcaattctcagattcagattttgtgaacataactaggttaggagaatctttaaaaaggggagaagttgacaaagttggaaaatttggtcttggatttaattctgtgtaccatatcactgacattcccatcattatgagtcgggaattcatgataatgttcgatccaaacataaatcatatcagtaaacacattaaagacaaatccaatcctgggatcaaaattaattggagtaaacaacagaaaagacttagaaaatttcctaatcagttcaaaccatttatagatgtatttggctgtcagttacctttgactgtagaagcaccttacagctataatggaacccttttccgactgtcctttagaactcaacaggaagcaaaagtgagtgaagttagtagtacgtgctacaatacagcagatatttattctcttgtggatgaatttagtctctgtggacacaggcttatcattttcactcagagtgtaaagtcaatgtatttgaagtacttgaaaattgaggaaaccaaccccagtttagcacaagatacagtaataattaaaaaaaaatcctgctcttccaaagcattgaacacacctgtcttaagtgttttaaaagaggctgctaagctcatgaagacttgcagcagcagtaataaaaagcttcccagtgatgaaccaaagtcatcttgcattcttcagatcacagtggaagaatttcaccatgtgttcagaaggattgctgatttacagtcgccactttttagaggtccagatgatgacccagctgctctctttgaaatggctaagtctggccaatcaaaaaagccatcagatg

SEQ ID NO: 72452 - DNA, 1576 bp, Homo sapiens
tcatgcctgtaatcccagcactttgggaggccaaggcgggtgggtcacgaggtcaggagattgagaccatcctggctaacatggtgaaaccccgtctctactaaaaacacaaaaaaattaactgggtgtggtggcgggcccttgtagtcccagctactcgggaggctgaggcaggagaatggcgtgaacccgggaggcggagcttgcagtgagctgagattgtgctactgcactccagcctgggcgacagagcaagactccgtcaaaaaaaaaaaaaaaaaaaaaaaaaagaaccttccagtactgtgttatttgtgagaatagaaagctgttgtagtagaattatatgtatttatgacatttctgtgtatgatttacaggaagaccatgtactcagctgcagcttctaaatccagaacgatttgcacgtcttatcaaggaagtaatgaatacattctggcctggcagagaattgattgttcaatggtatccatttgatgaaaacagaaatcacccatctgtttcatggcttaagatggtttggaaaaatctttatatacatttttcagaggatttgactttatttgatgagatgccacttatccccagaactatactagaggaaggtcagacatgtgtggaactcattagactcaggattccatcgttagtcattttagacgatgaatctgaagcacagcttccagaatttttagcagacattgtacaaaaacttggagggtttgtccttaaaaaattagatgcatctatacaacatccgcttattaaaaaatatattcattcaccattaccaagtgctgttttgcagataatggagaagatgccattgcagaaattgtgtaatcaaataacttcgctacttccaacacacaaagatgccctgaggaagttcttggctagtttaaccgatagcagtgagaaagagaaaagaattattcaagaattggcaatattcaagcgcattaaccattcttctgatcagggaatttcctcttatacaaaattgaaaggttgtaaagtcttacaccatactgccaaactcccagcagatctgcgactttctatttcagtaatagacagtagtgatgaagctactattcgtctggcaaacatgttgaaaatagaacagttaaagaccactagctgcttaaagcttgttttaaaagatattgaaaatgcattttattcacatgaagaggtaacacagcttatgttatgggtccttgagaatctatcttctcttaaaaatgagaatccaaatgtgcttgagtggttaacaccattaaaattcatccagatatcacaggaacagatggtatcagctggtgaactctttgaccctgatatagaagtactaaaggatctcttttgtaatgaagaaggaacctatttcccaccctcagtttttacctcaccagatattcttcactccttaagacagattggtttaaaaaacgaagccagtctcaaagaaaaggatgttgtgcaagtggcaaaaaaaattgaagccttacaggtcggtgcttgtcctgatcaagatgttcttctgaagaaa

SEQ ID NO: 72453 - DNA, 1293 bp, Homo sapiens
tatcattcacggttcttactattatatttttcttaaagctttgtcaatgtatcttacatgttttaaggtggtatcaaatcaaagaggaaaacaaaatcttgatataagtagagtgcataattaacacatgccctggtactgtctggttacatcagcgattctcttaagacgaaagctaagaagtcagagtgtcagtggtgattttttaggaagaaatgtggtcactggggctaatgttgaaccaccctggcttgctggacttttatgctgggccctgggacctgcagtgccactgctaggctggaggtggagggagtctgacctggcaggaaggctgcccttttctttccttccttttttagtttggttgtttcatttctttttttctattctctcttcatttctttgaagagcgactgatctacagtacaccatttaattgaaccttgactgtacatttacaaagagatttgcatctctgtgctcagtagggcattgttagaactcatcagctacgcaagctgccagtgcctctttctgtacaagagaaaagtataaaaaactgtcactgtgcttacagctttggatggattgttattgtagccagctggagactggaggagtctggttgaatgtagtaaactctcagttaattaaagcattcaggactgagatttcttggttaagtaaatttttaagtagactatatataatatttccatctgtgctggaattcattctcaaggttagcactgaacataaatgtaaacaataaaaaatagtgcagtctttgagtactgattcattatgttgatgttattattttgaacaaatgagggattgaactgataatagtgaagcaaaagctactcttggaagagttccttctaagttaaatttggtaattgtttaaacctttctgcctcttggaataatttcagtactgtagctaacctctgagacagtgctgataatttttaaggctacaaaaaccatttcatttattaaactgctacaaaaattattttgctgatcctattagaggtgctttacaatttctatggctttctaacccaggacatggagacttgtttctgtgttaacatttataactaaaaagctgaatgtcttaaatacaatggatagaattcaggacctcagattgaactgacttaatttacgtataccggtgtcttactacattttctctctcctttattttctttcatgtttttttccgttgagcatgaccgatgtgttagttgcatgctatatgtagtgtgtgtgtgtgtg

SEQ ID NO: 72454 - DNA, 1014 bp, Homo sapiens
agtgtgcaggatgtttccttatatgtccgagaggctgacggaacagagaaactggtgtttagagtgacttcgagtgagagtaaggcactgaaacatgagcggccgaattctataaagattctgggaactgctataagtaactattgtaaaaagactccaagcaataacatcacctgtgtaacatatcacgtaaatattgttttagaagaggagagtactaaggatgcacagaaaacatcttggttggtgtgtaacagtgtgggtgggcgagggatcagtagtaagcttgactctttagctgatgaactgaaatttgtcccaatcattggaatagccatgcctttatcaagcagagatgatgaagcaaaaggagcaacgtctgatttctcaggaaaagcattttgtttccttcctttaccacctggtgaggaaagcagcacaggcctcccagttcacatcagtgggttctttggccttactgataaccgcaggagcataaaatggagagagctggaccagtggagagacccggcagccttatggaatgagtttcttgtcatgaatgttgtccccaaagcttatgctactctgatcttagattcaataaaacgtctggagatggaaaagagctctgatttccccttgtcagttgatgttatctataagctttggccggaggcgagcaaagtcaaggtgcactggcaaccggtgttagagcctctattcagcgagctgttgcagaatgcagtgatttattcaattagctgtgactgggtcaggttggagcaggtgtacttctcagaacttgatgaaaatttagaatacacaaaaactgtgctcaactacctccagagctcagggaagcagattgccaaggtaccagggaatgtggatgctgctgttcagctcacagctgcctctggcacaacacctgtgaggaaggtgacgcccgcgtgggtgcggcaggtgctgcggaagtgtgcacacctgggctgtgctgaagaaaagcttcac

SEQ ID NO: 72455 - DNA, 1358 bp, Homo sapiens
tgaaaatctttgaggtggttctggtatctcttattttccttcctcattctactctttttagacttataagcattctaaagattactttgaaatcatatttttaatctagaaagaatatgaggtttctggttcctagttaacaataggaaatacttaactcagtgtggacatctctgagagtatatggctcttgtagaatcaaagctcttagtactgattatagttttgtgataaaaaattttgtaatggagttggtccttttagtttcaaactgtgtcttgcaggagaaggaaagattgcacaggcagggctatcactgtagccaagatgactgtatactttattattcatactgggacacgtgtgagagtgaaggagggtggtactattctcagactactggcctgaattgggactgccctgggcaagtgggaagtagggtcatcccaactctagccaaattttagtaagcctgttgcatttacattcatacatatatattctattaaataatattgactaaattacaaatcatataatcaaaattaaattatatattaaaatatgactattatctatgaatattaatactcgtgtccacctctttgtaagttatcccacaagtctgtgccatgtagtagtttgtaaatgttgtgggacacagatgtgagtagcaaaagcctggaggcttaagcaggaatgaactgtggcgtgagagcccagctaattgcccagcacctgcatctcagtgtggttttgattgctcattgagaataagcacatttgtgtggaacattaactggaggactcttctctaaaccaaggatttgagaaggtcataggtcataggtcatgcttttatcttgtcaggagccacctggcctgatttcattcatgggggtgcgactctgtgccttgggagcagggttgagcattccctagaccccactgtccatggatttagccatgtggttggtggacataacatttgctaacttaaaatacccacaagcttgggagttggtgattgtgacagctgaagctgtgcttgacgaccgtaggtattaaagattgacttcactggagttgcatcttgcaggaaacccaggtgctaagtaagcatgtgaggcaagcatacatcacatcacccttgggagatcttcaccaaagcacactggggaggaatttctctcatcacagtgggtctcacacatctggtttttctgccagtttttgaatactactctgtccttggttgaggaacaggtgaagcagctggtatcaatttagaggccatgttatacaaaagatgggtatctttcaatactgtaattaggctccacgtggtgagatgctcc

SEQ ID NO: 72456 - DNA, 1018 bp, Homo sapiens
aagcagttctcctatctcagcttcccaagtagctgggattacaggcgcgtgccaccatgcccagctaattttttgtattttttagtagagatggggttttgccatgttgggcaggctggtctggaactcctgacctcaggtgatctatacgctttggcctcccaaagtgttaggatgctgggattacaagcatgagccactgcgcccagcccatattttcatctgttttatgaaatatatgaaatattttatatttatttggtaaatattttccatttaccaaaaaaagatttaaatatactatttagaacaaatttcacgtagagtagtaactgattttcttgtttgccttatgtttttgggtatctgagtaacctttaatttttcctttttggatttttggccaacaatagtatatttcttctgctgctaatttttacttcagtgtgtgtctttatttttattgtaaaaacagaattatagtgtggaattcagtcactctattcactcctctctattttcccttcgaataagagattttgtatagaggatctcttgagatagaacagaacaccctggtatcttttttgaattcctgcctgcgcattttcacacctagggccagctctctatgtgtacaacaacgcggttttcaccccagaggactggcacggcattcaagaaatagcaagaagcaggaaaaaggatgatcctctgaaggtcggaagatttggaattgggtttaattctgtctatcatataacaggtagagtattaggcttttcggtcttggtattagaaaatattatatcttacattctgtaatgtatttggttaacttcagaggtgatactgtttaaaagccatcttacccaaattcttctgtcagtagcaggaggtatgtcaatgaaatatcagtgcatactgaattttctgaaattaccacagtaacaataccaaagttttccttcatcatgtgatgccaaaagttaacatcatcatgatccagtggaatcag

SEQ ID NO: 72457 - DNA, 1024 bp, Homo sapiens
cctctgaagtcattgtcaatgactgtatgtgacagaaagttactgagaaaaagtgggatcaagtcagaccttctgagacacctttttaaagagatttaagtcatgtatttttaaaaagatgttttatgatttaggaggccagttaacatttagttaaatatctagcatttgttatgtctcatatagtcattcttagctcacatttgtcacttgaaagttgtactttctatactctataaaaagaggtgtgtgggacataacatcaggaggtgtgcgttctagtcctgactgctgctaccttagtgacttgggccagtcatcacagaggtcagatcatttttataataagaggattagcctgcaaggtatcttgtctctaagagcctgtgacttaatgtaacattggattcaagagacttcaggttaagtcctaatcctacacagtactaccccattgtactgccccccaggcactgttacactcagtggcagctgtgaccctcacactgacttactgcttgcctgcaagtggtatgagaaaatctttctcccacatagtttgaggattatatgagataatatatgtgataatgttttatacctggtatcatactgatgacggtatgtgctgtggaactgctaaggtaagagtgtaaggagagcctatgatgtttttgcttctagccttgacttcaccttgttttaaaaaacatttgaaactggattattttgcgagtttatgcataggtatatttagagataggctctttaaaagtggccaatttaaaataaacgtgggctgggtgcggtggctcacacctgtaatcccagcactttgggaggccaagtgggcagatcacctgaggtcaggaattcgagaccagcctggccaacatgttgaaacctgtctctactaaaaatacaaaaattagccaggtgtggtggcgggcacctgtaatcacagctacttgggaggctgaggcaggagaatcgcttgaacctgggaggcagaggttgcagtgag

SEQ ID NO: 72458 - DNA, 1142 bp, Homo sapiens
tcaaaaaaaaaaaaaaagaagtgtgagtgggataggctgggcatggtggctcacgcctgtaatctcagcactttgggaggctgtggagggcggatcacaagctcaggagatccagaccatcctggctaacacggtaaaaccccatctctactaaaaaatacaaaaaattagctgggtatggtggcgggcacctgtagtcccagctactcaggaggctgaggcaggggaatggcgtgaacctgggagaaggagcttgcagtgagctgagattgcgccactgcactccagcctgagcaatagaaggagagtccgtctgaaaaaaaaaaaaaagaatgggtgggatagaagtctgtggaaacagagtcttgtttgagcttggtctcagtatgtggttgtaccaaaatgacgcaaataaatttatagtgacaattttgcttttttaagcagaggtttctttatactgataaacagatttttgaaatgctgtgtatttgaggcattacttcccattttcttgttcttcctacagccctgtcacttgtctgaaggtgacctggtcagttggtctaagaatatctagtttaggcaaggcttgaaggtacttgaagtggacagccattgagacagtgactgctgaatttcagaacaatcagaacactggttgaatttgagaatattaagaatgtgataataggcacctctgtctctggcttgttatttaatggcaaagcagccacaaaataacatcatttattttatttgctttggaaaatatcaacactcctccccactgcaccatgcttcttgtttttgaattaatagttattatatttttgaacattttttgagactttatttgtagttcagttaaaaatcttgaggccaggcatggtggctcacgcctggaatcccagcactttgggaggccaaggtgggcggatcacgaggtcaggagatcaagaccatcctggctaacatggtgaaaccccatctctactaaaaatacaaaaaaattagctgggcatggtggtgggcacctgtagtcccagctattcgggaggctgaggcaggagaatggcatgaacccaggaggtggagcttgcagtgaggggagatcacacgactgcacttcagcttgggcg

SEQ ID NO: 72459 - DNA, 1019 bp, Homo sapiens
atttttagtagagacagggtttcaccatgttggccaggctggtctcgaactcctgacctcaagtaatccacccgtcttggcctcccaaagcgctgggattacagatgtgagtcactgcacccagccaagaagtacatatttggcccttagggctttctggccttgtctttatactgaatcaccatattctcctccaattgatggagcatacttacttacctctcccaagtaggaagaggcatgcatgacttctatcattccctttttaactgtggtaagagagatggaacagctgtagaacattctctgtatttactactgatgatgagttctgagtaataattttttttggggggaagggagaaatggcaatttattatctattttttggggcaactctaaaatttaattctgttccattcaaggtatttaaaataaggagcacacaagtttacttgttcatgatgtagcctttgaattgccttaatagatgtcactttttttttttgcaatgtgtatcatatatacctaagagaaataagccaaaggaacagcctgaggttcccccaagcctctaagccccacacactttcaaattacatggcaactttacttatcgtggggcgatttcatcaactcttaagactcatgttcctgctttcaaggagcttgcggttgtgatgggaagacattcaggctaccaacaatataatattgccaaaataagttacaaatatttttaacgtgtcataggatacatttatgtgcattctgatcttactttgctgctggctctctttcctccagcaaactgagccactgatcctacttctgtgcctcaaaaaccgagcacagaacgaaaccgtggaagacacttgtgttctgtaaccagcacgttcccttctcggaggccactatagatcttactggagatgcttccatggaatgaaagtcattagagttcaaggagacacaggccctagaaatgcctagttctgcatttcaatgcactgttgagc

SEQ ID NO: 72460 - DNA, 1016 bp, Homo sapiens
ttggtttattatattttctttctgattgtcctgcccacccaagatgggatgagattgtttttatgcattttcccaacttcgctggcaaagtacaattcactaaaaccccaagagatgggagcagagtgcaccgtcagtcactgtagggccagacagtcgtttgtgtgatgagtttcttgttcttactacttcataataagacagtgactaactagtctttgattcctggttcttagtgattgtttttcttctcagccacccagagggttgcaagtccctgacgattccttcttgaaccgcctgtcacttgtaactcgccagactgaattttctttcttgaaaactgagatttagaactcctgggcatgtctggagtttagatcatttctaatcacaaattagaagtaaattgaagaatggtcaaatatagcccaagtctcaacatcaacccttatgtgggtccaaggtcatcctttactgtggagagaaataacctatcacatggtttgccttatgtgaaaacacttgtgcttaggcactgaagacatcagccaacccacaattacaattcatattttcataaaataatttcagctctttaaaactcatatgagccactctacttttcgcttccagtatctttcttaatttttattacttccagaagatttgcagttccagaaaactccagtaatttctaactcccatgactttaagtatatgtctaaatttttgtttttttcctaattgaagccagtttggacagaaattttgttggaaactccaggttttatggtaccgggagcaaatgctctcaatgctaattcctctgttagtttgaatatttttgcatatgcttgccttagtttttaccaaagttatacataaccagagtttaagcgaacaagctggttgtgaaaaacaataggctctaccccccctttccccttattttctcctcccagagacaccacttttcctactttcagcaagtaaggaagttttacctccatttc

SEQ ID NO: 72461 - DNA, 1037 bp, Homo sapiens
aatgtgtgtatcagagtaactatggaacttgatgtaatttttagtagtttgtacaagagggtttgcagtctgtcatacaaattttacttggaaatgagttgtacaaacaggacaaaacagaacagcgctcactttagcatgcaactggtacttcaacccctgagatctgtgagctataattgctctaagtatttacaggttaccttatttagtaaacagtcagtgcaactttgcttgttgaaaatgctttctttgttttcttatataaaagagtaaaatgtatctctggcaatactgtttctttagtttatttattctctcacttccaagatgtaaatctatcaaatacacttccttatgcagtttgtacactcaagggaatcactgaaaaaccatcaagtatgattaaagacttttatgtgtaaaactgaagaatttaaaaacagtgaggataaagttgcactaagtttggctaaaaatactccagtgattttctataacctttggaaatagcataagccttatttacagaaacattcacaaggttaatattcctaaattaacatttactttacatttatagtgacagctgttttaagtcaaaatttgccaactgtttatgaaaactatctgagtaatcaacagttattatgttacataaagtatcttagtcacattttcactttagctaatgcccaacatgacaaaaccaaattatattgctgtaccgaatttgaaagttaactgttatttttttgtcagttcatgatacacacacactcacgctcacacacacacacagtaaaatctttacagtgaaatataaaaactaaatacaatggaaaagtaacactgttactttgttcgcgatgtttttttttttaatgttctagtcctaaatttatctgggcaaaatatttaattattatcacaagtctatttgatgctagctgaaccataaagaaaccataagtgataagaccagttatcctttagtctgaaattctgatgaaacaggaaaggtctaatgagtctca

SEQ ID NO: 72462 - DNA, 1170 bp, Homo sapiens
agagaccaacgggttatgttatgaaattttctctttaaatgattttctgaaaaatcttcactattgaactttctaaaatgccattgaaaataattcctgaaaatattgccaggggtcgtaggaggcatggttttcttcaaaatgagaaaaattgctttttaaaattcttggtattggaatgtttaacacaggaaacatgtcagggagtctgttttgggtgcagaatgctagtctagatattaatgaagtgctgcagaaacacatctctcccaggttgtgaatgatctcctcgtcttctcctttagggacagctatcttgaatgctaagatatccgtatcactgatgaggacactggggctgccctggtgaaaaccacaggccaacttcccagttctcagggagttaagattccgatgctgcagggcagagctattatttacaataaggtgctgagggaaggtttattaaggtgaccctaggacagggccctgaaagaggggaggaggcagagacacccacagcagaggccacagctggtgactgagtcgataggtgcatcacgtagggctcctgggccgttatgaagatacatttaacttccctcggactcctgttggaagtagagttgaggggagcaagggaggaagcaggagctcactctcctagtttcagcagagcatttttagctggcacagtagatgtatgtgctttgagaaatagtgtggcttttcacccctttctcaagagttggttattagtttatttaattcaatttatttaatttaaataaatcatgtatttactagttatgtgttaataatattataatatttgctatgttttgtttgcctcttcagatagtcaaggaaaattagagttgttgttttttttcctaaacccaagtgaaacacgtatttgaaagaggttaacttaagcttttatattctgccgtaagcttttacattatcatgagtgttttctatgattttaggcccgggggacacagatgaaggcctgaaaaataaaatcaggggaagctctctctgattactaattttctcataactatctcagttgatatcccaagactaatgcaaacccatctacttgatgtttttcatggaagctcatgtaggcttcgctgtgaagaaggcttgattttgagtcct

SEQ ID NO: 72463 - DNA, 1026 bp, Homo sapiens
gccgttaggaggactggaggtacacagaagctgaagcagcaagaattggtcctggtttattcacctcacagcgaggtggctgtgttgagtcttctggttaaaactaatcttgttaaattattctccaccatctcctgttggtttgggtgtttcgagtctcttaagcattaaaaaggaaataagcatctcgttaaaattctagaatttttcagcaacttttgggtcatgtttgtctttcttgttttgagtcagtttatttaaaatcacggtaacctttggtagagtaggactttatatcctttgctgtctggttgattcaaaccaaacactaatatgcctattttaaaaatatgtctattataaaaatatatctatttttagaatttcttaaagaagagagagctgagaagtccatttcaaggttttacacaaaccataattgccccttggactattgacagattgaaagtttaggaaagtaattcaaagggaaactggtctctaacttgggcaaataggggcaaaggtaataccaactttttaaaaacttttattttaggtttgggggtacatgtgcaggtttgttatataggtaaactgatgttacacgtttattttacagattatttaattatttaagcctagtacccaatagtttctttttctgctcctctccctcctcccacactccaccctcaagtagaccccattgtgtgttgttcccttctttgtgttcatgtgttctcatcatttagctcttgcttataagtgagaacatgtggtatttggttttctgttcccgccttagtttactgaggtaatggcctccagctccatccatgttcccacaaaagacacgatctcatccctttttatggctgcatagtattccatggtgtatatatgccacattttctttatccagtctgtaattgataggcatttaggttgattccatgtctttgctattgtgaatagtgcagcagtgaacattcatgtgcatgtgtctttatggtagagtgattt

SEQ ID NO: 72464 - DNA, 1065 bp, Homo sapiens
ttaaccattttcaagtgtgcagttcagtggcgttaagtacattctcactgtggtgcagccatcaccaccattcaccttccagaacatttttcatcctcccaaactgaaactctgtctccattaaacagcagctcctggtctccccattgctccagccccctagcatccccccttcttcatctgtctgtatgagtctgtctactctcggtaccttatataagtggctcatcatttgtttaagataagaaaaaaagagaaccttgtattccttttcccccaaaagtcacccaaagggaaacatctaaatttccgagagcagtgttgaagtgttattaaagtgaaagctgccagaaggaggcactgtgcttcacacctgtgctgtcttccctagggccggtgcgcttgctcccatccatgtgctgtgaggaggcctgcagccccaacccggcgactcttggttgtggggtgcattctgcagccagtcttcaggcaaggtaactaggtgctttcaatcaatcatttcataaccccctgtgcaaatatgcattctactaatttaccgattttcatctgaaatgatggaaacatcacctcttaaatattaatgacattctggatattggtggggtgcagttctcagggaagaattaggtagctctctcaaggtcactcatatccagtgcaacattctttacactttactcttcattaattttatttttgtcttatgtctgtgatttttgacacctctgtcatctgtaagtaattaacatgtaagtaatttttacccatggaataatattttagaattttagaacagcactcaagaaactcagatgagacccaggaaactgcatgttttagacattggattaagtataactatattaattagaaggaggtgtcaaaactcagttttcaaataaatggagtaatttgacttattgtattgagatgagtttataacaataggaaacactagaattctgatgcagtaaattgctatttcatttagaagacctaaaattacggctgacatgcttctttgtagtagtgtttttctcc

SEQ ID NO: 72465 - DNA, 1001 bp, Homo sapiens
ttctccatagttttaggttttgatatgtgtttactagcttgcctgtgtctggtacatctcatgacctcaattccctcacctgaaataggaaatgagaatgtttcattgtagccccaagcggtcatgtcaacctagtgcctagtcataattaattgacttttcctgtattacttctttttttaagtataaaccaatgatcctttggtagtcaagaactcttaggaacattgccttttggacatgtaaaatatttaggatttgaccacacaatggctatgaaaatgcaagtagtttcctcgcgtgacctcaccatgattcacatacgtgccactgtttgaaatctggtctgtttgcatttctgttatgacagagagatgatgtttgcatttctgttatgacagagagatgatgaaagtaggcagggctgtgttcctttgtgtagcctgtatatattttccatatgtagagccctgattaacttcaaggacaaacactggctggagaaagccagactgatgggaatgagactttggccaaaaatcccaaaacatcattttcaatcagtagagaagtgcttagggttgaaaattgatttcatttgctactgaatttggtaaatcctgggtaacttttatcaagatgaagacattttaccctacctactctagaaatatacaacaatgttatattttacactccttggaaacatttgaggaaaaaaatgcaatttgcacttcactttgttggaatatcccatagcactcaataaactcagctgctagagtgccgatgtcaggagggctgtgtcgggtaatgcgtgtggctgaatgggcataaccactgtggcttcttgtgctgcagaagctcgttgacaagactgaggaggatttcaagagcaaccaagtaaagtcatgaattttctaattttgtgtatatggaatatatttttaaatagagatttttctactttagataatgtgttaatattgctattacctagg

SEQ ID NO: 72466 - DNA, 1022 bp, Homo sapiens
ttctgatctcataaaattcacttaagatttttcaaactgccaggctagcctttgtagctacaattcttaatcagtaggctgagtttggcacatataattatttcagcagaaaaaagagccattaaactattatgatgaattattagaattggtaatggtgctgagaatactcaaacctccttttcactcccaaatctgtttagataatctgctttttggtacatccaagttattgttatgtctagtaatggaggacggcatagcacagacagctgtatatttgagtgaatcgcaggttctaaaaagagatttctgatctctttttaaaattgtggtaaaatatacatgccataccatttgccattttaaccatttttaaatgtatagttccaagccattcacaatgtcctacacttacaatgctgtggagccatcaccagtatccattttcagaacttccccatcaccccagtgaagaccctttatcacagaagtcaacaggtagaaaaatggatttattttaattccatcttttatttcttttagtagataaacagttacctaataagcagatggcaaaaagtagaaaaaagctgtgatttatgagctggataagtagcttgtgattgtgagttttatgatagttttatgatatttaatcacagatcaatgttttggaattgaacttgtgcaaaaatagtaagcaacctcctccttcaactcttgaactaggaagcaggttttcataaatcttcgggtctgattattatagtgagttactgagcatttctgtgtgttaaatgctgtatcttatttaatccttattaacaatctagcaaagtagatgacattgtgccagttttatgaacttcaaacattatactaaactccaacattttacttttacttagatttcctccagcaggggttaagtgattagtctgaggtccttacccagttgtttaacccagggtaatctcttactaaacccttgctctaaccatcaggatatattgccttct

SEQ ID NO: 72467 - DNA, 1048 bp, Homo sapiens
aaaccctgtctctactaaaaatacaaaaaatagctgggcgtggtggcagacgcctgtaatcccagctactcgggaggctgagacaggagaatcacttaaacccaggaggcagaggttgcagtgagctgaaatcgtgccattgcactccagcctgggcaacatgagcaaaactccttctcaaaacaataaataaataagcaaataaaaaagaaatgtcttagctgtgcattgtgttctaagcatctgtctcactgtgtcctaagtaaattaatttttagttgccatgatttattcaagtaccaggataaagattcaggttttagctttcaaagtgttacttatactctaatagaaaaattttttatttgtcataaactcttagaaaattttcctttagattttaacaggtcacagtgttttttttttagtctaaagaactcatttattttttattcctttatttctttttctgaaagtttaaaactacatattttcaagaaattccaaggcattgggttagatttgtttttttacctgttgaaaaattagaacttaatatctttaaggtattacaattctttttttctatgtaattttctcagtaattttttatttgagtatttttactgaaaatttaattgtaaatggaagtgatcatcatgatttttcatgtatgaatataagaacattgaaacatgcttacaaatatttataggaagatatgaatgttactagataattgcaatatattgatggttatatttgcagctgagcttgactatctgaaaagttttctggctatctgaaaaagtgcatataggaaataactttcaatattggagaagtgttttcattgtagtaattgagtgtgtctgggtagtcatgagtgtgatttaaatgtctccttgcctaagactgttgaatctaatgcctgtactcctttttagcagaattccagattcttgccttcagccattcatttattcagcaaatatttgtgcagtgccttcagccattcatttattcagcaaatatttgtgaagtgcta

SEQ ID NO: 72468 - DNA, 1127 bp, Homo sapiens
gcctatagtcccagctactcgggaggctgaggcaggagaatggcgtgaacccgggaggcggagcttgcagtgagccgagatcgcgccactgcactccagcctgggcgacagggcgagactctgtctcaaaaaaaaaacaaaaaaaaaacactgtttttaaaactgtacattttttaaaattattgttttaaaaataggctcttcatttttctgtgacttaataagtttcttggccccaggaatgcatgactccctgggtaggcagataggctcatgtctttggaattgtttagtttatcagcaaataagcataaaaagaatgcacatttaatttattttgctctgttttcatatttaatttattttgctctgtttttataattcaaaaaagttaccccatgtttatatcattttgtaaaaggcataattgaagaaatgaaactcttgaattctgatttatttatacattggggcaaaataacacctcagttgaggttagaatgtaagagtttcagttcctgataatttactctgttagaatataggtaagacattgagtaattttggcctccctgattatctttatgcatcgttactcattataaaatgtagaattgaaagagctatatttagctatatgtttagattaccagttagaagaaagcaatatttatatttaggaaatgtctgtatttttctagggaaggtttaaacttaactttataatttagaaccataattctatatctagatgcagccagaagccagaggtcatttaaattttctcttttaaccaaactaatcctcacttctttcaagtcaacagctgcacattctctacaaatcccatttctgaatcacaaagatacatatcagaagcataattgcgtgtcaaaatttgtcctttaaaataaagcattttctacttgcctgcatgaagtcaaatgttcaagtcagtgttgaaaaacaatatttgagtcagatgttgcagtgaaaaaatgctttatgtttattttagatttctttgcaaaatttagttttcagtactttgtaaacagcagatttcatgtccaaactttctttaatgctttcttctcccactgtgtttcagtggcctatatcctcta

SEQ ID NO: 72469 - DNA, 1132 bp, Homo sapiens
aagccttaaatcacatagggacattaaactaagtgtccaagctctacagttctttcagattcgaaaagaaaataatctgcaatacattattatgactatttgttaggatgtcagtttagctttaacactggcggacactgtgaattaccatttatttcttgacattttcatcttttagtcctattgtcagtgattatatgcacttaaaagtcaagagagtatttgaacaggcactcactaatagcaaaggaacagaaaaagtattccctttgaggttttaaatagatttttaaagatcggcgccagtgtcttagttccacgtaatcctgtattttcatgtacaaacccttatttgacaattaccactttttgaaattaaacagaatgtctttattcatgttgtcttgccaactaaaatatttaaagttattatttttaaactataatgaaattctattactcatgttacatttgatgttatttttaaatttcctggcttatacatagtgcagtgacttattacgcagtttactcacatatatattcttttgttttatcaagccactgccaaaaaatatggtgtctcgtctttgtgaatctaaaaaggtttgtgctgcagctgatatgcaacttcaggtatgtatgtacctttgttctgaagttttccggagtcattatcccaaataaatatataactttacattcttgccaatgatacctatttattataataattatgcttctaaaacatctttcatctgagttcaaagaacttgaccaaaattgactcatttagtcctcacactgcccttatgaagtaggcgttgaataaaattatttcctggccaggcacagtggctcacacctgtaatcccagcactttgggaggccgaggtgggcgaatcacgaggtcaggagtttgagaccagcttaaccaacacggtgaaaccccatctctactaaaaatacaaaaattagccaggcatggtggtgcatgcttataatcccagctactcaggaggctgaggcaggagaatcgcttgaacctgggaggtggaggttgaagtgagccgagatcttgccactgactccagcctgggcaacagagtgagactctgtctcaaaaaaaaaa

SEQ ID NO: 72470 - DNA, 1589 bp, Homo sapiens
aacaacacaattattaaaatgcaagtaaaaaagcagtacagtgtaacaactatttacatagctactttgtattaggtattacaagtagtctagacatgatttaaagtatataagaggatatgcatctaggttatctgcaaatactatactattttataccagggacttgaacatgtatggattttgttcttggaggaaggtcctggaaccaacccccctcagatactgcaggttgtacattccttttctggttccaggtagcaggatcaggtgagattcattgtgtattacccagctgcttagtaggatgccttgcacagggtgggatgctcggtgaagatgagcccagagagtcttgtgacaggtctcacctgcttttcttgctctgtcttctcttacagcccatttcgtaagcacaggaggcagccagcttcaaaccagggctcatttggacttggtgggattctatagtgacaaaaaaaaatctgcagatatttttatgaaagaaactaggaaggggcataaattatctgaagtataaagttcactcagtaaaaattgctttgaaataaattcacattaacataaattctcaatccatgtttaaaatagtctgcccttgttaagggatacagattttatagaaaactgtttctgaacaactctatagtaagatagtttgtaaaggttgcagattgcaaagctttactgagggtataactagatttactattgtatttcaataaaatgcctccataaaaataatagttgataggtgatatctgaaaaaataacagagtgggaatctccctcttcactgtggaaaaagaaaatgttgcaggagggaaatgtggagcttgcagttggtattatttggcgtttttcagtatggaggcagtgttggatgctggctatttttcttctgttttggagcagagaaatcagaatgagttttgtggatctgctaatgcattgaggagaccagaacatacagcaccttctgtgctctatccatttgttccctggccataaggaaaggcaaattagtgtgctttcatgagctccatcaactttcattccttagaaatgcacactctgatggggcattggaactggctcaggcaccagagcggcaggacaccctgcaggcaagttcccagaatgtctgggggctgtgctggcctgggagaggcagagccaggtgcgatggagaagagctgaagagaagctttctaataaagtgggtgtaaatataagactggaaagaagctgtaagatagccagaataacagctgtatttattcctttatttctttacgatgttttatttataagaattctttcttttattagtgaaagttacatttaattgctttaccaagtcattttccaactagtgttgtacatattaaatcacctgattataaaagatgtatggggtggagggagcaggtgttctgtgctcaaataattttggaaaatgggtgtagcattaaatgggtttctataaaggtaggactacgtataatttaatatgctaataactggaatccccaagaaaggtgtttacttgagtgaatttcctagac

SEQ ID NO: 72471 - DNA, 1289 bp, Homo sapiens
tttttatagagacaggatttcactgtgtttcccaggctggtctcaaactcctggcctcaagcaatcttcccacctcagcctcccaaagttttgggattacaggcgtgagccaccatacccagcctcttcagttttcttctaaacattttaatgctttcttttctctttcaatttttaatcaagttggaaattctttctgggtttggcataaggcgggaatccattttactttcttccgtgtgagtaacaaactgtcccagcaccatttagtgagtaatttaccctttcttcagtgccattactcatgtacatgcaattgtcagtttgtgggattctctttcattccattgtttaagctgtctgtcctaatatcaaagccatgctgtctgtattactagagctttggaataagttatagtaataagcttactattattaataagtaataataagccttgatatctggaaggataggccttcctcgatttgttcttcaaaatttcttgtctactcttggacctttgtattctttcatatacattttagaatcaggttatctaatttttgaaaaattctggtaagagtttgattgggattacattaaatttctaggccaatttggagagaactgatatctctgaatattgaatctttgaatccatgaatatggcatatctctccatttcttgggtcttttcaaaagtctttgaatacagttttaaaattttcttccagggccttggtcagcttttgttgggcttcgtcctggatgcccttcctttttgatactataagcagtatatatattcagattgtttgttactggtgtttaaaaatgctgtttgtccatttttgtatagtgctcttgtttacagcagctttgctaaactttcttattaattcacagaatttgtctatagacttttacaagcttttttaaccagataattacttctgctaaaaataatgacagctttatttttcctttccaaccacgtatcttttctgtttaccttgttctactccacttatgagagcctccttaatgttgagtaaaagccgtggtatgggcattcctgccttgatcctggtgtttaaaggaaatgtttttaatacgtcaccgtaaagaaagatgtttgttataggtttgttggagatatcaggaaaaggaaattcctttctatctccagtttgctactatttttttaaatcattaatgggtattgcattttatcatagttttttcctgcatcttttgagctgtcagattgttcttcacctttaatctg

SEQ ID NO: 72472 - DNA, 1027 bp, Homo sapiens
gtagtgattgagtctctcctataagctatgtctcttggagaggggatagatagtaatattgctgatttttaactcaagctgggagctgcattgtggtgttttcaaattcaagggttataatttgcttgggcgtatatcacgacattccaggatttgaaggaaaaataatttgctcctaaaattgtccagccagcacttcttcccagctcttgtgggtggttagtaaaggtattgtagaggataggcagtcaggacaaaaggccctcatgaggaggatttcctgtcctggacacagaattccaaaaccaaaatcattcaagagatggagcagaagaggatgcggggaaaagagaatctatctcgagataatgtggggtgtagaatgtaattaaaatgtctatatgtgtggctatggatgtttaatatacagattcttgtgttagggattttagagaatcagatggcctcatttaccaccaaatttaaatttttttttctaggctgttgttcatgaatctgaaggattgttggggtacatttactgtgatttttttcagcgagcagacaaaccacatcaggtgatcctttctttataaactggtctctctagaaccgatcggcatttcatttgtattgatgtgaactttgtatcattttttaaattccatgacatttaaaagttactaatgatggttaccaaatatatacatttgaaattaagatagaattttaaaattaaaaagtttatggaaataattacatcagtctatatttgtcacttttatctgggtcatggtattaattatagtaacaatgacaactgacattttatgaatccttatttgtgccaaacagtgcactgagcccgttatacacatcagccttttaatgttcgcctcacccttttgactagttactcacattatgaggaaactgaagccatagaggttaagctacttggccagaagtgctaggacttgaaggcatacatcctgagcagatccccaacttttaactcttttccata

SEQ ID NO: 72473 - DNA, 1017 bp, Homo sapiens
agagttaccattataactgaaactgatcatattttgcatgtaagtatgtataaggaatgtatacagtgagcagttgagactgcttaattgggttagtgaaagagtaaataacagggaagggacaaaggttagggaatgatatatctaccttaattactgacttataactaacactagtaataatcagactgtcattctgaagaaaactgtctgaaaacccctcaaatgatataaatacacttttatgttttgaatccttctttagctccagtgatcttaagtattaaatgaaaagttaattgaatttaccttcagaaattgaaataaacaaagatgctgttgaacctctcttccttctcttaggtataatattgagcccagcctatattgcccgtttttctctcttggagcatgcatggaaggcctgaatattttgcttaacagactgttggggatttcattatatgcagagcagcctgcaaaaggagaggtgtggagcgaagatgtccgaaaactggtgagctcctcctgctcagcctgcagttgcaggcatttacctttcggttgggcagttgagtcaacagcagtttcaggtttacatcaactttgccctgactgagtgtgtcccctgccttatttctgcttcacaaaaaaaatccaaattgcacttctgatttaagacactgtataaaggatccaaacataaaacagcagagttttctaaaaaagttttttggaacttgatagaaggttgaatatatatgcaccttcatatatccacaaattctatttataggaaaattgtcctttactttgtatataccttcatagctgtgtgtccgttttggttaattcccaaatccattggataagtgaccttttttctctccaacccccatcccatgttgtaggggcttatatttgcatcagatattaatttacgtccgtgttctgatttatttaacttctttgataataacttcaaacctagcaatcatctttctcctgtgaaggccc

SEQ ID NO: 72474 - DNA, 1011 bp, Homo sapiens
tttgctccaggaaagcacactttcagttacctctagcaccgtccccaccaaagacaggctgagctctgatcttcccttcttgggccactcactcctgtgtatggtgagggcctttctgagtggtggagcccaagctgcatgcagctgctctagaagcaaggaagactgaagccgggcaatgtttggccaatcacaagcaccgtttggtgaggtgagcatattcagatgatcattttaagtagcagttcctctaaaacttccactaaaggccattcagcagaaatcccccaaacacagacaggcttgagatgctgggtggccaaaccaaatggcgagtgccctatgccagcaaaaccagagagagcgttaagtcagggttctggcctggggaggagggagatgacctccactgagtgctctctatgcatccagctctggacaaaggccccgtgtgtctcacaaacctggtttttcaaatcaggaaatcagtggcttgagaagtttaaagtcctgaggcctcccaggtggtacatggctcaaccaacagcatctgtctatatgtttttaagagcatgacaagtagtcattagagtatggagtgtagaaattcacagcaccgcccttgacaggaaaccaggtgtaactacacttttgtgttctacagacacacagatggggttggagaggaggctaccaccaggacactgtggacattggaaggcaagggtaaatagagtcttggggtcccggggagacacaggggtccaggacacaaagcctgccaagcaccaattttgtaaagttcagttttaatgaggagaaatgacttgaggagaatccaactaggcctcctctcctgtggatccaaattgtaccaattgaaagggggaaaagggtcgcttcaaggcaccccaactttagattttttagtagtctgaggctcttctcttcagcttttgctgattgtttgctgtcgttcctttataaaactcttcccagtttttgaggata

SEQ ID NO: 72475 - DNA, 1042 bp, Homo sapiens
gctcctccgagagtgcggcgacctcggggctccgccggcaccggaggtggctctgagggcagggacgtgttggacacgctgactttgtaggctccgccaagaggcgccgcaggaggtaagacggcttcgggcgcgcggctctgccgggcgggcgcgggcatgggctgttaggtagaatatcgggaggatttgagtcccagtggactgcctcggggcttcgggatgtccagctcccagctgcttggcctctgcttcccccgccggtggaggctaccgggtgctcacctgttaggtccgtgcgcccgctccctgcccggcggtggctctgcgccctctgggccacccggcaccatcgcttttgggaggacatgcacgtggtgttctcgcaaaaggccgtttccagccggaagcctgcagggaggtcgccttgtaacttcacccgcgctcccagctcgcggggcctggcctacaggggcggccgtgggggtggcagagtctggggagcctggcgcggcggagccctgtaacgctctgctccatcgggtggcgtggctggtgcctccggggacccggagcgatgcggttggagagcttagtttagaaagcaagtttctcttggtaccagcggagtctcgtcccaggggaaagattttgggacccggtgcccatcgtctgtggactgcagggaatgcattggcggagttggtttggtcccattctgtgcaggaggtgggggaattggtactccagccccaggcaggtagaagcccgcgctgctgccagcgtcagggggagctcgggtgacttgggctgggccacccatctgactgcaaggttacagagcttgagcaaatttcccctccctccaagtgcaggaaaaccaaaccaaagcaagcaaacaaaaccctgtgggtcatttgcttcccagcattgcatagggatgtggataaatagaataatactgtgaatttattcagctcttgttcccatggcttcccatagccttatattatgcacctccccctgccagcattttctctgt

SEQ ID NO: 72476 - DNA, 1077 bp, Homo sapiens
gcagcatagcaagaccccatctctaaaaaataaaaataagaaatcagctggttgtgatggcgcactcacctgtagtccaaggtgctcaggaggctgaggtgagaggatctcttgagcctgggaggttgagactgcagtgagctatgattttgccactacactgcagcctgggtgacagaacgagagactctgtctctaaaaaaattaagttaaattaaaaaagaagactactgccagctgtctcctcccgtgcattgagagttccgtttcactttagctggacagatctttatggtctctgttagctgtgtgactgtatgagtcttatttatatccatttcattatgtaatcttaaagccttgtccaaacatttcttttttagtctttatcttcctaagagttggaggcaagtagtatttctactttacagatactgaagcagagcatgcaccttgatagctgaaagggactttatattctacagatgaggaaaccgtggtccagggaaataaaatggcatattcaagggaaagcagcaggacaaagttggctctaaggcttctctggttcagggctcaatgcctggccctatagcttggtaggttgacctctctgtttgctgctggaagcaacaaagtttctttccccttcctttcccttgagctaagaggcattggaaggtttcacttagaaggggaactcatcagtgctttcctttcttttttgtctgaaaactaaacatttaagaaatgtttgcctatgagacatgtaatagcataaatgggatcataacatcacagtggtataaattcaaatgttttagaaagaactatcattgttatttctaaaacaccaggaatgaacaccaaatgtacatggttttcttgagggaaactatataatacatggcaatttgaaaatcagtacctggaatgtttaattgtattttacatttgtggagagaaatgcattggtacaaagtgcttacctgattttcctcatctttgcatcacaaatgaaagagcagtaaagggggagcatagagtaggttgctgtttttctgttggcctctgctg

SEQ ID NO: 72477 - DNA, 1091 bp, Homo sapiens
acaacagcaactccgaaaagtataggtttatatgattcgttgttgggaacagaagagtgttctttgatgggattgttttaaaagaactggaatgtccagtggccagttacacttgcatggttattctcttccctctgtaaactcatcagtgcgggattcagaaagaacaagcatggaacacattcctccatgccccttctttctgaatcctgcagtgatgagtttacagaaggaagacaatttgcatggaattttagttggaaatacattttcccattcgaaggaccctacaacatcaaacgagtgagacgttcaacagccgctgactgctcactagagctgggtggttttagatccccaggaaatggctgtcgtgccatctgagcatgaggcacttggaaagcagtgcccatcactgcctcatgtgttcagcgctgtcatttttcaagagacgaaggaagatggtgaagtcgtgacccttgtctcagaacatgcgggtcagatctgacaacacctgctgcttccatggggagggtggagtgaggagaactggtgctgggaatgctgatgccatcacacgtgtctcacgtatggtttcctgttgaatgacagtagccatgtcctacttctctcccacctacagtgtcctgcagatgacagtgggagtgccacaaggatgggtgaatggagcagcatacagggctgataattacaaatggcccaacaaggaggtggccacgtgtgcttgctggtgccccactgggtcagctgtgctgacttccacatgttcagacagacttctgcatttgtccttgtatcagtggtgaggtttggctattcaagaaaaagcctgtaagataattttgaacttgcagattaatggcatacccaaacctggtgattggttacgtgaataacaaagttttggtgcatagatgagtttcctcagctggaggaacgttgggaaagtcaacatctgacacagaagaggcagaactggttggcctaagaaaagcatagggatttgaaagttaaggcagtatataattgtatcagcaaatacctcaaaattcttatttatcagtgtttta

SEQ ID NO: 72478 - DNA, 1020 bp, Homo sapiens
tgagatggagtctagttctgtcgcccaggctggagtgcagtggcatgatctctgcttactgcaacctccacctcccggattcaagcgattctcctgcctcagcctcccgagtagctgggattacaggcgcccgccaccatgccagctaatttctatatttttagtagagacggggtttcactgtgttggccaggctggtcttgaactcctgaccttgtgatctgccccccttggcctcccaaagtgctgagattacaggcgtgagccaccgcaccgagccaccttgttttgtttccagactcactggactaaatgtcaggtcctcccagcctcctgcccactcctgtacaaacagaatcataggaagtctctttataataaagcagcaagcctatttcaggtacacatgtgttttgctggatgttctaggaaggtgaaaaagagtctagaggtctccaaaaccctttgccattaaatccttcagacgcagttaataaaatccataggaatctcccacagaggcgttgttgagtttggcttgggattactatagaggtatgattattaatcttcattcttgtggcagtttacatcagtttctagataaatgttgattggaatttaaaactctatgtatgttcaagcaaggaggtgagttttgtttggtagtctctttttctttgtccttgttctttctgccaagtctgggtcgtcctgtgagggctatcccacgtgctgccacgaggacatggaaactagtaaagtttctgcaggtcagcaaagttagatgagtaccaccagcagcaggtgtcagctaataagcagagggcatttcagactggtacctcttcctcaggggtgatgcaggaccttttctgctgttgattaaaggattgtatttttagaatatatattacatattcttagaactataaaatctttttttttttttttaaggcagggtcttactctgtcacccagtctggagtgcagtggttcattctttgttctcttttcagg

SEQ ID NO: 72479 - DNA, 1084 bp, Homo sapiens
attcgttgatacatctaagtttatccttgccttttaaaagataataggtaaggatatattaccttgttgtgtgttgtgagtttactttttatcctaggatttaagtgcaaaaggacgttaagaatcctgggctatggaagagcttgatcttcctgcctctgagccccagaaccctcttttgtttgcagagctaaacagccacaccgagtagatggcccagcagcagtaaatgtggtgcccacagtcgtaaaggacagttgattctgcagggaacggcccgttcctgagcctctcctggaacgagtgtgtgcttgggcgctttctccaggttggatgccagtgttggcctcagagacctgtttgctttctttctttccctttttttttttttttttttttttagcttcacttgtactttaaggtacaatattagaatgttcctgtgactttttttttttttgtatttgtagatttgggataaaaatggaattaaaaagcctgaagggagcgggaggagggaatcttgcaaaatacagacggaagagagtgagaactgtcttattagatagtttttttcttttgttcttcatctgtttttgcatttattatttgagataagaaattttcattaagcaaaggtagtgaaacactcccaggagcctggaattacgttatgaacacggcttagtttgggaaataaaaatggcatcatacggaagcattccacttacttgcccaatttaggagtggagaagtcgacaagcaaacaggaaaaccctaacttaggaaacagtatgtaattcctggaattatggtgagattttttttttccctcaagttttattttaagttcctgggtacgtgtgtaggatgtgcaggtttgttacataggtaaacgtgtgccatggtggttggctgcagatcatcccatccctaggtattaagcccagcatccattagctattcttcctgatgctctccttcccccatcccctccctccccacaggccccagtgtgtgttgttcccctccatgtgaaatgatgggatttttactgtcaagctttctgaagttgaagttgtct

SEQ ID NO: 72480 - DNA, 1051 bp, Homo sapiens
gttctttgcagcactattcacaatagcaaagatatggaaccaacctaaatgctcatcagtaatagactggataaagaaaagtggtatgtatacaccatggaatactatgcagccataaaaggaacaagatcatgtcctttgcagttatatggatggagttggaagccattatcctcagcaaactaaagcaggaatagaaaaccaaatacagcatgttctcacttgtaagtgggagctgaatgatgagaacacatggacacatggtggggaacaacacacggtggggtctgtctgagggttggggatgcaaggagggacagcattagaaagaatatctaatggatgctgggcttaataccgaggtgataggatgatacgtgcagcaaaccaccatggcatacgtttacctaggtaacaaatctgcacatcccgcacatgtacccctgaacttaaaataaaaatcggaaagaaaataaaatctgttccagtccccagtttcagttcttttgggtatatctccagaagtggaattgctagagcatgtaatagttctgtgtttgagtttttggggaaccaccataatgttttccacagtggctgcactatttcacatttccaccaacagtacacccgggttcgtttctccacatccctaccagcacttgttattttctgtttttttaaggtaacaggcttctaaatagatgtgaagtggctagtgttgttttttatcaagacaaatcttaggaaaagaatgcagtatttgtgtgacttgtaaagataaactatgcaactgtaaagaaatgttcagcgttcagtaacctgctacctctgcgcatcacccaagatgcagactggctatcctgagccatcagggaggcagtcgcagtggattaggaacacagatgctgtggccagactacctggtgtaggtggtggccctgtcactttctatggtgtgatcttaggacctaacctcagattcttgcatctgtgaaatggatgtgataatagagggtagttgtgttgagaatatctggcgtatagacat

SEQ ID NO: 72481 - DNA, 1297 bp, Homo sapiens
cctccactgactcccaaaagcttgggtcaggaaggaccaaacgctggaggagcccgataagggccaaggactttgacagagtcttcaaacttgtgagcaatgtgactgaggctgcctggaggagggagagtcctaggagtggggccccatcccctggagaggccagcctgagacttcaggcacacagccggctgcatgacgactactcccgccgcgtctccaggagcactgagcaggacagcaggcggggcggggcggtcatgcatgggaccactgcaacctgcaccgtggcccccggtttcggctcagccacctctaaggggccccacctagacgctgacactgccgtatttcctcttgaaaccaaaagttcctgggcggtggaaagcgacagttcctgcacttgcagctctttgccaagcccgattgtccaggatgtgttgagcaaagactcctgtgacccaaacgctggcagccagttgacatttgaccctgagcagcctcccacccctctaaggcccaccacacccaagccccagagccctcagagcccccagagccccggggcaggaagtgccagctgtcacagcaatcacagtgccctgtccgcgaattcagaggaaagtgaaggaagggcagaagagcctgctcagagagagccagggcctgtgtccttgcaggatcccctggaagccacacatggtgatgagggcagcaaggaccttctggtgaacattggtgtggcagccggcccagaagaaaaggagaaggaggaggtaagggcagcggcgaggtccctcatgtgggcgaccctcctgcgggaagggagcttgcacaggtgttgcccttggtccctaacctgtcaaggtcagtggccctctgctgaccttgttgcccttacagtattagtgggaatgggagttgtcaagttgctgtttaccaagttcagaagtaatctctatctcctttgaaataaattgacaatgtacgagattcattgagatgacatttgccacacctttcattcaaaagatgtttattgaacatgtaccaggtactagattctgggggaaaaaaataagttgtaaacaaactgtcttctgctccatgcagctctgactcatatctttcttctttgtattttaagctgtttctgtaacctttcccacaaagtacatataagtgaaattctttctgttaagagactattacctgtcctaatgtcacagcacctgtgggtgtcacttgaccagctggaaacctctgtgggctggcagtgcctctgcttgagttttgc

SEQ ID NO: 72482 - DNA, 2114 bp, Homo sapiens
gacttgcctgagattgcactaggtcttgggccagacacagtgactgaacatgtctgctcgattcccagcatcatgtgcttttctggtacattgtgttgcctctgaaaaattatctgaaaaaattagaaggtgatgcctcatttaggatcatagactcttgagctgtgggattgtccagtccaaaatctgagatccagaaaggtcagttgtgacttgtcccagctcacaccactagtgagtagcctagtctagttctttgaatcctcgttcagtgctcgccccatcagactgctgcctggaggctgttggtgggagccagaggctgctcgagtgttgggtcctgacagccctggacttagtcctcttaaagcaccttctatttttaagtagtgcacgttattgaaagaagtgggtagaacagcagtggatggcattacccattcatttcttctcctggcaggtctttgggggacacctatgatagttataaagttcattttactaattcacgatggtgctgattttcttttttttttttttgagaaagagccgtgctctttcacccaggctggagtgtggtggtgcaactgcaacttttgcctcccaggatcaagcaattctcctgtctcagcctcccaagtaggtgggactacagacacgcgccaccgcgccccgctaatttttatatttttggtagagatggggtttctgcatgttgcccaggctggtcttgaactcctgacctcaagtgatctgcctgcctcggcctcccagagtgctaggattacaggcatgagccaccgcatccggccagtgctgattttcttaatgccttttatcatagctcatcattggtcaccaaaccactatttcaattatggttattgaaatatcagcctagaatcagcctattgaatcagcctataagaatagatttggttattttgattaaggtttggttgtgtcttcatgttctagtacacaaataactgttttaataaacaagtaaatcaagaaaacccgaggcacggctgtggtggtgagagggaatgtatggcttgttctttctttaataccttcctggatattgagctcacctgacctgttcgcatttgaaaggtcgtccctgatggcccctggaggcgaagctcatcacaggatgaggaaaggacagaggcacagagaacccccaagaggagatggggctctgggagacggccaaggcctcggccattctctgactacggccagctggccagccgcagtttgtctattcctgaagactcggttgctgcagacccccagaaggaagaccgtgtggacgaggacccccaggcaagcatgacttctgccagccctgaagaccagaatgctccagtgggctgccccaaaggagcccggagaaggcgccccatttccgtgataggtggggtcagcttgtatgggaccaaccagacggaggaactggacaatcttctgacccaagtaagatctggtgtgcacttccccaagccagcagaggccctccagcttcctgcctctattctgtctgcacactaaactggatctgctttttctctcccgttctcaagggcggcaccatgtacttaaccaccttttcttcctgactgtgtgaaaacatgcatgaattcaaactaaccacctgacgtttggatgccttttgctaatctttctttcctgggatctcaaataatacatgagactcatttgctgtttgtttctgaataacctgagattctaaccagggaaaggtagcagggcatatttagtaagactcctgaaagaagtaattgttgaaaaagacagtattgttcattgttaaaatgtaaagataaaatgtaaagaagaaataaataaaatgtaaagaagaaatagttttttaggagatgagaaagtattttgttttccaccattttcttattttttttttgagttgcaactttgcaactattaatagtttgacaatggattaaacacttagtactggtttcttagtatagtttagtaattcaacaaatatttatccgggtatccagtgagcactttgaaaatacaaaacatttaattaaagaccctatcttggagaagtgtat

SEQ ID NO: 72483 - DNA, 1090 bp, Homo sapiens
tggtggtggggccgcagtgaagataaggaagcctggttccccgcgagcttcgtcagagtaagtgtggggtgcttgcagcttttccaaagtacctgggggagctgcaggatcctttcaggtcagaactcgccttttatcaggtcagctcttttgtaattgatatctgacatgcaagtcacacctgtaagaaattaggctgggtcggagcaaaaatgttaaaggcaggcaagcgagttgctcggtgtttctctgtggtcctcgtgcctgctggcatagccgcagccctgctgaggccatgagactcaggcgagggccaggctgccttcctaacaggtcacaggaaagtaggaacctgggaggtctcctgcctctgctccatgctgccctcccctgccccaagtcacctgtcccctgtatgtgggttgcagttgcgagtgaatcaggaagagctgtcggaaaactccagcagcacccccagtgaggagcaggacgaggaggccagccagagccgccacagacactgtgagaacaagcagcagatgcggaccaacgtcatccgggagatcatggacaccgagcgggtgtacatcaaacacctcagggacatctgtgaggtgggacgccaggctgggacctcactgagggtcacagtatgaggctgcatgaggtgcctgggctttctccccacctccaccccccgcccccccatcaggctcccacatgtatgctcatttctccgcctctgctgtctgcactgctaagtctgagtgctgcggctgtcctagctgttggtggaggttttttagagtcagggtctcttttcagagacaaggcttttcttagagatagggtcttgctctgtcatgcagactggagtacagtggcgtggtcatagctcactgcagcctcaaactcctgggctttaagcagtcctccctcctcagccccccgagtagctagggctacaggcatgcatcaccacacccagctaattttctaaattttatatagagatagggtctcactgcgttgccgaggctggtcacgaactcatggactgaagcacttttcctgccttgatttctcaaag

SEQ ID NO: 72484 - DNA, 1949 bp, Homo sapiens
gttttttcaaaataaaaattagttgacatgacagaaagtccatttccttgtcttaagtaaaacaaagcaaaaattcttttaaaaaaaccattacaatttagttttgtccagaaaaacttattttgcgaccctttcttcattgctggaggcctctttgggggctctgtgcccattattttggcagtccctggtgtcattcttgctcctgctctctgcgccacttctgggtgtgaatgggcgtctctgaagacagcagggtctgcttggtgggcagtgtctggggacttcacaggagctgggatgaattgtgtttggtaaatagacaatagaatctgctttcaaggctttcccatggctgcgcaggaggattctaattcattccagctgtgatggagtggccctgtctgtgctgtaagttgccacgggaaagcggaaaatatagctcattagctggatggttggtctccatggccccgcattattaacgctgagcaaaacctgaatgggaagcttgcagatactggacatgctctgtgctagcctgtgtgtagattaaaactgtagtttctgcttttccggtgcctacagttttagcgggcttgggagcggggccctcctggggagaacattttagcttgacgtgactgtggtggacggaaagcaccagaaaggaagatctgttggtgaggcgaatgccatactggcatttccgtaactcaccacttcaggtgcctgtcctctcctgtcctttcccgaacagcataaaagatgaagactcagagcaaatagtcactgttgaaaatggttagtgatttttaaagtactttatgtagcaagagtggttatatgagaatcagagccataataaagactgttctttctgtattaatgaaagtcacccattgtcaccgtgactaaaacttacttatttgtggcatttactgtcattcattgtaatttctgggaaatgagtgaaaacatttttattccaaagaattctgaattgcactgggtcagctcccttaatctatggcagactgtagtctattcacaagggaacaagaaaaagggaaacagtggctaatgacgtaaatgtcactttgtctagagcattcgtatacgaagaagcgccccagtggattattttgccagtcctcatttgtaaggtgcatgttatgtgattaaaattaacctcccatcttgcagtgattacagcaacataaaggcagcatatgaggccatgaagaatgtggcctgtctgatcaacgagcgcaagcgcaagctggagagcatcgacaagatagctcgctggcaggtgtctatcgtgggctgggaggtaagtggaaagcaccccacatgatcccatgccactcgcccttcccgcacctttgatctggtgcagatgcactttaatatcctgtggtcaatatcttatattcttggctttaatggtacatataccattaatggtaaatgtatttcgaggcatactgttgaatttaacagtcgactactttataccccactcccataagaaataaaatctgaagagtatctgcagttaatttattgctgagcctctctctctcctcgtagagggagtaccgtgggaacagtagagggcatttcagttgcagccacataacatagtagtagaagtatgggggactctggagtccctgcccacatgtgaatcctgtatgatctggccaagattaatttttttatcttataaattggggaggaaaatattacctacctcataggctaccgtgagcattttataaaacagtacaggccaggcacagtggctcacacctgtaatcccagcactttgggaggccaaagtgtgagaatcgcttgagcccaggagtttgagactagcctgggcaacatggcaagaccccatctctacaaaaagtaaaaaaaatcagccaggcatggtggca

SEQ ID NO: 72485 - DNA, 1098 bp, Homo sapiens
ttaccacatgtctgaatggcactgatctgagccatttgtacatatatgaactcatttaatcctctacaccatcctatgaagtaagcactattattatacccatttaacagatgggaaaactgaagcacagaaaggttaaataacttgcccaagaccacacagctcaaaagtagcagagctggattcaaacccaagcaggcaccctggcttcaaagtccgtgctggtgatcactgtgctctaccgccattaaattaagaacaacaagcagatgccattcagattgtttttagaccaagctacattgattttacatctattaattggtcagaactcactctcccagaggactgagaaagtttggagcaagaagttaggtttttaactgaaataggctataggtggtgaaaattggagagaaacacatacatttcaagggccttatagacttctggagtttgggcaggatctctgagaacactgagtccaactcttttatttcatcagtgaagaatctagggcacggaattgctctgagcaagtaaatagaagaactattttggagtcaggctcttttgcctccaaaaaatattgtgtgtgactgggattaagggagaatcaaatcttatttaacaaaggccattgtcataccaaataccataaagtaacattggattagattcaacctaaatataataaaagtgtgtttttctttttgattttggacgctgacatttaggggataatttgtcagaagttaatttcttgctgacaatttatcgtctggccttttgtttctatgaccctgaacaagttgcaattccagggagctgccatatactcaacgcaaataatgtcaggtccataatcacgatactgtgtcccctgcatgaatgctttctcccatgtaagcctgcgtgctctcactcttggaggctccgtttgggtcagctgctgtttcagatcttgactgggttccattaattcagcatgcctcttaccagaggcttcaggctaggaagacccctcagctaacacagaggcactgtcacatttttctagtaagcaggaaaaaaaaaagaaaaggaagaaatttcagg

SEQ ID NO: 72486 - DNA, 1058 bp, Homo sapiens
tgggaggatcgcttgagcctgggaggtagagattgcagtgatccaagatcacaccactgcactccagcctgggtgacagtaagaccctgtctcaaaaaaaaaaaaaaaaaaaaaaaaaaaaaagaattagctgagaacttggacttggagtctcagcatttttatttttttcctttctggttaacaagcgaccctcagtccctgttccatctctctcccctcccgagtcaggctacaacaggtgccctgtggccccaccgcaccagggcctgcaccccatccaccagcgccacatcactatgcccacaagcgtcccccagcagcaggtctttggcctggcggaacccaagaggaagtcctcgctcttctggcacaccttcaacaggctcacccccttccggaaatgaaaacaggaggctgtgcttccatggagctgggtgtcaagagaagaactgtctttgtttcttgtgtgcttcaatccagggaaagtttcttggacccagtgataaaaacttccttttagggatcaatgaaggagagaaggtcttggaatcaccttcagtctttggagacccagctgcctttgtggaagggaggagacggtcatgacacaaagctttatcctacacagaaacacccgtgacccactatgagatggcccagatgtgggacccggtaccatgctctaaagcgagtgattaggcagcagctgaagccacccctgctgatgatgagcaagtgcctgctgcaggtccaaacacagcatccagggctttgcagttcctaaggagtgatgaggttagaggatcacttctgcatttgattttcaaggatgccgtcaagacggggttgacacaatgctgcacgtgtctggtcacacttagaaattgagctcttactctcttctgtaatactgggggacctacagctgccgtggggctgaccacggtgttccctggcatcgtctgtgtccacacagatgctaactggtagtgcaaatgtcatcctgcaaggttcctcttcctgcaagcaaagtggagagaaagaagatgcatctg

SEQ ID NO: 72487 - DNA, 2873 bp, Homo sapiens
taggtatcttttcctgtacagtaggatcctctttgaatttcccttgtatcagtattgcccattcaacattaacacactgtgggcagtttaatcacaatagaatttcttcagtaaaattagccgggtgtgttgggacacacctatagtcccagctacttgggaggctgaggtaggaggatcacttgagcccaagaggtggaggctgcagtgagctggtgccactacactccagcttgggcaacagagcaagaccctgtctcaataatcatcatcatcatcaaaataataattaagaatttcatcaataggtcaccattgtgaacttcaatgtggacatgctttttgtgaactatgcttgttaatgactgaagaatgcaccacaattatatgccctgattgtgaggtaagtgttataatttttcagatgaaacatatcacaacctaatgttaatggtaaaaatactacagtagtaaaacgtacttctagttagaaactaaaaagttggccgggcgtggtggctgacgcctgtaatcccagcacttttggaggctgaggcgggcagatcacgagatcaagagatcaagaccaccttggccaacatggggaaaccccgtctctactaaaaatacaaaaatttgctggacctagtggtgcacacctgtagtcccagctgctcggtagcctgaagcaggagaatcgcttgaacctgggaggtggaggctgcagtgagccaagattgcaccactgcactccagtctggcgacagagcaagactccatctcaaaaaaaaaaaaaaaaccctaaaatcttgcatttttgctgctgaatctttaagcaaagaaacctaacaaaagataaaactttttctatccattttataattgtgtaaagtgatcaggaaaaataaaaggcgctaaagtcatacacttatcggcctacatattttgattctttggtgacttctgtggaaaattatgtcttttgtttattttaatggtgtatattcctttaaaaaccctagcccctgttttacccaccaatccatgcaaccacattttgaactccccccctgcccctcaacctttgtgtgtcatcaaatgtacatttgggagatgccattctacaacaaggtagagaagcaaaactactgcctaaaatttttacttcagaagccattaagactgaaatctttccataagaatgagaacaaattaaggatgtaaaataaaatttacttgatatcctattcatttaatacaaatataagtgtagttcagcttatataatattgttcctggaaagttgactcaagctgtaaattcctttttttttttttttgagacggagtctcactgtgtcccccaggctggagtgcagtgactcaatctcagctcactgcaacctccgcctcccaggtccaagtgattttcctgcctcagcctcccaagtagctgggactgtaggtctgtgccaccacgcccgactaattttttgtatttttaatagagagggggtttcaccatattagccaggatggtctcgatctcctcacctcgtgatccgcccacctcggcctcccaaagtgctgggattacaggcatgagccaccgcgcctggccaagctgtaaattcttgatgttttactggataaatcagatgataaggctttgtatcatttgttttctgtggaagtgtggcaaaccctatggaggcatgagatctagaatgcagttctcattctgtcagtctagcctgggtttcctcatttgtgagatggatataatacctgctttgtcttatctcctaggattgctaagaatcaaatctgaattatgtaacagttctccgtaagcttccagactactaaaataacccttcattatttaggtttgaatgaactgccttgcaagttaaatatggttaaaaaaaacccaaaccatatattgtaattaatgaaagtttaaattataacaaaaaattacatattagtagctgcctattttgtgggaaattcctaacctcttcccttttttttttttttttttgacatggagctccttagacgtggctggctatgtgggtaagacgaagtgagccctcctcatgtggttgtggtagtagatccctgatggattcagtcttgtgggtgaagattaagtgaagggaaaggaaaggagcaggcagctggaactgtctgtgtccatatccgtcctgttctaatattaaaaaaaaaaaagacttggcaaatgatttcacatttaatgttcttaaatcattatacttgtactatttttgggattttggataatgtgtaggagtgtttataatgtgtttacaaatactaattttgattttaaggttgtgataaatctattttgtatcattgactagttttgctctaacttttagagataagtgacctgtcccatcctccgttcctattcccccatccccacacccacctactgttagccgaggtaattgacaagtgactatattcacattcttcagacgcactggtgagctgggccctattaaaggaagtcattcaagaaaccttcctgaaattgttatcactctttttaaactttagatttgtattattacctaatatttatttggaataagatatacagagaatggaagaatctagtttaaatttagtgaagtctgaatttatggaatatttgaggaatgtagtttattacatttcaacaaggtatctactctaaaaagtaagatttagattcctgtattcacgttagacttataatttatctttaacttcagaggcctaggtaatgctgtttacttcaaatgtaagcctaaaatccattcaagattaataggtatccttttgttcttatttctg

SEQ ID NO: 72488 - DNA, 1085 bp, Homo sapiens
agagttttgaacatatgttactattttttttttcactttttttgaaatagagtctggctctttcacccaggctggagtgcagtgatgcaatcttggctcactgcaacctccacgctctgcctcgccaggttcaagcaattctcctgcctcagcctccctagtagctgggattacaggcgcctgccaccatgcctggctaatttttgtatttttagtagagatggggttttgccatgttggccaggctggtgttgaactcctgacctcaggtgatccactcgccttggcctcccaaagtgctaggattacgggcgtgagccctcattcctggcctaacatttttaaagtaaaattgaaagtattgctagtatttcctttacagttatggtagaatgaagtgttttggttaattaactaaaaattaattaatagttgccaaattcgtgattgcttccaaaaattaaagtgggtcaaaaactcatataagcacggttttctccttgatttacaggggatttcaggatctttaaggttatcattaactttatgaatagcacacttaaatagttgtttaggttctggataggcataatttattgggtgactttgtttttttaaaccttattttgtcctaaggttgctacagctgtaaatactagacaacgctactacccaatggctggatatattaaggaagactccataatggaaaaactgcagcctaagacgtatgttccatgtgtacttatttgagtatttaaagtcaatgtgttactgaaatagttttagaattattgataaaatgtcatccttaagtctgcatttctaacctactgtttatggaatgctctttaagttcatacttcatcttagctgtcagtggaatggagacttcagctctttaaagaagcagcgtttgtttgtccttatttaaagaaagaaaaaatgttaaggattaccacatcaagaaaggctgagagtacactggctaaagttactcgtgctggatggaaggaagttatagagaaaaaaagtaacttagttctctcttgattctttttaaaaatttttaaaattctaagttt

SEQ ID NO: 72489 - DNA, 1020 bp, Homo sapiens
ttagctgggtgtggtgctgtggtcgtgcacacctgtaattccagttactcgcaaggctgaggcatgagaatctcttaaacctgggaggcagaagttgcagtgagcagagatagcatcactgcactccagcctgtgcaacagtgagactctgtctcaaaaaaaaaataaaaagaaaaaaaaatcattaatgggctggggaaggggagaaagcacttaatcttgctgacttttccttcaagtgtaaatcttaatggagtcaaattataatctttttttccttaagaactgtttataatttttatatgtatacatgtattgccatgataaattgttcaaggtagttttaagttgaaaaggtaattacagggcattatcccatttaaaaaaatatctttatgaaaaaaatctggaatggtctaactaaagctctaaaatatgaatggtttttatctccaggttagcaggattgaatgttatttttgttgcttgttttcacttttctgtagtgagtctatgttgcttttgtaaccaaaacggtagcctgaattttttgcaactataatatatatatgtctaggcatctgttttttagttttatatttgtatgtgatttccctcccttcttaggacactaatactgcagaagaaattgatgaagcattgaatacagcacaccatagtttcgaacagttaagcattgctggaaaagtaagcactttgcaggattaaattctatcatgaagtgaagcatgtcctctttaagtgtgtacatttggagatgttaccactgaggttagagcttagcactgagttattaagcatgataatctaaaaaagaatggaaaacttttcccatagcctgccaagattggtcttgtaacattgttgtgctaggaacttaataaaattccagctttaataaggaaccatgacttctccttgctatgagctgaattttgtctcagaagcattgcagattatcttttcaacatttgctgattgtttggctgtatccccctt

SEQ ID NO: 72490 - DNA, 1107 bp, Homo sapiens
gggaggccaaggcaggaggatcacttgaggctaggagtttgagaccagccggggcaacataatgagactttgttcctccccaccaccaaaaaaaaaattagttggacatggggctacgtgcctgtggtcattgctactcaggaggccaaggcaggaggatcccttgagcccaggagttcaaggttacagtgagctatgctcagcctactgcactccagcctgggtaaccaagtgagacctggtctcagtaaaacaaacaaaaagatatggtcttgctcacaaatagtaaaacttaatgttgaaccttgtgacttattctatttatattattatctctttacctcttgtgttattttgaagagtctagaaagtaccttttactttcaaaattctacaacttctacaaaataaaaattcccaaattaagtttttgtcttgttttttttttttccaggcacttgaacacatgcagaagcaaacgatagaggaaagagaaagagttatagaagttgtggagaaacagtttgaccaacttttggctttttttgattccaggttagtaacttaaaaatatggactcaatgaaactgaagtttctaacactaacttgtcattgtattcctttgtttagaatggtaatgggtaacttttaaacaagtttgtaatgggtaactttcaaacaagtttggaagttggtagtccctacagactgatctttagaactgcaaaatgaaaaataatgtgtaagcttttaaaaattttgcctatttaccttctggtgctgaagctaatggtggtttgtttgagacagggtcttgctctgttgcccaggctggggtgcaatggtgtgataatagctcactgcagcctcaaactcctgggcttaagtgatcctgccacctcagccttcaaagtagctggaactacaagcccacaccactacatccagctaattttgtgttttttttttgttgttgttgttttgttttccgagacaagggtctcactacattgtccatgcttttcccaaactcctggcctcaagaaatcatcctgcctcagcctcctaaagtgctgggattacaggtgtacataacggtgcccagc

SEQ ID NO: 72491 - DNA, 1025 bp, Homo sapiens
agtggttgtgtgtgccctgagccttgagatcagcctgaggtcaggcttaagatcttctcagatgttttctgagcatgcatcttgcctgggcctcagtgtggctttttcaattcccctgtatatataactgcttttatatgccttaatgtcctaaagagtctgagctcagattctcctccaggccttagatggtctattgtatgtctctacttataatctcctgccttccacaaaatttgcttttctctaattatgtatacatagcttttaactataatacatttcagttcaatttaatgcctcatttaccatgttatatgttaattttatcaacaagtgaaagtaccctttcagatacagttcagttactgtttgcctcatttaaccatattatgtaaaattcatcaactactgaacttactcttcaagatactatagatcgactttttctataaatatttatgaaatactgcaaaataactttggaatcttaaatgaaggaaaaagaacctgtgtgaagaatttgcaagaactactgatgattatctatcaaatttaataaaggctaaaagctacattgaagagaaaaaaaataatttgaatgcagctatgaacatagcaagagcattacaattatcgccttctctaagaacatactgtgacctgaatcaggtaatttaatagttcacaatgtgagttatttctgtggtagcttattttacatgctttggaatatatttaagacaagaatttgtttttcagattatcctaacctatattattatttagaattctaaattgatgacaatataggttaggatagtctaagttataataaaataatgtatgaaatctaagacaaacattgtaaaatttatatgaccttttgttttttttgaccagttagggaaatggtgcaattaagtctttgtaacacttgatctgagagcaagtaaggtgacattgaggtgaaagtttaggtttctaggacacccgattaaaaaaatgaggacaaataagggtag

SEQ ID NO: 72492 - DNA, 1045 bp, Homo sapiens
tgtatgtcctctgttggaagaggcagataaacatgcatcattgctaaatccagttggctttgttgatcgttatttccacagtggcttcttaaacactgatctgtgaagaagctaaatccatcatggaataactaaaatataaacttcatgaaacccaatcttatctcattgtaaaatttctatacttgtagatttgatagcctaaaaactgtctggatatgtggagaaaatagaaaaatatggagtagaatggataaataactggcagtgggtcagtggctattgaataatcatgcccaaaagattcagattaatgtccatggtgggagtttctagtgacttattcatggttgtaccatatacctctgtattcatagcttatatctctgtatttttaaacagatgttatccccaagaaaatgaaattagacagaatgttcaaaagaaatataataacaaaaaggaactttcttgttacgatacatacccaccgctagaaaagaaaaaggttgacatgtctgtcctaaccagtgaagcaccaccacctcctttgcaacctgagacaaatgatgtacatttagaagcaaaaaacttccagccacagaaagacgttgcaacagcatcccctaaaaccattgctgtgttacctcagatgggatctagccctgatgtgataattgaagaaattattgaagacaacgtggaaagtaagttaaaatgtaaaagcagaggggaaagatcttgtatctgtaattagacacagttggtacctttttcgtccatgcatttaacagaaatataattgctgttataatcttattcctcattatgagttaaaacctgttcattccatgcccctactctcacattttccagagttaggataatttttatttttaatgcagtaatatagctaacctctgaggtataaattaatatctggtttaattagggtattttgagattttttagtgttctcacatataagccttgtataaaagatataaatagagagatgtgatttgtggacatagttttattactt

SEQ ID NO: 72493 - DNA, 1402 bp, Homo sapiens
acagtgtaattatggtaattaatttgcctgtctctcttcctttcttgagcttcttgatggcaagacagtctcattcatctttgttcttattgctcataagctggttgtcattaagtgactgctaacttagtattctttaggtgtttatctccctatttagcttgtttctgtataacaaactatcataatatgctgtattatatctttcttatagcacttgaacacagtgctatatcatcattaaataaacgaattaagactttttcgtggtagaactaacgtgtctgtaaacttatgaagtggcttttattgataaatgtttataacgatttgtttccctcattatttaggtgcaagaatatttgtcagcagtattaaaaatggaatgtggtgtcgaggaactatcacagaattaattccaatagagggtagaaataccagaaaaccttgtagtccaaccagattatttgtccatgaagttgcactaatacaaatattcatggtagattttggaaattctgaagtcctgattgtcactgggtatgatattttataatatgtatccttggcctgcttagaaacattttggagggaggtggagttaaagaataaaggaaattagaggtagagaggagtaatttgtcattcttaacttccaagacatacgttttattattttgctctactgttgtcttgataagtaaaactttatcatttaccagtattactagatggagagcttagaaaaggaactccaaacttaagtactcttcttatgtcactttaaagcagggaataatacacaaactaattcttttaaatgttacagttagcaacagatgattgagttaaatttttaatcagacttctgtaatttcattaatgtttttcaaagtgtcatactgtctaactcactgtaggtattttaaatggttttctctgtcttctaggaaaataatacaaactgatatgtttctgtagtaaggaccagtattaaccatagcatgatcacttaatggttatagctttatgaataagtagatttatatggggggaagtgtcattatctcctttaagttcaaactgcatgagtatgtgaaagtgcaaatgtagctgagatttctttctgtggaggaaaactgtctctgcttataaaagctaaactaagtctatatagtaagaaagtattaatttggactataactttctaaaaggtgtaacttaagaaaaattatacttagaaatgcataccttctgtgggggaaaacaaatttaagtttgaagcattattttcaataaatattacttgaatttctcctagagttgttgatacccatgtgagaccagaacactctgctaagcaacatattgcactaaatgatttatgtctggttctaaggaa

SEQ ID NO: 72494 - DNA, 1067 bp, Homo sapiens
ccatgatagcaccactgcactccagcctgggtgacagggtgagaccctgcttacgcttttcattatgcttttaattaggtttaagtcacaatcactaagaagtcactttgaaaaaaatactactttacactatcatccacctattttgcctaaagaaatgacagatgtttcagtaacggtttgtcatataaatagtcctggagatttctatcttcagttggtaagtatataatgtgtttttgaaatgaagtttttaaaaaaattttaattagacatgtataacaagaatgagtatctaccgtcaattttagtcagagcaaacgtaccactgttaaccttctatacgtttaaatttcttagtagttgcaacttcaaacaagtttatatgatttatcacaaattgaaagaacaatgaaggataattaatgtataaatgtttcttgctaccttctgaaatctggagactaggaaagcatatagagttagcaaatagaaatataatgataaaataaatttttttctaacctgtacctctgaaaatttaccgattattattaggtgttttctgaatttgaacaccaaaatagacacagattaaaggcatttcgtattgaactttggatgtgtgactgatgtgtttagatagtaacaataatagttcatccttattgatttctgggtgctttatatgatttaactcatcataaggcccttaagactttaagggaattaactcattaatctttgcaacaatcctgtgagaaagacactgttgtctccatttgaatgtggagaccctaaccacagagatgaagcatcttgcccaagatcacacagctctgaaagggtagaaccaggattgaccaagcttcagaacttgtcgtctcaagcactgcatcacactgtagtggctcctcaaatgagttgtggaagctccttatctaagttaggatttgcgtttatttcttttgttgattttttacagcgtcttttatggtaaaatatacataatataattttatagtttttaataattgttcagtgtaccattcagtgccattaaggcc

SEQ ID NO: 72495 - DNA, 1022 bp, Homo sapiens
cgaatcctccaaaaacatctcatgaagttagattatattggtatacccgttttacagatgaagtaatgaggcttagagagaaaaagtaacttgctcagggtaatatcttagagatattaattagcttgctttaggtcacatagaattttagtgacggagctagtgttcaaaactggtcagtctgactcaaagcctgattcttaacttttaagtcataccacctgccatataattttgttatcctgattttggctatcctttgaatatttaaagcatactagtttttcattcttataagtctgcactatggatgatttcggggttcacatatttgaaatattttttacattttaaaaagtattaagtttgtatattgaagctaaaagtattctaatctagttggccataaaccaatctaaatttttctagataattctgtttccaagtttgtaatttctaatttcataatttttcaaggattgcctggacatcaggaagttgaagttaaatatgtggactttggtaatactgcaaaaataacaatcaaagacgtgcgtaaaataaaggatgagtttctgaatgccccagagaaggtaatttatttattatgaattctagggctagaatatcagcacaaatatggaagtatttttagaagctattgtcatcatagaaatgttagtgtccctttttgtctagttgctgatacagggactatagataaatgttgctgtggttactattgaggaaataatatgtatatcatggcaaataagcgtattaaacattaatcaggtatagttgtgtcttaagtacttgttggcagcttttaatatatcattttgagatcatatattgtggtaagagtcacgttcatgatatatcaagttaaaaatgcttatctcagaagtacttctactgtgatcatatttatacttaagtatatatgtgtgtacaatagagaaacctgggagaatatgtaaaaaactgaaccttgtttatctctggggaggagtagtatt

SEQ ID NO: 72496 - DNA, 1079 bp, Homo sapiens
tgtatgaaattcaaacataaagattagttttgtacacacttaataaaacttgaattctaaagtaggtagaaattaaatttttttcttaatggtggaattttgtctgacacaggcaattaaatgtaagttggcctatattgaaccatataaaaggacaatgcagtggtccaaagaagctaaagaaaaatttgaagaaaaggctcaagataaatttatgacatgttcagttatcagtaagttccatttttacttgttatgtaatcacatataattttaaataataatatgaataacatttgtcaaattttagaataaattcagtgtgccatcagtagtggtggtgagagataagatttgttgagaattaggtacaatggaattatatcttttatggactctaaagtcatcaggacaaaaatcaccataaaagatcaagtcacccttgacatggccccttgaaagccctaaagccaggaattagcttcttttatttgtttgcatttttgctagggctctgtccttgtccttaacatagtggatgctaacgtttaatttccaggaaagtgaggggaggtgggacatgattggtaaacagcttttccttgctgttttttgtctcactggcttaaacaaattcaactgtgggttctcagcataatttgaaaaaagttattccttttttagagcaattgggaccaaaatagagtctgaccactagcccacgattttgtaacataacaagttctgaaaatcaaaagttcagcagcaaaattggttctgaattggcatgaggctgtatatagtttttatctcgtttatagtgaatattcatattttacttcaagataatgtttgtgggctgctgccccagactctgctggggtattagatacatatacacgataggtgctgagtagcttttctcaattagacgaattttgaattctgaaacatgcctggccccaagggttttagatagggggattgggaatctggtttggtttttttgttttttgagacagggtttcattctgtcacccaagctggagtacaatggtgtgaacaatggctcactgcag

SEQ ID NO: 72497 - DNA, 2232 bp, Homo sapiens
ctctactaaaaatacaaaaaattagtggggcatggtggcaggtgcctataatcccagctacttgggaggctgaggcaggagaattgcttgaacctgggaggcgcaagctgcagtgagccaagatcacatcactgcacttcagcctgggtgacagagcgagactccatttaaaaaaaaaaaattttttttggattgaatcttctcctttctttttaaagtgagggttattgaagtataacttatatacagtaaaaagtcacctgttttaggtccacagttaaatgaattttgacaaaatagtcatataagtatcatcacagtcaagatacagacctgagcaaatgcaaacaaatattttgcatacagttcttttcattaacttttgttgtttttcagatacatcctcaaagataattctcaaaagcatattgaagtttgggatccttctccagaagaaattatttcaaatgaagtacacaacttaaatcctgtgtctgcaaaatctctacctaatgagaattttcagtcactttataataaggaattgcctgtgcatatctgtaatgtaatatctcctgagaagatttatgttcagtggttgttaactgaaaacttacttaataggtataatatatatatataatatataaggaaaatattgcatatgattttatcctttattctgtttcaaagatctagaagtcataaatgtagattttactagcaaaattattttaactaagtagtctcagctagttagaagtatgaaaataggaaatctgttggctgttttcactgcattagaatttattcattctacaaatacctattgagcacctactatatgataaccagtattataagtgttagggataccctggtataaaacatagacaaatctttgttaccatgtagcttaaactctagtagagggagagagagtgaacatataaaatttttagtgtggtagatggtgataagggaaatagaaaaaactaaagcatttagggaggaaggcacttttaggatggtcaaagaagacctcagagacagtgacttttgaaacaggccccaaagaaggaaggagggaggtaagccatataagtgtctgagggaagtttatctcaggcagaaggaagagctagttcaaaaacctgaggaagaaatacacttgtacattcaaggaagaacaaggtgcccagcttggctggagcggaatgagcaagcggagattgtaggaaacatgtagccagagaattatataagaaaaggtttggaaagttaaatattttttatctctatagtttagaagaaaagatgatagctgcttatgaaaactcaaaatgggaacctgttaaatgggaaaatgatatgcactgtgctgttaagatccaagataaaaatcagtggcgaagaggccagatcatcagaatggttacagacacattggtagaggtaaattacagagttaaaagtgtaattgtgaaggtgaatgaatgcattttgtatttttttccctggagttaaaacagttttcattgagtttttcagtttgccaaaaaaatatttcgaaatgttgtttgtctgtagacttaaagttattattttcttaggtcttgctgtatgatgtgggtgttgaactagtagtgaatgttgactgtttaagaaaacttgaagaaaatctaaagacaatgggaagactctctttggaatgttctctggttgacataaggtagtttttagctgagtaattttctcattattttaaatatttttaaatgcgttctcgtcagttttaattttgctaagatattctgaaattttcctaaaatctagttaattttggacttcaagagggaaagagagaagtttggagcacgtaaatttagtggcattaagaaatagagataggtgagtatgaaagtgcctagatagaattcaaaccgttgaatattaaaaattttactttgaggaacaacaaacacagaaataaattgtgtaagtttagaattgcatagaaagctaaaaatatgtaaattaccaaaaagtgaatttgtggaggattctgggaaaatgacagaacagttttagtctactggaatcccactataaaaacagcaacttggatagtaaaactaaagactacacagccaatatctacaacaaaatcagatgacaagttacttctgtgagccctcaaatattagcaggtggggtacaccatgaaccagg

SEQ ID NO: 72498 - DNA, 1005 bp, Homo sapiens
aagaacttccaaagatgggcagtggaatcatcattacaaagagactttttttctttctattaaatatttctggaatggcttctatgtgacagggcactatactagtcatcagggaatatgatgatgcacataacacatcatcattcctgttctcttggagtttacagtctagttgacatacatgaaatgtatataatgacttaaaaagtatttaaaatatacctgttttttacagctcctcaatgtagctgcagaaaagatacacataaataagttaatatgtaatatgggccctcagtaaaatagagggatgaaaaaaagataggaaaatgagggaaaaaattgtaaaaataatacgaatccatgtttaaattgttttttttactacatatagttggttcaaactatgagtgtatctgtgtgtaaatatagtgttttttgtatatttcaatattgtatgctatttttataaaacaagttgccactgttttctgttgtagaccagctggtgggagtgacaagtggacagcaacagcttgtgactgtctttcattgtacctgactggagctgtagcaactataatcttacaggtggatagtgaggtaacaagttacaagagatatgtgctgatgatctcattaatgtttccatcgattccatttattttctttcttgtagagaaaatagcagccaactatttggattttgttacaaattttgtcggttttatttcaaagtataagaggcatatatcttttcagaccacttcaaaaatattctttgctttcttttttctaatttaaatgttttattacattgagtagaattttgtaattcattttattactatttatgtgctttctccagttttatacctttttccatatgaagcagaatatatgttttgtagttcttttgctttttgtaggagaaaaaaggcacaccttggaaaatatattttgattctctaatttacgagaatgcaaaagaataaagaaacttgt

SEQ ID NO: 72499 - DNA, 1044 bp, Homo sapiens
ccaggctggagtgcagtggcgcgatctcggctcaccgcaatctccgactcccaggttcaagagcttctcctgtctcagcctcccgagtagctgggactacaggcatgcgccaccacgcctggctaattttgtattttcagtaaagacggggtttccccatgttggtcaggctggtctcaaactcccgacctcaagtgatccgcccacttctgcctctcaaagtgctgggattacaggcgtgagccactgcactcggcccagtgctatttttggatgtgtttagatatcaaaataacttgactcagctgggaatatttcttgcttagagaaatgtagaagaactgcctgtgaaatgcacattgtttatatgaagatttcattttggtgtttcatatttactctgctcttaaatcactacaggaaaacaacacaacatggccattacctgtgaaaattttctgcagagatgaaaaaggagagcgtgttgatgtttctaaatatttgattaaaaagggtttggctttgagagaaaggaggtatagacttttttaaaaaattttgacatcagtttgtgatggatgcctcagttgcgtgtgcaaatcttatgtgtgctttcaagtctgaattgcatcttgtttgctcttaaagatttataagctgaccctgaggagccagctcagaaatagattccttcagaattgctcatttcatttttcaggcatgtcagttcttgcacacttaagcctgtttactgacatacttgcttttgtaatttcccctctcctttgacatttacactgtaaaccaaagaaaaagagaacaatgtagtggataccagatctgagccctttggtatcctttacttagacataaatgtttaggctttattttagaaattctggtaggtatatacctactagatgtatttatatgaaatgtaaatgtatttatatgaaacaggatgagtagcaaataaataattgaacagtatttacgtttaaagatcctttcgggttctatgtttggagtttaagcacctttggt

SEQ ID NO: 72500 - DNA, 1215 bp, Homo sapiens
ctgcagcacttgatgatactgacaggtactgttattcccagaagatgctgtttcacccagaataggtggtggtattatggaaggataaactgaggcttattggaggtaagggaactacccaagatcacacaactaaagcagtaagatgggaatggtaactgactccagagcttaccttctatggtatcagttatggatatatatatatatatatgtttactgtggaactaatgggccaattagcaataaaagcaaaattgaaattttaatttatattgccatcatcatactgtatctaagcaacaagtagtatataacctgtgtcctattttacttagggctgtcaaactgaccctattttgaattggtagtactttcatattaagctagctggtatgtgtttagagctccttatgatgtttgtactctcaaaatataatcaaagatcataatattgtttatatgctattactagtatgttttaaaacacacacagatttttacaaaagttctgtttgggggactggtttttaattatactactgaagaaatgaagttattaaattgacaaatgatagggaattttccttaatgctttctatctttaatactttttttcagaatttgagctaataaaaatgacaaatgaaattcaaagtaatttaaaatgccttggtcttttggagccttatttctggaaaaaaggagaagcatgtgcagtaagaggatccgatactctgtggtatcgtggcaaggtgatggaggttgtaggtggcgctgtcagagtgagtctgatattcttttgtgacaattctaaagctaaatgctatagcattaaatagtcttgtgcatttgaacacgagaaagttggattaaaacatcttttgatgaaaattgtgtaggaagatcagttatattgtacttttatttgtaataatttttcgttttatttgcaaatatatttagtaacctgaataagcaaaaaatagggagggatttgatcattggttaatggatagacctcttagttgtaattggtagccctgtttccacacatagtgttaagtaaaacaatatgttttccagtatgttaaatatctcgctagcaaatttgtttatggccctgttagtttttcaggataacgactaatttacctttccagaataatgaggtaactaacactcaggtttcagtcaaaatcttcaaaaatagct

SEQ ID NO: 72501 - DNA, 1110 bp, Homo sapiens
cactttaaacatgcatctgggaagacgtcgctgcaaaggtaacatttgagtcaacaccttaaaatggttagaggacagaccacacgggtgcagggagatgagtgctgaggcaggagcagggctaggagggaggggactgcattggcagaagagggaatggtaagaagagataggacaagatctgctgggaggcagcaacagtaattcagtgaggagcagtaaaacagtgaggagcagtgagtttggacaaaggtgggatcagtggaaatgaagagaattgctgtaggtcagcttatcagttagggacacattcagcacccaataactgtaagtgaactttattcagagttttaaagttaccatgattcctgcttttagactgtttcgagtcccaccaattttggatttttaaatgaaactttatttcttcacctctgaacgtaaccttttctttctctttgtacgtagtgtaatttattagtatcatctaaaggtgatgtatttgggaattggaattatatataactagttattttgtggtaaataactagaaaactctatgaacttgaaagtgtatattacataaaccaaagtagtagaattactcccttatagcgcgtcaaaataccaggaagaaaattctatgaaatgagtcactagccaaactgtctagttaatactatgattgtcagaagctaaatttgatatttgctgactataaaaatgtcatcaagtggagtttatttttatgattatctttattgaactttaaataggagttacctaaaaatccatgggagaaattgtctattcacctctattttgatggaatgtcactttcttattttatggcatactataaatactgtacttctgaacatactgaggagatgttgaaagaagtaagtgcactatttttctataaaaatctaaagtgtagaaaagtctagttaaaatgtcacattttgtcttacactgtgtcttaaatatgattctacatatctgatctattaagagagtctagaggacttacacatttttgctgagaaagatgaataggctgtgtcatgcattataaatgtcctgtaaaagactttaattacattaaga

SEQ ID NO: 72502 - DNA, 1094 bp, Homo sapiens
gccgcggcctccaaaagtgctgggattacaggtgtgagccaccgcgcccggcctaatttttttgatttttagtagagatgaggtctaactgtgttgctcaggctggtcttgaactcatgaactcaagcgatcctcccacctcagccttccaaagtgctgggattataggcatgagcctccatgcccagcctaatcatgttctcttgatcacaagataagtgtggtaggatgtgggaaggaataggaggtgaatatcaggaggtgtaggggtctctgggagcatcgctggaggctgtctgctacagtaattttgtccacatacgtgaattcttgacattccagaatctgaaagttttcctttcattctccccacttaggtgtatatttgccttgattctatagaaacttctaaccagtctaaccagcatagtgacacagatgatagtggagtcagcggggaatcagaatccgagagccttgatgaagcactgcagagggttaataagaaggtagaggcgcttcctcctctgacggattttagaacaggtatacttactatatttgaatgaaacaggatacttaataaaacttggattttgtttcaatgggctgatgaccttgggctatctctaatgctgatattttcctcatattcactttacatgcatgatttcctgtaatcctcaagatacccagaagatgacttctttctcattttctagataaggaaggtgaactaagagacgctaagtaaactcccttggagaacactttcacgttccacaaataagacagcgttggaaaattgcataaagattattttctaagtttgaggttatcagtagctgaaattgcaagagttgtcattcagaccttaatggtcatcatttaaattacaagccacctacaattataatcttgaggtggaggctcaaagtatgacctgttctgtcaagacaggtcagatttctactcttttatcttttcagtccattcttcccatctttattaaatatgtgtgattctcctctgaggaaaatgtatctagttattgcggtatgtaatgcatagagatgtatttattcttgatattt

SEQ ID NO: 72503 - DNA, 1004 bp, Homo sapiens
caccctactctgctctcaaatattagaacttattccttccaactatatgtttgtacctatcaaccaacctctcttcatccccccaccccaaacacatgtatatttgcctttcatggcctcatgtaactgaaccattaatctccttgttatcttcatgagatccacttctttagctctcatatgagtgagaacatgcgatatttgtctttctgtgcttgtcttatcttagttaatataatgatccatccatgttgctgcaaataacaggattccattcttttttatggccaaatagtattccattgtgtatataatcaccacattttctttatccattcatctgttgatggacacctgggttgattccgtatcttggctattgtgaatagtgctgcaacaaacatggggtacaagtagccctttgatatgctgatttcctttggattaaaaaaatttaatgaaagacaatatgattttttccctttttctgtctttccagaaatgccttgccttgcagaatatgatgatggcttatggtatagagcgaagattgttgccattaaagaatttaatcctttatctatcttagtacaatttgttgattatggatcaactgcaaagctgacattaaacaggttaaaaataaatgtcggggtgttgaattagatttctttttttttaaatagttttcttattgagaatatttttgcctcttttaaaagaaaagggttattctaaggctgtttataaattaggaatttttttcgtgttaaagtatacataaaatttaccattgtagctttttttttttttttagatgagtcttgctctgttgcccaggctggagtgcagtggcgcaatcttggctcactgcaacctccgcctcccaggttcaagtgattctcctgcctcagcctccctagtagttggaattacaggtgcccgccaccatcccggctaattttttttgtatttttagtagagatggggtttcgccatgttgg

SEQ ID NO: 72504 - DNA, 1905 bp, Homo sapiens
aagacatccttaactaatggataaaggacagcagttcacaggatatgaactaaggaaatgtgtgatcatactaataaaattttcaattaaatattaaatctaactcttgacaattttattctaataggcaatccacctcgaagatccaagtctgcacctcctcgtgatttaggcaatttggataagggacaagtaaatctctgtttttatatattcttcaaacatacattacttaggcttgaaatcaatttgttaatagacttaacgtttctaaaccacgtgtaaaaaagagtttttacttaacattataaatgttatattttgtaaacactagtcctagaaccctatatcagaatctggctttggaagtaagagtaggttttagctgcttgaaatgtgttgtgcttacaggctgcctctcccagggagccacttgaaccactgaacttcccagatcctgaatataaagaggaggaggaagaccaagacatacagggagaaatcagtcatcctgatggaaaggttaaaaaatgtttttgaaataatgaattctataaaaaataaacatgggttaaaatagttgaaacacatagaatctaaaataagggctctttggacaagatgcctttagttgccatttctcgttcagagattcagcaaaaggcggcatacaatctctgtatgatctttgttcttactccaaagcctttgtaatccttggcacttcttaaaagcttctgttcattctaggtcttcctttcttgcagcctttcttatactgatcctgagtcagggacctctctcctcatctccagctagcacagttttattcttatgcttaggaaagtttcttagtgggaaaactgcctgggggttccagctaaagggaatgaggaagaaagggatatatacaggttagaggtgatgagggaattttttcctcaggtttatggaaaatttacttttcgaatacctaatctggtccatttctattgaaattatagggttggagtgctatccttgaggaatgagagaaggacaaagaacaacaggcaaagcagtagttagactttcctgtacaaagtctactttagggtaacaaattgttgataagggaaggttttcttttttaggtaaattccagctaatacatggaaaaggaatgagaaaattagaaaatcacgagtttgctactcctcacgaaataaaggatcttttgagggaatgttttacattttattacaaaaaatttcaaagtaggcagttgggaggagaattagccatactttcgtcaggagaaaatcttaggtgataatcttgtgttggttttttaggtggaaaaggtttataagaatgggtgccgtgttatactgtttcccaatggaactcgaaaggaagtgagtgcagatgggaagaccatcactgtcactttctttaatggtgacgtgaagcaggtcatgccagaccaaagagtggtatgtttccagaggtgttctcctccatagtttaaccatctctggagaaaaggcagactgactgtgtgtctttacagatctactactatgcagctgcccagaccactcacacgacatacccggagggactggaagtcttacatttctcaagtggacaaataggtacaaacttgctccaccctctcattaaattcttcccttccttcaaaaaatatttactgtaacaactttttaaacagaaaaacattacccagatggaagaaaagaaatcacgtttcctgaccagactgttaaaaacttatttcctgatggacaagaagaaagcattttcccagatggtacaattgtcagagtacaacggtatggcaacattatgttcacagaaaaaccactcagtgtgacacctgttcatctgtgctcagaaggtgcc

SEQ ID NO: 72505 - DNA, 1130 bp, Homo sapiens
atttcccagcctctttgttctttagcactccccaggatgctgcaagtctttcgttagtgtccagagttccgaagtggttgattctgacaggtgctgctagttcaatagctgctttggtggagggactgattgttggagcttcctactccaccatcttccttaacatctcttccgtatttcttttctaaaacctgaaaaatatgaattctaaagcacatctggcccctaagttccagataaaggtttatagacagctattaatccacttaaaaaggaaattcggttactatactataatctgcagtatgcttaaaaatcaaattctgaaaatttgttactttttaatggaaacatctttgtttttcagctgatacatactgtaaatgtatgcttatcatagtagttatgggtaaaatgtggaacttattccaatccgttctccacccaagatcacttttaaaacgtctctgcttcattatttcaaaacggacatctttttcttttaaagaacatttaagtcataagataatggctgggtttttgtttttttgttgttgttttttgtttttttttagcattttccctatttcggttttgctttgttctaagcaaaattcagtcctcgaatttagacattgtgttatccttcccaattgacagatgaggaaactgatgcactgagaagcaagttttttaagtttacctccttagtcagtgacagagagcctcagtgccagcctaggcagtgtggttcagtagagccctgggctctactgtatgggctctttaatctgctttttattttatttttatttttttgagacagggtctggctttatcacccagactggagtacaatggtacaatcttggctcactgcaacctctgcctcctgggctcaaaccatcctccacctcagcctcctgcgtagcggggactacaggcacgcaccaccacgcccagctaatttttgtatttttggtagatacggggttttgccatgttccccaggctggtcttgaactcctgggctcaagtgatccccctgccttggcctcccaaagttctgggcttacaggcatgagctacgatgtccagccttgcttttcatttcaacaacataatagaca

SEQ ID NO: 72506 - DNA, 1029 bp, Homo sapiens
ttctacgtttcctttcttccccagacctggttcaagtaccccttcctagaggtaccagtattaccatttcgtttgtgtattctaaagagtccgtgcatataaaagcatatgtgtcagtttgtatataattacctttctatacaaatgaaaagactctttttgtatactgtcctgcaccttgcttatgataaattttgaagattgttctaacgcatgtacacacctacctcattccatttaacggatgtgtagtatttctgttgatgtaacggactttttaaactcaccctgaaagattcctttccattatattatattataaactagcagagcataggtgctttaaaatagaaattaaaatagaaattataacgttaattttcaaaaattctgattttaaaagtaatttttttgtacaaagtttggaagcttaaaaagcatagaagcaaaaatatttacaacttaactacccaaaagtaactgctatgccattttgggatatttcattccagtcattttttctatgtagttttaatatgacagagttgtataacttagctcatttctttagccttgtggatcacatttagtttctaaaaaagtactaattgataaaaatgcttgaaggacagaagcactggctattttacattttaaatagcaaatttgataaagggaaaacaatttgcatttatttgattaatagtaggggtaaactttgattttggtgttgattagctcttcagatctcttgtggattacttattcttaagctatttatatatattcgtctttgaaaaattgatttgaatgatttctttttatgtatcatgttgattccttgtcaggtcgatactcttttgaggtagattaattcttccataaattcccactgatttcctcaggaaagttaggtttaattttttttccttttcatgtttgaagcattgtttctaatgcattttaatagcacagatgtttgccatattcttggctcttagtgttactagctagctagtgtttttgctg

SEQ ID NO: 72507 - DNA, 1020 bp, Homo sapiens
tgtccgccgccctgcgccggagatggacggcggtgggcgggcaggactctgctcggacctcggggttggctcggcggggcgaggagggagcggggcgccgggacgcgctcaggcccacgggcgcgctgaggcccacggcagttcagtggcttcgttcattcgcgctgctttgttcttcgcagagctggggaagccggcctctctggggtgtctgtctctctgacctggctgtggcggaacttgagttcctgtgggcagcgcggcagccgcagtccgctggagcagggtggtgaagtagcgttgctggctgtcctaagggccggtcttgccccagctttgtcaagggcttctctcttgaagcttcgtgtggattcatggctttcaagaacgtgttgtattttaggggactgctaaatcacttcccagaccaactagttacttctcacggtctaagagtggctttgaatttgctgtttgtatccactctcctccctcaccgtgcagagaatttatctttttttcaatactgctttaaagaatgtttacatagcactttctggagatttcaaggctgtcagtttgttacattttttaaaagttttattgaggtataattgctatacaataaaaatggcacatgtttaaatgcattccatttgatgagtttgacatacacgtgcacccgtgtccttcagattttgatatctgtaaagtctgagtccacatactaatcctatctcggcatatatattatcaatgctccctttaccaagacctcagtatcaataataagtagcaggttctggtgacgctttttttatacttcatgctgacattaaatatatttttagaatcgcggtcatgaaattgaaggtatagaaggtgtgtttggtggggagttggaggaggagatgcaaaagtctggctgctgcatcccaagactgcttgcacttgtcagtctagtagggaatttttctagttttccatattatgaaatgaccttgtagtttgtctcccttc

SEQ ID NO: 72508 - DNA, 1506 bp, Homo sapiens
tgtatgtagctttagctcagcgcaaagaagagcgccaggcttacctcactaacgagtatatgcagagaatggcaagtgtacgagctgtgcccaaccagcgagcacctccttcaggttacttcatgacagctgtcccacagactcagaaccatgctgcatactatcctcctagccaaattgctcgactaagaccaagtcctcgctggactgctcagggtgccagacctcatccattccaaaataagcccagtgctatccgcccaggtgctcctagagtaccatttagtactatgagaccagcttcttcacaggttccacgagtcatgtcaacgcagcgtgttgctaacacatcaacacagacagtgggtccacgtcctgcagctgctgctgctgctgcagctacccctgctgtgcgcacggttccacggtataaatatgctgcgggagttcgcaatcctcagcaacatcgtaatgcacagccacaagttacaatgcaacagcttgctgttcatgtacaaggtcaggaaactttgactgcctccaggttggcatctgcccctcctcaaaagcaaaagcaaatgttaggtgaacggctctttcctcttattcaagccatgcaccctactcttgctgggaaaatcactggcatgttgttggagattgataattcagaacttctttatatgctcgagtctccagagtcactccgttctaaggttgatgaagctgtagctgtactacaagcccaccaagctaaagaggctacccagaaagcagttaacagtgctaccggtgttccaactgtttaaaattgatcagagaccacgaaaagaaatttgtgcttcaccgaagaaaaatatctaaacatcgagaaactatgggaaaaaaaattgcaaaatctaaaataaaaaatgcaaaatctaaaataaaaaatggaaaggaaactttgaaccttatgtaccgagcaaatgcaaggtctagcaaatataatgctagtcctagattacttattgatttaaaaacaaaaaaaagattacttaattttgatttaaaaacaaaaaatcgtaaaatacaaaaaccagttaatgttttgtagaccctgggaaaagaattttcagcaaagtacaaaaatttaaagcattcctttaattttttaattctttactgtggaatagctcaaaatgtccattctgttttaagtaacagaattgataactgagcaaggaaacatggtttggattataaaattcttgctttaataaaaatttcttaaacagtgaaaaaaagaaaaatcatcaattttactaatagtctttctttacattttctattattctatctcccactatatttcaaatatgaaaatcactttttcaccaaaattttaggtctttacataatagtgtttatttttaatattcataaatgaaaatatgcaatgacaaaatagtaattataaattcagtaacatttgttcaaaattgtaagacaattattaatttatac

SEQ ID NO: 72509 - DNA, 1034 bp, Homo sapiens
gaggaatcccttaaaatatatggttgtgagagaaaatgttatacctgtgttgtgttcaagaaacatgactttattacctaattatgaatgaaaaaggagaatagagataatacagaattctgagacaaggttagactgtgaatacaagaaaaaactaaaatttaaatctgcttcggaagccatcgcctgatttataaaaatgaatattaccattactactttgcatctataggaaagatctctgtgtttttctcattatattaaggttgaaggagaagacttattccctgtggccatttcttttggaagaccaaaagaagtacttaaatcctctctacagttccgaatctcacagatttacagttttggagccaaatacagtatctttcaattttaagtaagttgacatcattggagtatttatacttgaattttctcaaacacaatttattgaaacttttttttgtcataaaggttttggaggaacatgtaccatcaatttgatcgaacactgcatcctaggcagtctgtatttaatataattatgaatatgaatgagcaaaataaacaattagagaaagatattaaagacctagaatctgtaagtattctgaagtatctaatatatttggaatgtgaaattagtttacgattagactaatatttgtattgttggtgtaaatcagcacataaacttctgaagtaagcagtttcttcaaaatcaggtcatccctactttgattgaatacgttagttcgaatcactttctttgtattttaaaatacattaaaataccggaagtatatagcataacgtatagataaacataataactatctgtgtacccaccagctagcttttgtgggattttaacatttactatatatgcctcagatctttcttgttcttgttttaagaaataaaacataggccgggcgcagtggctcacgcctgtaatcccagcactttgggaggccgaggcgggtggatcaccaggtcaggagagtttgagaccagcctggtcagcacagtga

SEQ ID NO: 72510 - DNA, 1066 bp, Homo sapiens
cactgcaacctccacctctcggttcaagcagttcttgtgcctcagcctcccgagcacctgggactgcaggcgcgtgccaccatgcctggctaattttagtagagacgaggttttgccacgttgaccaggctggtcttgaactcctgacctcaagtgatccacctgccttaacctcccaaaatactgggattacaggtgtgagccactgtgcctggatcaagaacactattttttacattaaaagattgctaatggagaagcactggctttttgtttaattacgtttttgcaaatttaaaacaaaactactcaaatacagaaattttcatacttcttgtcatcttttcttgaccctcccttccttccagcagtgacttgaaaataatagaattagttaacagataggatcctctttctttcctgtggttctcttttgattctgcttgtgtttgggaaaaccagatagttttgataagacaaccgctgagacaagggagagaaccaagggcatttcagggtcccattttaatagtaagctcaaatcaaaaggattttgcaacatgaaacagtggaggaggcatctttatagtgagatgctgtaataagggttgcttatattagtaaaacttacctttgtagcctactaatagaaggccaagaggtactgtatgttaaatggtttacatgtatgtcttcctaactttgtaaggtaggctttactaattacctgtaactttcaagtggggaaactgacattcaaagagggtaaattacttccttgtctcacagcaagtaagttgaggaattctgtgccatttctgactcccagtcctttgggacctgattttgttttctctgagaacttttagaatcctctttttccccagtgttctgaaatttcttttttttttttttttttttttgagatggagtttctcttgttgcccaggctggagttcaatggcgtgatctcggctcacagcaacctccacctcccgggttcaagcgattctcctgccccagcctcctgagtagctgggactacaggcgcctgccaccatgccca

SEQ ID NO: 72511 - DNA, 1035 bp, Homo sapiens
tcgagaccagcctggacaacctggcaaaaccccatatctactaaaaatacaaaaattagccgggcatggtggcaggcgcctgtaatcccagctactcagaggctgaggcaggagaattgcttcaaccggggaagtggagattgcagtgagccaagatggcaccagtgcactccagcctgggcaatagagcgggactcagtctcaaaaaaaaaaaagaaagccgggtggggtggtatgtacctgtagtcccagctactcgggaggctgagatgggaggatggcttgagcccacgaagtggaggttgcagtgagccaagattgcgccattgccctccagcctgggtgacataattgggggggggggggcggaaaagaataaaaaatcagtaaaagtaaactgaatctgatcaactagagcaaatcctattcttaggtggatgataagagtgaacagacttggaaaatatttaggatcccttggttattttaaatctttcctcattcaatttattatgaatatatatctttgtttttatttgtagagttgtagcccctcttattagctctttgaaagttgtcactggtgactttcattttgtctgatattcctccttatctaccaactgatgaacttttcttcaagtaatgctctgattttgacttatctttacacagtggtctcatgctagtggtttaataaggcctttttagagactaagaaatttctgatgaattgtctattaaaactacttttcaaatatgctcctttattactttgggttgtttttctagtattggatcactactctggagtaatattaagtgagtgtatgtagaccgcaaataaatattttctaggtacctagtatgtgccagacactgtattgacactgggtatataacagcaagatagaggtggacctcagggtacattctgttaattgttgtggggactgtaacatgttcttaaattattaatgtattgggaaataacttacttttaaaagattggtttgaacatagccaaacttttgt

SEQ ID NO: 72512 - DNA, 1049 bp, Homo sapiens
agtgtttctaggagacggcgctcaccggctgcacctgcgccgttgacgccaccggggccggcagacagacccgcggcgctggctggtggagggagttcccgcttgctctctgtcgctgtcaccgccctgtttctgtagccgtatggtacgcctgtgagaccggctgccggctgacgtctccttgcgatggagcatatccggacgaccaaggtagtcgggcgcgggatcgccagtcttcaggggccctgctctgacccggctgaggcaggaggagacgaaggctctgctggcctgactggggctgggagccggcccggcggagacccggcccggggcgggagggtctggccaggcctggtctgggagggcagggttagcttgggccaagcggggtgcagaggcctcctgtacctacaggagcaggggtcccactttcagcatcttggagtgcgtagagataagtctgggaaaactggtcaccgccctcctagctctacgttttctcgggcaaaattggggctcctttaactttggagtctttcagcctttcgttgcctcatcaaccggaaaaccgtcttcaaattaacattatgatgctgtgtaagcttgtccttgctcacatttcattgtcccgtgtcacagattcacagtacgagttttggaggaaccgagatcagcactccgctccacctccctttgctgtctcggtctccagtctttcgcatccggtgtttccgtgtctgtgcttcatacttcaggcattgtcctgtgtcagtagtcaagagttctggagaagggaaaaatgttattccatattttaaaaggtcggatgcagctttattcgattgaccttattgcactccatgcttaatttttgtgtgtggaagaccttcattttgagaacgaacaaatatttttatttcgttacaaatttaaaaacggaaggaaatgacatcagaatgttaccaaattacgtttccaacgacatttaagtttaactttgagagggagaaaaacataaatcgagacgagaagaataacattttaaa

SEQ ID NO: 72513 - DNA, 1536 bp, Homo sapiens
gaccacaagtacgcagcaccacgcctagctaatttttaaaaaattttttggccaggcgcagtggctcacgcctgtaatcccagcactttgggaggccggggcaggtgggtcatgaggtcaggagatcaagaccagcctggccaagatggtaaaaccccgtctctactaaaaatgcaaaagctagccgggcacagtggcaggcacctgtaatcccagctactcgggaagctgaggcaggagaattgcttgaacctgggcagcagaggttgcagtgagctgagatcacgccactgcactccagcctgggcactagagtgagactccgtctcagaaataaaaaaaaaatttgtagccacagggttttgccctgttgcccaggctggtctccaattcctgggttcaagcagtctgcccaaaatgcttgatttttaggtgcttattttttcacattttaacatctctgaaattgagatacatcttacaagagtctaatattagaaatacatattaaattatgtaaatgagacaaataatatacttaatgttgaaatagctcttagaaatatataagaaaaataccgtaagaaaagtgtgcaaatcacaagtaagcagttcatgaaagaagaaatatacttgtctcatgagcatttgaagaaaatggttttcttcaccaaatataaactaagaattattatgaagtggcatttttcacctacataactggcaaggttttttataaaatatgtccgttgttgtgagggtgtgataaggtattcatggcagatgggaagataaattgtgatagttgttttaagggattgtcagattggagaagtacaggtaatctgacagtattctgtactgatagggccttaaaaagtgtcaggtaaagttatcaggagttaaactggtaggcaacaacataaattttccatacaggatatttttcacggaagatggttgagaaagggaaattcttgcccttgaaagtatatgtacatctgccatatatctgcttatgtgtacagatgtcttcataaaatgctttgcttctgagttcatgacgagggttgagaaagggaaattcttgcccttgaaagtatatgtacatctgccatatatctgcttatgtgtacagatgtcttcataaaatgctttgcttctgagttcatgatgagtcatgacatcacatgatgtttatgaggcaagcaaagaaatgcttaacagtttatatttatactttaatttgtgttaatttaaagcttgtatttggagtatgttgttcaattaccaattttttttacgtgaagcttcttgaattttctaggtgataaaacgggaacaagaccagagtaagtttacaaatttacccttaaggcattttaattgaagagtttaacttattaaattgtaggcagatggtataattgaaagtaaatatcatatacatttaggagaaaaaacttttttgtaatggtattcgttaaaagtaaaataatagacgtatgttctggtaagataatgaaaggtcaaatc

SEQ ID NO: 72514 - DNA, 1994 bp, Homo sapiens
atccacatattaaccatagtcaatgtgaaacttcatttagccgttttgtttattattcttttaggttctgaaagaacagtaccttggctacaggaaaatgttcttgggagatgctgttgatgtgtttgaaacaaggcgagcagaagccaagaagtggcagaacacacccagagttactactggacccactcctttcagcaccatgccaaacgcagcagccgttgccatggctgcaacacttacacagcagcaacagcctgctacaggtctgaacgcattcaagttatagcttcttactgttccaatgcagaacatttatgtgcgtttttataagtcttccatttgtgtgagcactgaagaaatttctatgagtagctgttccaatacaatctaaaattgtgatggacacgattataaacatacctgataaaaaaggcagggtagtcttagcaataattatacatcaattagatattgaatattgtgaatctacttaatgttatttgctgtaatgctataaatgccctttagaacatggtgtttcactagtgaattacatttaagaataacattagattctgaaatcatgactgtaccatttattgttttaaagtcagagatcatccatccattctttgaatttttcatatatgatactgataggtggtgcattctcattttcctcatacatagtgattacaaagtacccacattcaggatgaagtatgcttttattgactgaaggtatgttgaagatcaataggcttgtttgtatgtatgttgactgtaaacagaatacaagccctctaaaccaaattttgaagatgatacatgctagaattgtacctttccaaggtgaacagaacagcaagagcaggaaaaagatgttttgagatgtggattgcacattaaggagcaactgggaagttgaacagatgaaaataattggtgacatggaaagcagattgttttatttcttggtttagttacacttctaattagagaaacattttttgtggtcattctacagtgttttatttggtcctgtgtctttcggaggttaatagttatcttaatcctgccatcccttttgtcaggtttgaagcttgacatggaaaaatagtcttaatcgatattgatttttttattttaatcattcataaatttcttagtaatgcttactattcaatagcatgtgtctttctgagagttccatatagtccagtagtacattataatacacacaaaaaaattaatacatatttagattgcattcaagctacctatactagggaagcattctctggttttcactattggcagtttaaaaaattgttcttcacatttggagatgacagaattgacttgccataagtaaagggttgatgatagatttatgccaaatcctccatatcccgtggctggacccatgtgaatagtggctcgcacgagcactgtctggtagctctctagctggctggagtgtaggattgcattgttaagttatggagggaaaaagtcattatgggattgattcctttgaggattgatatttcttcttaaaaggattcaatcccataattatgaccatcagctctcatgattacctaaccagttaatcaaaccaaccatagtactagtttactttttagagccagtattaatcctaaagtagataagtgtagatttggttaagtgttctttaaacatagtgaatttccattctattaaatagaacttgagaaatgtcagttatataaaaagttatgttgtaagtgaatatattctatgataaatacctaaacttgaagcaaaatctcctgtcaagggtttgtgtgtgtgtgtgtgtttaactttcttatctatagattattattttgagaaattcataggttttcacttatacattttgagcttgtggacatatggagatgtgtgttcattctctaaatgagtgcctactatgtgctgggctcgaggaatacaaaggtaga

SEQ ID NO: 72515 - DNA, 2689 bp, Homo sapiens
ttttaaggagagccaagacgttttgttaggaattcctaatttttagcttagtgtaggtttggacatttaaggtgtagtgttaaataggaaacattaagtatttcatcttagtttcttgtggttttgtgattttgttgtatttaataaccaaaggaacattccccattaaatcagtaagagtaaaatttttcaaactggggaaaacgcattttaggttttttaaagaaaaattattttaaaatgtgacttagaaataaccatactaattacattaggcatttggggtgatcatggaaaattataaaatatttttagcactttagtcctttttctgttaatgcagttttacttttaagaaagtaaaatttattctggaaaatatgaattacagcgctaaacctggttttgttgtgtgtgaatatattatatggtaacttttgtaaaatgttactctacatgaagatttcactttggccagtcattggtatatatcactacaaacttaattttatttatggaaataagaacctctcattggatgactattcaaatttcaaagcagacttcttgaattgtttacgtaacttttgcctgaaggatttagactgctttctaatagtgaaactaatatatatggtggccagagtgtaatatatgctaatactttggcatgggagatatttatcatgagtttttactattaaaaaatgttatacatttgcctacgagttttataaatgatgttgccttcagaatttgtgtgaaggtacaaaactaaaaatatcatgtatctgatgtgcaatggaaagtcttgtcatcattagatatgagttcttgattatattctgaatattgatgattagaaaaatcttatgttctgttgctcttaacaacagacccacacacaacaaaaagcatgctatttgagtaactcttacgacttacaaggctgagggctgtggtgtgcattattctttagggtcttccaccagcagtgcctcctattaacctgtgacaaacaagtctctcaatgttaaagaactggacatgtgttttttatgttttttgttaggaatcagaaagtataataatatgcttggtttctttttcctatagtaacattttacaaaagagctgctaggcaggtattttattctcaaagtgatctcaaactggatgtaaaattttaaattatttttttaatagtagtataagaattctggctgctattagttattgtttgttttctgggttagaagctattcgaaaagtccagtttctgtcccagtgtagcaaaatgtagttcctcggttgtttttctttaaatgctttataattttacactacctttttaatatacaaacctcattcttcattggataacttgaaggctttgatttctttaaaaatttaaattttagtgtgtatattactttgacagttccctcatctttgagatgcactgatcactgtgcttgaaaaagacaatactgaagattgtactatgaagtttattgaataattttcataaattatttatccaaatgagagatttttagatttttgtattctgcttagttttaaaaaaaaaaaatagtagtttaaaagagaggctagtaagtttgatgctattcttgccaaacaaactcagccaaaatctttaaagtaacaagagggaaaaggatgactaatcgttctgcttctgagtacattttccaaaacgttggaaagaaacttctgaattgaaatcttgaatgtattgaatctgtcaaggtacacagcggtgcctttgtaaatgttcattactttatttaatcaggtgataagtggtgtaatgtagcagagcttaagaatagaactcaattatcactttttgtgaacaagttggaattgtcatgttactgtgtaattgatttgctttacaatgaacaataaatttaataaaataaaacattgtcttgttttttatctacttattgtatatatcatttatatttcatatgagaaatcatgcctagttttttgggtacttactcttatgaaataacatgatagttttgccatgttagtgtcagtctctcttgatcaattgagacttgactctaacactaaggagctcgattaaaaaaagtaaaaaccatttactgattataccaactagttttatcagaaaacaagtgaggagatctaaaataattctagaagtaaatctaaaggaatgataatttatgatacattaaagatttcaaattatttagtagattaaactaacgtctttcattgcggtaagcctcttttaattgtctagttctgaacaggttaatttttttaaaatctttttttaatttttagatagataaatcagtttggataggtaagttagactggagagacatcctgaaaactaagttttaacaaatggaatcagttaaaagtaatcactgttcattttaaaaataatttcataaagaatctttaatcttgaaagagtaaggcaaatttgttttttttcccccccattttttttttttttttataccagggccacagccatctctgggagttagttttggaacgccattcggctcaggtattggcactggcttgcaatcaagtggcttaggttcttcaaaccttggaggtacactttaacttttctaatatttcattgaactattatatatttgaa

SEQ ID NO: 72516 - DNA, 1025 bp, Homo sapiens
tttcagattcttaattaaaaatgttttgggaaagagcagagtaaaataaccttgtagtatttagtgtttacattgtagtgcatgtcatgcttattaatgtatttagtcctttttttgtgaaatgaaatacccctaaagtggaaatggttataactgactaaaatcatacttgaatggtgggtaaaattttctagcacatttagaagagaaaatactaatttcttttttatggccttgttctttaaaaattgatgggtcacaaacttagtctaaatagatataaacgttttatttcagaattagtctagttcttctaaaagtctcatgcaaaggagtaagcagatttccttaataaggccatgtttttcagcactgtatctgttagacctctgatgattttcggttgtacttgtccatatcctttaacctgtgttttatgtgccattgtatatttttctattacccttccactaggatttggaactagctctggttttggatgcagcaccacaggggcctccacatttggatttggaacaacaaataaaccctcaggaagtcttagtgcaggtttgtgtgtttctgcctggatttcaggcaaatttaaaggtgtaaattatttaatttaaaagtatgtgttgttatttccagtaacccaaaaagttccctccctgattcagtttttactccctggatgaagtgtgcaagcctaactaatcattttactttatctctctcataaactaaagggcaggtttgtaaaatacttctaacaagacttcttagtttgatttaataattaattacatcttctaactcagagattcatttgaactctagtgactaacttcatggttaaataattttcttcattattacaaaaaggaacccatcattgtgaaagtttaagttttttgtcataattcatcctggagaatgatttctattccagggtccctctggttttaagaataccacagtcttacaaatgattattaatttagtttcttgttcatttttgaaat

SEQ ID NO: 72517 - DNA, 1454 bp, Homo sapiens
tattagttaactaggcagtagtagtactagatcttaattttgcaaaagctcttataaaatcaaaacagtaagtactgctcttttgtttgttcattgtcttgaacattgtgggttgaagctttcctggaggacttgggattgcaagggtaggtccagatatgtgaatgtctctcttctacatgttgataaaatgtttttggtgggtctaaggaggaaggcaccttgacatatttaattaacaggaaagtttctggcaacttgaagtttatatagattttagtaatttgtgctaaggtttctcttttgacctgcatcactacactctctttcagggtgccacttagttgttagctatattattttcctgttaaaatttcatgttagaaatttagggctttaatatatttgctattcttacagattatgtattcttttagatagaaatttactgctcctccctgtttttatatttgtttttggaattcaacttctgatatgaatatttttttccctaaacataaggctttggcagctcaagtacatctgggtttaacttcagcaatcctggcatcacggcatcagctggtttgacttttggggtgtccaatcctgcctctgcaggttttggaacaggaggacaactccttcagttgaagaaacctccagctggaaacaaaagaggaaaaagataaacatgggttgatgtgttgagagaatccatagcagcaccgttcattctatgagtctatttttctaatgatgcagtaattaaattgcatcccaggagatttataaagttttgatatttttccctactctggaatttgaactttcttcatgtttgccatactgaacatcttttttcttgtggaatttaaagtccagctgtgttttctttttaatttgattctcagtgtaagaaatgttctgattacatcactgattggtaatggttagaaaccattaacctaaaacttactatttaacctagtgtttttgttgatgaggtttacattatgtgaatacatgcacatttgtttcttatacaggtggtgtgaactctagggcctatactagaatcaatttgttccttgttaaaggccttttgaattatactgcagggcatcttgtgaatatgtatgtaaatatatacagaataatacacacagttgtgtgtgcatataaaatacatatttacgccaggcgtggtggctcacgcctgtaatcccagcactttgggaggccgaggcaggcggatcacctgaggtcaggagtttgagaccagcctgacatggtgaaaccccatctctacgaaaaatacaaaaattagctgggcatagtggcgggtacctataatcccagctactcgggaggctgaggcacgagaatcacttgaagccgggaggtgggggttgcagtgagccgagatcacaccactgcactccagcctgggc

SEQ ID NO: 72518 - DNA, 1575 bp, Homo sapiens
ttgtagaatgatgagcttagaggtaccaggtcattgcagttgtttgcttaaagacttattgaaatggttactggcgtaaatacttggccaactcaactttattgcccctgatcttttccatttttgtttccaccttaacctatagcagctcctccaaatgaggaatgctgtaagtaagactcatcaaacagattttaaccattttattatcctgtgtgtccttacattgcttctgtgagatgtttttttcttatctgagatgaactttcaggagcctatttgaactccagactggtgttctggggcaaagagctattagccaaactgattctatgcaggtgaaggatgcactaaagttctcactttagtgagaacttttctagctattccaatacagagttctttcttatagggctattgatattgacaccaaatggagtggcttctcagcctcttaatgtcttaagtaagtgcttaatttggaatagagaaaccagtatattttaaaaaagaaaaatattctttgtagcaactgtaaattctcccattataacagtgaacagagctccaggtaataacgcataggcatgtcaggttgcatctgtatatttgactacattagtattagtgacatcaggtggatataaaagaaaacccttggaaagagaactgccttagccatgatttcgttagtagacctatttatgattcaattgcaattttcagataggatgtgaacatggaatttcattgaaaatagtttaattttttatataaaaggttttgtatataatgtgtgtcagtgactattttcaaaatcattttcatcaagacaccttttttctaaaataggcattgcatacacatatgcacacgtatgtgcatgtgccacacattttttgtataatgttgggtttgattataaaagtgttgtcaaatgttttatttatctgcatatagcagtggttggcttttttgaattgaaatttttgcgcattgatgcattgaaataaggaaaattatttatctctgagcactaaacttatttttgcatatttctgtaatattgcagtccccagatccagaacatgggaagttagggaaaatgtgtgattttgtgttttgaattactgtcagaattacatacacaattacaacaaactttttttaaaagacatttcattgtactgcaaaaatctgaatatttatatttcttgtttttttctttatatgttttgcattttaatatgttgagccactggaaatttgtaacagattaatttgttataggagtttaaatgtgttgtcattgtctccattgtctttgtccagagcctattattatggaaacaataaaatttattgtgtcagttgctttgattctttataggtgtcagtagctgttcttaatatgtaattttattattgctcttttagtctccggttgggttttagtatattcccttcattggtttatacatcttgctcttttttaaacagaagagtgaacataagatagtaaattatttctcacttgcttttgtcttctcaaaatgacaaaaacagtgaacattt

SEQ ID NO: 72519 - DNA, 1049 bp, Homo sapiens
cactgccccacccagaagtggcccagtcctgggggcaggggagaaagggaggggtgaaatgagaagagccccattcttcctcagtgctgaggagctgaagatgccacccccttctcctgccccactctgggctccaggaaggagagcagatggaatctcaggcctgcagcttctccacaccactgccccccaggttggaggggagctaagagatatggtgagagaaggggacagaagcaagaaaagatgttgatcaagaaaaatgagaacggggagggctgaaggagaatcaaagatataacaccagtaaaaaaatttaaaaaaaaaaaaggtgagggtaagagttggggaggggaacaaaaccaaaaaccaccccaaatccgaacgagcctggaaaaaaatgaaagttctcgagtatcatagagacattatttggcgcggctggctctgcagtaggagcgctcatattcattcttttcaaccatttttctctcagttcagatttgatcattttaatcgatcttcaagttcactgactcttctatcattttcattgttattgatttctacagtaatttttatttattatttatttatttattttgagatggagtcttgctcttgtcacccagcctggcgtgcaatggcttgatcttggcttactgcaacctccacctccctgcttcaagcgattctcctgcctcagcctcctgagtagctgggattacgggtgcccgctaccacactcggctaatttttgtatttttagtagagacggggtttcaccatgttggccaggctggtctcgaactcctgacctcaggtgatccgcctgcctcggtctcccaagtgctgggattacaggtgtgagccaccgtgcctggcctctacagtaaatttttattacagataccatagttttcagttctaagatattcatttggttctttattgtagtttttatttctccactgagatttcctgggttggttttgtgtgcatgtgtgtgtgtgggggcggggtttgttttttggttttttttcctcact

SEQ ID NO: 72520 - DNA, 1061 bp, Homo sapiens
tggaggtggcttatgtcagttagtgctgctgcccactagaaaccctggagcctggaagatgagccttgtaggaaatacctctttctaggtgcacactcaggactacgagaaatgttgaggaaggtgaaggattctcccataactcagtcctcctgggcaggtgactggcggggccagactttgagcatccttgctgaataataagcctgtttggtatgaaatccatgtgctactgatagcagggtaatcctgtggatttgctgaaaccataagggactagatgatacataaaaaggatatcagtgattccacgagtgtgtaacacgagacaaaagacataataaaagccaacctaatactaagcttagatttccatactgctcaggctatgtattaaaaattcttactgtagaatttttagtcaactggagttttctagtaaactgaattggtgtatgttaaaagggtcggaaagtcgggtagggatgatgggtggggagaattgcttgagtaagagatagtagccttaagaatatttccttgcaaaatatacctgggtattcttcatgtttaaaactatgtgattccagcaaagataagttatttcatttgataaaagcaaaagtaagaattatcctcatggaactaaaaccctgttatatttagtttactataccatgtcttccattaaaactatcctgagattaacttgatttatcttgtctcagtttaagtttagcaatttaatccctaaaaatgtagatagtgctcattgtatagaattctcccctttcccaaaatgatgtacgcttctcttttactaaattctcaactttgttagcccactccatatttcagtcttgctgtaagttttagaaagcagaaatcgcatcttctatttctaacttgaaaggcattttttacaactctgtgtaacaaatgtcatcgttcccactacgtctgtttttttctgatagggctaagaggcaagttttattgatttagaatttttcaccagtttatatgcattatgctcttcaaacttgcttttatgtgtgcat

SEQ ID NO: 72521 - DNA, 1031 bp, Homo sapiens
aactggatttcagtaataactgctttagggtgatagaaagcccaagatcaagaatggagacttcatgtataggctgtagaaaagtcagtgggccaacagaaagagcaccttctgtagcaaatgaggaagaagataaaggaaggaggacacgggaattcgtgacgtatcactaccatgatggaaaatgatcctcatgtttgacaatcatacatttgcttgtagaggatcaagagcaggatatgttcccttctgctccttttctctaagctggtcagccttaggtgtgagatgtagattttgaccctcggttttaaaacacccttatgtatgcaagtaaaatgtaattatttatgagaatgcaattcgtcattttttttcttggacttgggagtttgttgccttttacctttagttgaaatagcttctatttaaaagtatcacatcaggaaactcatctctcttctggtaaatgtctgtactttcaagtggtaaataatctccattgcgttctaacgatacatctgagctgcgatattggttttccagcagatgtcctaagagtttagaatgcccttaacttctcagttccaatgtcctggcagatcaagtggactatttaaagatggatcaagaataggagttatatacacgccttcttgcctggtttttcaaacagagagaaggcaaagtagattcatcctattaaatactacatgtgcctcaagagcatgtcagtgaaatattgatcaaaatattgtcctcttttacccaggaattataggatgaagtttatttttattcgtttaattaaactgcatgttgttttaataatcttttttgtcagtcccttgcccatttgaaagttgcttttcttaacatgaactgttaactagaagcttttacttccctgttagttccaccttagaggttgcctttattctactgaaagtgcttatttgtatagtatattattttattttttaaaaataaggtataatttacacggagtaaaattaaccctttttaatgca

SEQ ID NO: 72522 - DNA, 1637 bp, Homo sapiens
ccgaagtgcccttgagatatggttgacgaaagaattttataaactgataaattaaggatttttattatgttgttattattatttcttttttgttgttgactgcacaggatcaaaatgcctgttatctcccttttacctgggactttttttttttttttttttttttttaatcagacagggtcttgctctgttgcccaggctggagtgcagtggtgcgatctcggctcactgcaacttcagcctcctggattcaggcaacactcctgcctcagcctcccacgtggctgggattacaggtgcctgcccccatggctaattttttgtattttttgtagagatggggtttcaccatgttggctgggctggtctcactctcctgacctcaagcaatctgcctgtctcagcctcccaaagtgctgggattacaggcgtgagccaccgcccccagcctgagcctttttttttttctaatgcatccaaggttaaggggaagacgcaaataacaggactattctaaaaggaaacctgtttgaactctgtgagatcagtcatcagtctcagtattccacaggcacaccttaatttcattgtaaaaagatatatatattttgtctatttttgtgcttttgggggcctattttgtgcttttttaccttatgtagagatcttattacaaagtgattttctacattaaaaagagactgaaataaattgtatagttacttaactaatgaagacatttcagaactctgggatgattttaatcttgaagtagtaggtggtatagtcataaaaccattcatccccttcttgattgtatcttaattttctggctttaaggtgacatctgagaggtaatgcattcttttttatattgaaatcataaactatcacccgctgcttctctgagttacttttaattttgccttgtggttatggtttggcgtttccttctgtttggttttcagagccccatgtctatatagtcctgagtgcaagtaattactatacttgtaaatgaagatcagtatttctgcctagatctgataaaaaaattttcttgtcttagttataaaaattcaaagaaatgtgttacaaagatacttagtatagctcctcagccataacctgagacttgggatgaaatttaaaccagatacgatttactttgcagatcataaggctttttatactcttgttatcaaaatggcttatttttcaggcactaaggattgttaagagaaaagcttttcaacgaaggattgcctttcttctcccacactgttcttgatttcctctctctttcaggcctcaacaggcactgtattcattgccaatgttccaaattatcaaattcaagtgaatttatttgtgtgttctttacttatataaaaaaagataactttaaggatgtgcaagtacatttccaactgctagcacaaccagtattttgtaattaaacaaatcgctgtatggtatggtcttctacacatttatgtctatagatatctatcgatcatctttctattctgtttcatgactgaataatgtaaaaccagtgttggcaattggtatcatcaatgatactcattttttaataaccaaaggcaggggaaaatcattttacttattaataa

SEQ ID NO: 72523 - DNA, 1052 bp, Homo sapiens
gaaagcccagagaagggagccagaccccgaactgctacagtgagatgtctgctagattgggctcattaatggtctccaaaaagttgggatggctttggattagtcgggacttctcaggacgagacttctcatgacgccctgtgttgtgcatggatgccttcttcatgctacttttaaacgtttttttcctaaaaattgtatttctttcacttttcttctgcagtgaagggcaacatgcctaattaagcctgccggggggcttatagtagcgttacattccttatccctgtgtagttatttacatttccaattaaaaatcctggaaagagaacacttatttctccccaaaactcattatgtggactgaggctggtttcagctagtttctgctatgattggggtacattttttttcctgctttactactattaatttattttttgataacatatttagggctggtgtcttaatttagagaatgaaatatttataacacgccaaggaaaaagcctgcatccacttctccagtgatccgtagttagcctgaagtgatagtgtaattaggacagttctactgctgggcgccagctgtgctgcagacactgtagcaaatgtttctacctgctaaaggggcgctatatatagaaattgctctgttcagcattgaaactccaggaaatattccacagtcagcctttggttaaatacctataaagtattgttttacttacagggcattatttctccataattccacctggtattatactttaaaaacactgactccagcaataccagaacagtgaaaaggagcataattagaaagcccggctgctctaatggatgatgaaagggtattcatagagctgacctcaaaggcgtggtctccttcctaaaatgctgccccatccgactctgggctggcattatgctttgccaagaccagtaagacccaatccacccctgtgcttatgtatttcccaaaaatatagccaggaggttggggcaagaacacatcagaaaatgcaggctcttggtaacatagggtagaa

SEQ ID NO: 72524 - DNA, 1046 bp, Homo sapiens
tgttaaaaagaaatttatataaaatttaaaatacaaatgttaaattatccagaaatacagaatagttaatattgctagaaccaaataacctctaaaatgtttttattttggtaattttgtcatgctaagcacttttgtatctgcacaattcagtaggttaagaatcaatcttctttttcttaatagtacagcagactttagcttcaagtttcataggcttagtacttatatctagacatttgtgtctaaataagcttttcattaactttttattttaaggacagtatcttttcatgaaagagtatttggctgaatgtttgctatatatatgttacttgaaatgttaaatttaatatgcagcataccataggtgtatatataggtatataattttaaggttaaaatattcagtctacaagtttggttcttatttaagcttttgggctaatactgcatatggcacaatgtttaatattggcaagttcatctcagagaaaggggattcagatataattttaaagtagagataatttactgaagcgtctctgacaatctaacttattagacagcaagcaatatataatactgaaaaagtattcagaaatggaaaatttacatcatataggttatttaacttgtgttcagcctttttgtaacttttttgaaagtgcaaacaattctttggattattaaataaggtatacagtatgcatggtttctcaaatttagttttaaaatctaaaagtctataaagaatcagatgcataggcaatatgttaagttcacttggaggctaaaaatctccagtgaaaacaaaacgaaaacctttaagagaatgtagagtttatataaacacaaagtatgcattgaagatctgtttctaccaataaacattaaaacaaagactgtatgtgaactatgtttttctgttgttccactgtggtttattcaccctccactaatatttcatactagatgccaggcagtgttatgggatagagtatttcccagacgacagacaaaagtccctggcttcatggaaaaga

SEQ ID NO: 72525 - DNA, 1049 bp, Homo sapiens
aattttacataaagtttgtctttgtattttattgatattactatattgataaagcaatttaaatgtaaacttttggtagtggacatgtttctcatttgccttagtattttgctagtaatgggcagatagaaagtaagaatgaggatttctccatagcgttgcataaatagtatttaaagctttgtaactatgtaaatagtaatttaatttttataatatgcttatagtagatatacttttcttttagaaagttgtctttttgccatctttcattcattaaaatccacagatgttctttaatttattacaaactttgtttttcttacaagttttcaataaagctgtaaggtgtgtcttaggaattgatcttaagttgatttgctttgctttctagactcagaagtccctagagaaagttcacatgaagattctcttctagaatggttgaacacctttcggcgcacaggaaatgcaactcgaagtggacaaaatgggaaccaaacttggagagctgtgagtcgaacaaacccgaacaatggagagtttcggtttagtttggaaatccacgtaaatcatgaaaatagaggatttgaaattcatggagaagattatacagacattccactttcagatagtaacagagatcatactgcaaataggcaacaaaggtcaactagtcctgtggctaggcgaacaagaagccaaacctcagtgaatttcaatggtagtagttccaacattccaaggactaggcttgcttcaagggggcaaaatccagctgaaggatctttctcaacattgggaaggttaagaaatggaattgggggagcagctggcattcctcgagctaacgcttcacgcactaatttcagtagtcacacaaaccaatcaggtggtagtgaactcaggcaaagggaggggcaacggtttggagcagcacatgtttgggaaaatggggctagaagtaatgttacagtgaggaatacaaaccaaagattagagccaataagattacgatctacttccaatagtcgaagccgttcaccaat

SEQ ID NO: 72526 - DNA, 1050 bp, Homo sapiens
aaagcccaatgtgttccataaagtttttacaaatgaactaatggaaatttgtatgtttatatattgtgtgtttgtatattgatgacccatataatgaagtatttgggataaaattcaagtaaatatttgaagttttctctataaatgctcccttaatttctttttaactgacaaaaatccacagttatagcttatagattcctaagtgtatcaactggcagcactttaccaactattcaaattaaatcttattttaataatttttaataaaagattaataaatgaagcacaaccgaattgatgcacatttgtaccagttgaatatttttaactgtcttcaatttacagaacatatgaaagtaataagacatttgtcttctataggttactaaagattagtcttacccttcatgaggtctcataaaacttaattcagaattcttaaatgagcagtttttcattgttttaggagaaataacatcagaagaactgcaacagcggttagatggcgtcaaggaacaactagcatctcagcctgacttgagagatggaacgaattacagaggtactatggagtcctttccataaggaacaggcttgattggagcacttgcagaaatgaaattcttagaccttgtatagtatgtttgtcttcaattttttccagttttaatgtgatactcattcagataatatatatatgagtagtaaagcagtatggttaagcagtataggacagaggaatgaatgcaaagatgtcttaaacacacagattgccttcagagagctttatgtaataatatacaattaagttaattcccagcatgcttctttttaatcttggaatgtacacattactttttctaaagtgatattacttagcttctaaaaatttatatacagaaccgtgtagaaagactgagttaggaaacctgtttttgtttctttgttctgtttgatggtttacatataaaaagttcttataaggaaagtactataaaagaacttcaaactaaatgaagtatgtagagttaaaaggaaaagccactt

SEQ ID NO: 72527 - DNA, 1112 bp, Homo sapiens
ctgggatgaggagggaggatcgctggaggctgcagtgagctacgatcgctctagcctgggcgacaggatgagaccttgtctcaaatagagatagacagacagacagacttcagaatttattagggtttgtaatttccaggttccaaagcacagcaagggaaagggcctggctgggtagtacgttacacccggaagtaaagagacgcatacaccgttgggtgcactttatagtctggctggcaaacgagcgacaccgacgcgcagagttaagtgctgggacttcccaagcctggaaagcagaccgtgtctctgcaactacgcggctgccacgagcgctgagcggccgggcatttggcctcgaggaggaggcactgtaagggcggcgcaagagggcggaacgcgggacgccaggcaccctagctcccgacggacgcagttttcagttgcacgggcgagctccgggccggctgcggagcgactccccgccgccaagtgggcggcgtggctgtcgggaaagaagggctggggcctgccgttcttcctcccgagtatcccctccagctggacgaccccacgctgcagcacgggcttccggcttctctcctcagtggccaattcgagggcacagcgggctccggaggcgcggcggcaagcctatcccgcctcccaaccacagcctccagcacccgagagaacggccgcccacagcacacgttctccggacaggagggcgaaggcccaagacctggagaggtgggctcgagggaaagatctgggtcccaccactacttcctggagacgccggggaaagcaggccatccttcgagccacccatctcttctccgattggttaactgccttcttattgcgctccgctggctggtgattggttgggatgcaccgtctatcacctgcttccttgtgagaatctaggtctctaagggaagcgttacttgaggctcggttgggaagaggttggttgggcctcttgagcccactttatttatcgtagtggggatcgtcccccggcgcgagcttccgtcgcaacggccgggaaagaaaccagtagcgggacggagggcgggggtggcaagaaagtcaaggtttagaag

SEQ ID NO: 72528 - DNA, 1645 bp, Homo sapiens
ctgttgtgcggctctgcccttctgtttgagtgtatgggagagtgagtgagtgagtgagtgtgagcgtgtgtgtgagagcgtgaggcgtgagtgcgcgtgtgagaggacgagagcccgcctggccgccccgccgctcccgccgcagcaggagcagaacgcgcggccggagagagcggcggagccggcgcccagggagcccgcggggacaagggcagagacaccgctccccacccccagccctcgtccctcggctctccttcgccgggggatcctccccgttcctccacccccggccggcctctgccccgccgtccccctggatgtccctggcgctttcgcggggcctcctcctgctcttgccgcatcagtcgggctggtgctgcggccggcgggcgtagagcgggcgggttcccgggggctgcggctgcccgtgcttccccggtccccacccctgccccccggccccccgacccagctctccggcctcagaggctgtgacaatggactatgactttaaagtgaagctgagcagcgagcgggagcgggtcgaggacctgtttgaatacgagggctgcaaagttggccgaggcacttatggtcacgtctacaaagccaagaggaaagatgggtgagtgtgtgtgtctgggccggtgtccgcgctgggcggcgctcccgcaggccgaggcaggtagcccggagggagagcgggccgccggggtgccgggctctgacttcctcgacgccggcctctggctccgccagccaggtttggggaggaagtggtgtacgagggatccaaacccacgagaaatcctgcgtgccgcgtctgtgttctgctctggtggtaagaggcaagatgagcctctgcaccgtgggctgtatacttttcaaggatttcaaagctgattcatgaaaaaattcgttctaaaacgccgggttaaatgttttttgtttttttttttccttggtcgatttattatggtaaccttctggggatttcctcacccgcctctggagtgtcatccatcggtctagaaggaaggctgtgatcctttcccccaccagtttgtgatcgattttttatcaaatttgtattttatttgaggaaaggaaggcagcgagtgaatgtggttctggagagagttccccatagtgatcatctgcaacataaatgttgcaattgctatttagatattattagctgtgaatttttacatagaacaatgggggtttggtgcagggtgggtggtggggaagaaggcaagtgacatagggactatctcgttcaggcggtttcccccaaatttagcggctggcagtgaactttaaataatccctttgctttaaatattcttccctagtaacaacttaattaaacctatgactggtaatgcttccaatttagtttcttaacaggcaagtgaattgttcattttttctctttgtcagtagatgaatgtcttgtaatattgacaaaagagaaggcaattcttagttggggggaaaatatattttattaactccatgttttcttgtaaaatggatgttgtctctgttgcctttgacagaatagaaaattattgaaaagtcaaagcttattatataatccttggattttattagaaacgaagtagctttacttgag

SEQ ID NO: 72529 - DNA, 1022 bp, Homo sapiens
atgattgtgttctccccagctcttggcatattgccaaattttgacaggtattttgtacttttgtgtatgtgtgtgtgtgtgtatctgaaattcatgtttgaaaatcttttttctaaacttgctaacattaaaagcttgaggcatattacgggaagagtagaaaagtaatacctgtgaaaataccaggagaagcaaaatttgatgggtttcctatgtttttacccagaatggcactgaacaataccaaaatcaatccaaaggcaagagcaagctcggtagttggctgaatcgaaatggaaggccaaggtatttgaaaattgagccactagaaataatatttttttgaaatatactttgaaaatgaaccctttaaaatgtggatcaaatctgtatttctaaaattaaggaaaacgtaattagtttctgaatcacagttggcatttaattttgcctaaaatcactggtctgtatagcatgatcgttttatttgaaatttaccttttgttacatgagtaaaaaattatttagactaacttctattcaaggtaactcagttactcatctcactagacaagttctttaaagtctataactttattgtaatccatgaattctaacaaataatcatcctacagagaggaatttttacatcatgatgaagggcctactctgggtgtttctagacatttgaatctataggttgtttagaggactaaagggattgaataaaaagaaaacttgtcaagtcgtgctaatgtagtttatattaaacaagtcatatttttgaggaaagaaggagtaggttttttttgtttttcggttttttttttgagacggagtctcgctctgttgcccaggctggagtgcaatggcgcgatctccgctcactgctagctccgcttcccgggttcacgccattctcctgcctcagcctcccgagtagctgggactacaggcgcccgccaccacacccggctagttttttatatttttagtagagacagggtttcaccgtgttagcc

SEQ ID NO: 72530 - DNA, 1028 bp, Homo sapiens
ttacctggtatggtatcacaggaagaaagaatgttcctctgttagaggcctaagggtgagacttaagagtggtatgtgggggatgtctgagcattatgagagatgccatcatctgagtagtttgttggctccattggagaggttctgtaacattggtagagtttaaagttgacgttagagcattagtatcaatgtagattctgcaaggttgtcctttaatatttaaagaaatttctccctgtgagtttaaggataggatgggacattccccataatgtcacctttgattaccttcttatctaacagtagaactaattttattccaattcccttccttgatgatggtatttaagagcgtcttcatcaagagactccttgctctggaaattaatgactggaatgtgggcacctagtttttaaaatgtgtaacgccatcattgtattctgagtcttatcctgcttttgttcagtgagaagttggtagtcagtctgtggggctatttcccactctggtttttgcttgcatattacattctctatttctgacttaaaatggttcacagaaagtgaggcaagagtgcggacccatctgtgtcagaatctcctgaatgctgtctgcaggtgttaatgagcctggccaacacagcaagcaagatcccagctctaaaaaacacaaaacaataaacctgataaacttctggattaatcaaggactatgctatttaaagtacccataaaacaccccaatagaattctgcaatggatgccttctttatttgcttatgaactgaattaaagacttcagtcgatttccaaaagagaaattgtgaattcttccaaaacttataacatctatagtatttctaaaactcgttggtttcttatacaattcaaggtttcacccaaagggtcttcccaatttttttgcatttgagtttcctatatatgaaccaattgatatggatctgggagcctgggattatatgtttctaaaagtgttcgcgattcatttggaagggtcttttcat

SEQ ID NO: 72531 - DNA, 1062 bp, Homo sapiens
ctttacacagaatattctaggatatatattataatctttgcttttgttgctctcagcccttctattatatttacccataatagtctattatgacctggaaatgttaaacaattttgcaagtttactaagattctgtaccaatgagtcttcaactcaagtagataaaaataatttacactatgttgaggaaaaagactcataaatctaagagtagcatgtcaagcactgtgatagaagtatatgggaatggagaagggtgtacatctaaactaaagtagaaaatcaaggaaagttccaggtttgggaacgaatgtaagaattactttcatgagggaagaataggggtgagatggaggatattgttaaccaaaggtagaccatgctgaaagatgtagttcatttaattgatacttttttaatacttttcaatcttgagaccaggtgtctgtatgttaactgtcagttattcaacatctattctgtatatactcgtcagttttaaagagttaaaagccattaaactatggtcagtggtgttagaagtcaggatgttgattacccttggagggaatacagagcttcagggtgctagtaatgttctctgatcttgcactgggtctagtaacacgggttatatatgtgaaaattcattgagctgtgtacttattgttcacatgcttttctcttgtttattagtctttaacaaactgttttttattagaaaaaaactcagttcagaaacagctattatctttgcatatatcgtgataactataaatgcacttaaatacagaaagaagtatgaaagcctacttttaatgtacttgatcatggctcttcaatctaagatgaacagaaatgtttaatttttatgaagtcttactaatttttcctcttatggctattttctgtatgtggctgaagaaatctgtacccactgattgtgaaaatatttcccaatattttcttctaaatgctttataatttttttatttctagtctatgatatactcaattaatttttgtttgtggtatgatacagagtttgaattccccctccca

SEQ ID NO: 72532 - DNA, 1098 bp, Homo sapiens
ttctgcttttatttcctttttttctttaccgagctggttaggccatctcacacaatgttgaatagtggtgagagcagttatctttgatttattcccaactgtgaggaaaatatttccgctttcactgttcagtataatgatagctgtgtgtttttcataggtgctattaatcaagtttaggaagttatattcctagattctaagaattcttttcataaatgatattgaattttatcaaatgcttttttctgcatagataaaagcaaccatataattcttttcttattctgttaatttagtacaaaatattttcagttttctttgtgaaatttttccttttatctatgagttatttcgaattatattgcttaatttttaaacgtgaggtatttctagataacttactgttactgattactaatttattttcattgtgggtcagagaaaagagaccttgtattttagagatacatactgaaatatttataggtgaaatgatacaataactggaatttacttcagcataatccagggttggctgggaggagtggatattagtataaataaattaagtttgtctgtgagtggctaatggtacgtaggggttttttttaatattcttttttatttagtttggaaatttgtataacaaaaagttaagaatgaaataattcccatgttttctggcaagtttttatcaggccttcctcctttacatttcttaattcttcctcgaagaagttgtgcgtccccagcattcacctccattaactctctatgattacacccagtttgtttctttaatataacactcattacaaatgtaattacgagggggttctttttatctgtgtgcctggttacttactttgttatctgttcccccaaccctctagactgtaatgcgtttcttccccagtttgtgctaggtgtggtgtatagtccttgctctgtaagtaagtgtagaagggagggagggaggaaggaactctgaaaatttcttctaaaagcaaagagcattgcatatcttcatcttcatttttttgtaagtgatttgtcttatacattgtcaaaatttcctgtgagctgtaattccta

SEQ ID NO: 72533 - DNA, 1876 bp, Homo sapiens
aacctattttatttttatttatatttattttacctgtttttattaagcttggagagagccaaagaatcttcttcttgttttttttgtttgtttgtttttgagatggagtctcgctctgtcgcccaggctggagagcggtggcaggatctccactcactgcaagctccgccttccaggttcacgccattctcctacctcagcctcccgagtagctgggactacaggtgcctgccaccactcccggctaattttttgtattttttagtagagacggggtttcaccgtgttagccaggatggtcttgatctcctgacctcgtgatccacccgcctcagcctcccaaagttctgggattacaggcgtgagccaccatgcccggcccaagaatcttcttcttaaggagaacagacttgattgtcacatcatattttaggacaggtgacaaaacagcctagattattaaattgttgtagctctgttttgtttgcctgctattaaatactttgaaaaaaagactgagaagaaaattaaagtagattaatgctgctaatttagattagtcatactacatatgtgcaaactgctacactttaccttctcgtagatatttgctatatatttttaccttggagagtaaagctcctttattcattaatcattagttattccttacttgtgtcatattctgtatatcataagaaaatagcaagtgaaaatgttaacttataatgttaaatatctcttatttttattatgtctactaatttcaagaacatgcttaatatttacttacatgtattggccaagggtctgctctgtgcaatattaggttcagggatatgtacagtggtgtgcaaggcatagtttactgcagccgagttatagattttcctgcaatttaagagtgatctaattaagaaaatgagtcctatcaagagcatttgaaacttttcaagaaaaaacttgtaaggcacatttattcataaagtaatttttctatgtataaagttgtgctttgttttactggatgtctaacaacattatacatagaaagctttgatggatggtacaaggcagtttttattttcctcagaatctttcccatttttacatttttccattgtgaactggtatatcatttctttgtgcttgtgtgtattttattgaagcatctccccacttgctttctttataacctgtgtcataaataggttctaattctatgctatgtcaaccagccagaagtatctcttgaattttgttcttttttttttttcattttatctaccagataaacaggaatcaagtatactctgaaagtaattgatttttaattatgctttaaaaataaaagcacaatattttctgattccctattgtgataatttatctcctgaaatgctgtcatatgggtaggaaatggaattttagccccagttattagggaattttaaagttgtttatgttattcagcagagtacgaaattatattttcaatatctatgggaatccctgagtgtttctttttctgttaggaaaatattatacatcaaattatcttttcctttttttaagcttctgttgatatttttttctttctttcagcatataatcaagtttcacagagcttctaaagcaaacaagaagccagttcagttacctcggggaatggtgaagtcactattatatcagatcctagatggtattcactacctgcatgctaactgggtgttgcacagagatttggtaagttgacctgtaattggtttaaactagaaagatgcattacagttggatacttttctagtcgtctgtagataccagtgctatatgtaggcctgcaaaccttatagaagtagtgagaatgctaccttct

SEQ ID NO: 72534 - DNA, 2046 bp, Homo sapiens
cagagaattacttgaacgcaggaagctgaggttgcagtgagccaagatcgcgccacttcactccagcctgggcgacagagcgaaactccatctctaaaaaataaaagaaaacaaaaaatagatttacataacagaaataagacaaatcctttggcattttgtgaagctcaaaataaattttggccattggggtggagtcaagttagggaaaaacatttctacttttgagctaccagtcctttttatgatctctaaaagaaaaaactgtggcttaaggacatttttttccccgtagagtcagttatgctaagatagctctacattttctttttcttgtaaatttttttttcacttgaaatacatatgtatattaggtaaatacagactggtttttaaaaccaatatttaaatttcatgtaataatataaatatacttaagccacttagattagtattaagtatggtagtgaaaattatgataccgagtttcttttatctctcttatggtaaagctcttcctgctaatgcatcttaagtagattctctttgacataggggtagtatagaacagatcatttcagaaggctctgtctgttagtggtgtactaagtggtggaaagtggaaggattggtgccccctaatataggcaacaagggatgcattatctgtagatgatttaaaaataataataaagcacattaaaagttagttgctttttattgtcactatatgctggcaattctgaacaatttcagtaataaaatatttctctacggtgaggcaaatcactcttactcctccatccctcttgccattatttaaagtttattaatccaaaaagttctgcagtgtctgctgctatcttctttgatttccatatttgagtgagatttcccatattttctgtgcatgacttagtgttctttataaacgtctgacccttctgtgtgtctcacgcacgcagaagtccactgaaccattgtttcatgaaaatgatagcctttgcctctaatctagatcctactggttcagatgcccacctttcaaattcttcaatttctgaagaaaaatctcatttaccatatatgtacattttaaaatgtgaacaccttcctgccaactgaaaaagttttaaagttttaatgtttatagtgtttgaacaatagctacatatgattctaatgtatgtagtaatatgatattaactctcaagaacattgttcagaagctgtatcacataacttttttaacattttttctcaaatatttgttgttacttgcatatgaaatatttaccctatcaaaacaaaaattaatagttcattatattctttacccctgtttagtcagatttagatcaaatgtgataatgctgaccttaactctcttcatagatttctaatgctatgaattggaccagttggctgacatgccacaagaaacttcatattaaggtggataattggcacagacaccctaaaaacaccattttaataatactctggaatgttattgatgtctttgtttaataaaattggctttattaattaatagaaatactggtttgagatggtagagttatgaatttctttgatatgtatagttgagcttttaaaattaacagtcctatttaataaataatgatttatttggttgctattaattatcacatagaagcagatcagtagctgaaatccggcatccttggtgggaaaatagagatttattaattctggaaatctttttgagctgagagtcgtaatcagtgtaaatgtatgggtgttttaagaaatatggaccagaaaagaaacataagcagtatttattttgtgaagtaattcattgatccaaaccaaactttttagttttagaacattaaaatatgtatatgtaagttgttgcttatacacttgtctgtgtccactagaggtaaataagaacaaagttatgtctgttaagttagctttgctccttcccttgatgactctcttcccttttctttgtttattctctttctctccttgggaagggaaaatagtttgact

SEQ ID NO: 72535 - DNA, 1044 bp, Homo sapiens
ataagattttcttttatctcagctaaagctgttatctaaacctattttaagttattggtgccattggccacataaagctttcattaaatctttttcagtttgacgaccatatctctttactggatacaagcaaatgataaatggtcaaataacagaacaaaagtaagtcttcctacagaaacaagcacaagcagagagccatatttcaaaatcagttcaacccagaagttcaagttcttgtgtacatttttataaattttgtttgaatcaacatacaatattttttttaagatttaatacaatgagaagtttcctcaatataattagatgtaaaatcagtaaccgttactgaattaactattgaaagaaatgttcgtttattaaagtctcctactcccccaatacaactggattttaccttcccttttaatagtgatcactttgttatatgacctatatctattttttattatttaatttttataacttgcctccagatttttatcttactaaaagtataatactctaagtaggtatgtgttctgaagattcctctctgttcccaaatagatgtgtgaatttctaaaatcaatttctattctaatttccagtcttttcagatcacagacaggcttgtaattcaggtcagtgtagtttaagatgcctatttaataaaaacatagaagttgggaagatagattgctaatttttaaaaattcatttaacatctgtttatgtaaacatcttgaaccatttgaaataagatcattttttgttttccctaatttcacagactaataggccttaaagttggaaggcatcttagcagcaacagactattccagtctcttagctgccatagtaattcttggtaatatgcggggcagacaaccctgctgacactggtcgaacatttccatcatggctaactttctgtcttattagagtaaacttgttgttacacagctataatccttgaaggtagagtcagaaatttggaattcctaatactcatcctttgggccctctcttccttgattggtc

SEQ ID NO: 72536 - DNA, 1036 bp, Homo sapiens
gcattttcttcatcaacccagttcttgtctttttcaagatagagctttttgaattctttatttttccatcagagttggctcctaaaacgaaaccaatttgctatccttggtgtatgccaaaatcattggtgcactctcctccagcatgacatgctggagaacagaaagcttctgccagaatggttgtctctgcaatacaaacatctgctttaggaaatatcaatgagttttttgggagtgcagcagcaaaaagaagaagaaaagcctgggagaaataaaacaacaattagataagggaacccattgcttcaaacagtagtatctcatagatttatatcatttttcagatggcaatcaaggatgatctatcattatttctgtgcatggctttgctatacttgaagatgttgccatgatattataatttaagtcatgtaggatttctgatctccatggcaacaaatacagtttaatggagtatatgcctcatcagaatgtcaccagcaaagttctatatgttcttttaaggtgattatgtttgatagcatataaaagatcagagattatttaccaaagttacctctaatcacttcatgtaaagttttggtgctagagcttaaaaactgctaccaaattctgctactgatagacgaggaagaaaaggaaagaagtatatatcaagaaattagttttttgggcgagtagaatattgtttcaacattgcattaagtactaaaacaaaaattattcatcaagtcttttgaagtcttccttaatactgattaaacaacaaaacagaacccatgacaagagtagtcatcattagggcctttcctgtgtttttctcttaagattcccattagattacattcagaaaagaagaaatttagagtttgatttgtctactaaatcatactgtctttccctggggcatatgtagtgttaatggaaagtaacatgaggagggacccatcatttctaaatagtgctattacaacagcacttaagaccattgtcttttgtttctggctgtagc

SEQ ID NO: 72537 - DNA, 1053 bp, Homo sapiens
tactatttatccccccaccagtggtcaaacttagatttagaactcgaccagttcagtaagtctagaataaaagaaacctgaaatgaaaagcaagagagggattttccccttcttcaagtgccaagccaataccatccatcccagggcttttcagatctgtgtcccagctgctgaatgagtaagaaagtgtgtttaaaaagagggaaggagaaaaaaagatggtgtgagagtgagatcttttccactccatctcagatagacagaggagagacatgtgcatgtattcgttgtgcttttgccagatacggagagaatcttttaggattgaacactccggtgttagaaaaatcagtcacagcaatctaactaatcaacttgtacctctggagaaggtagtgggatttggggtagggtaaaggagggatgggtggtaaaagggacttttaactgtgtgcagctttatagttcgaattgtttaattgagaaaatgtttgtgtattacttctgtcattaagggagagggggaaaatccaattttagatcagaagaaaggtcagggacagaaaatggcatagcgatgacatagttgtgaaaggttgcagtctattcaaagaatggcgaaaacatgaaaacatgcatgcagcaggagcagtgggatgcaggggaaggcagggctgcgggtgatgggaagcagcctgccaggcgccttgcatcccatcacaaggactggaccttatgtaggagtgggggaggaccaatcaaagttaaagtagaagtaggtgttctttttttatagactgagtctcactctgtcacacaggctggagtgcaatgtcctgatttcaggtcactgcaacctccgcctcccaggttcaagtgattctcctgcctcagcctcctgagtagctgggattacaggcacgcaccaccacgcccagctaatttttgtattttttagtagagatagggttttatcatgttgttcaggctagtctcgaacccctgacctcaggcgacccgcccaccttggcttcttgaagtgctgggattaca

SEQ ID NO: 72538 - DNA, 1050 bp, Homo sapiens
accagtcttgattgattaccgtggtgcatgaaaacaattttatttgtcctgggtagcacctgtgtgtagctcccagggaatactgttagtgttgtggttagaagtgcgtgtgtgtgtggtagtgatagaggttctgagatttttttgtgaataaaacatcagtattattattattattacagcagtgcatattaattccaaaaactgctgcataaaattactttcaggatgataaattaggaagggagccccagactattcaaagacagggtagactctgctgctacccagtcttgctgattatatttagggcaagtcatttaacctctctggtgcctagtggactcaactttaaaaattgtaggagtttttaacctctgagatgttagtgctgccatttcagcaatacctttttttttttggctgggaataactatctttggtaggtgataggctagtatactacacattaaacgttggcagtaatagcttaggggccatcactacatatggttagagaagcctgtgaaatggttaccactataaacaggcttcactacaatctttgattttaaagtgatttatgtcagtatccgaagaggtgttcaatctagtttcacttttatttagcagactggtagaattcaagtcaaatcaagtagatagcaggatagtacagtgagtaaggagtaaaccagttgcctttttcttcccctctctgctttctctcccctcatcccctccttactccttctgctcttccttcgctttcctaaagaaagggcagcctttattcattagtgtagtagataccaccataaaagactataggtgacaatcagtatatattttaaagatttaaaaactgaaagctttgtaaactctttctttaaattttagcttactttttcacttaaaaatgaaaatcttaaaactgttcctgtcatgaaaaattcctattacttgactaacttgtttctaaagtactttattaaatttctcaataattcgtttatttaaatgtaggtgcatactttgtcatttccaaaa

SEQ ID NO: 72539 - DNA, 2583 bp, Homo sapiens
tgaggctggatagatacagaaccttaagttctaacaagactgtctcgtagtaggcctttccctgatgggaaaaaataatgggcattctgtacatattttctgatagctctattttcttacatatcaaagcaaaattttacccacttctggtctgataatctgtaaggataaaactaagtttatttaatctgattttttttcattgtcatttccaagttgtgtttgtcacatatatttagtttgttttgtgtatttgtagaagaaatgtttaaattgtattaatttaaagacatcaggattgtaacaaagttaatagcaacttctgatcacaagatttaatataaattggaagtaacagctgatttgtatcacttcaccaacaaagaaacacatgtgtgttcttaatcctaatattcttccttataaatccccccagatctcactttccacttctaattagactcttaaaatactctgtttttgataaaactttgcaaatgtttagttatgaggaaatttgatgtgccttaacatactccaagtttggctttccttgagaagcagaacctgtcggcactcaccctagtgccttccaaaatgcctgttaagtctttacatgtgcttttaaaggagtctctccagtccatttttgcggcatcaaattcaaatgtaagttcaaagcatgcaaaatagaaaagagccagccaaacagtaattacaaaagtgttctttactgtataatttagggaaaatttatgtaatacactaaaacaatctagtttggaattatagttctatgtaatatatgtgatgttggcaggtttggggaacgctacgtcttaaagcattcacatttaagaagaaatactagttctgtaaatcagtatttagtaatcttattcatagttttaattatttgccaacttttgggtttttttttttacctttgtaattaaggtgattatagtaaggcctacttcattaaaaaatgtgtattaggaaaatagaactaaacttatcaaatggtgggtgaattttgaaatttttgaataggtggtatgaatagtgatcattcaacatgtattaggcaaaagctatgtgtaatgacaactgtacatgatactattagggatagatatgaaagagacgcaatttttgcctttaaaagatgatggtatagcaggataaacagccatgcccgaataactacactacatgttaaactgtgttaaatgccatgatgaactgtatctaatctcagttctagctctgaggtatgagtatgtacctttgtcaaatcacctaacttcttgaaccatattcatctggagaaggaggtgatttaatcagatgacttttaaagtcttacctagcttttaaaaaaaatactgtgattccttaaaattaagttagtgaaattcatcccaagtaataggggaaataatggtgttaaaatattgcatagtcagcttctgattaattataccagtgaacaggcttgttgatggaaataatggaaagccttactctaactgatcccatttcctggtgcttgtgaccagtactaagaatggaaatgcagctcaacaaccctgtccctaacggtggggtgacacatggaaagaaaaatctgcccagagaagcaaggtcacccctgacctcaggcagcagagcttgactataaccccattgaagaactgggtaacagtaatttgaagagaatggagctttcaaacttgctttatgtaagacttctaaaatggatgttttgtgggtttcttcccctagaattgagcacatttttcatcttactgaataagatggtaaattagactaattggttagatttgtaaaaatcatttacttagcatgattttttttttattattttacagctgacatgggctttgcccgattatttaattcacctttgaagcctttagcagatttggatccagtggttgttacattctggtaccgagcccctgaactacttcttggagcaaggcattataccaaagctattggtgagtagaactaattaaaattccatgagtttttaaaagtttctttaaaagacacacattcctatatatttttaaattaagtagtatagcaaattataaaagtaagagcagactgagtgtgatggctcatgcctgtaatccaagcactttgggaggcggaggcagctggatcacttgagtccagtagttttgagaccagcctgggcaaaatagtgagacgttgtctctacaaaaatttttaaaaattagccgggcatggtggtgtgcacctgtagtcccagctactcgggaggctgagctgggaggatcgcttgagcctggtaggcaaaggttgcaatgagtcatgatcgcaccactctactccagcctaggcgacggggagacactgtctcaaaaaatataaataaataaaaaataaaagtaagagcaaggcctaacccaacattctactacctagaaatactatcagtagcaataggggtatatcattccacatacttctctctgcatagaaagatatcaaaaatctttgtaattaaatgggatcatattatgc

SEQ ID NO: 72540 - DNA, 2555 bp, Homo sapiens
atagttcccacagttgtttatacttaagttgtgcatttaatgctcagctgctaggcctttcaccatcgcttgtccattactcaaacctgattctgcttcattctctttggttgcattatcatcaagtagtttttttgtgtgtgctttacctttcttcttttctttattttgtgtctttatggtttccttaacttgttctgtatcctccaggatggtattaaacccacttttcctttactgggtaactgcatcctgaggttttctattttggattggttggtctccaggcatattctaccacttcatcctgccttttcccttttttattcctctgggttagatctattgctttctggatttcatgatttcatttcttattttgctacagtatgttctcatgtaaattcctttggaactgtatcttagaggtaaattttctagttcttgtatttctgaaaaatgctggtcggtatcatacttgctagcttgccagggtttacaattctaggtacaaaagaattttcctctcagaacttggatgacacccctccattgccttctagtgtcaatattgctaatgaagtctcctgcctgtcttgttcccagtcattggtagatcacctgggttttttctttctagaaacaaaaaggatttctcatccttgtatttcacagtgatatgctgaccacttggtgggcacactcaatctgaagttcatatcttgtatctgtgggaaattctcttgtgtagtcctttgatttcctcctcaatgttttctgtttctctctttcctcaactcagtgtcgtcagatgttaaatttcttggattaatcctttatactacttttttctcatgtttttctgcctttgtcatatccatttctaaaaacctcttcttgttctctgattactttttcatagtatcttgtattttttaatagaaagaaaagcctactatctgtgaagacaatgataacattgctgatttgtttgtattttgcagtattcccagaataattatctgtgttttctttacagtcactcttttcattgtatgttttgatctctcccttccatgtagcaagcattcttcaactgtttggtgacccttgagtgtctctttgtatttaaaaatcaggttactaaaactgcttgagaactttgtataaatcatggggcttatagagtgagaactttagggtgatacagcagagagccaccgttgcctggggtaacctctaaatgccagaaggcgcaggtctttcctctgaagccaaagtcttcagggaagagtcctccaacttttggcccatgctgtatgtacctggcagccccagggtgatgatagagagtagggaggaggatcagctcctcctgttcaaatacagactttgtagctggtattcccaagaacaaaatcttcgcagcattgtaggggaaaagtctgcttcccactcaacaacagcactgtgtcctgagaccttctctgaactgtcttgtctgccttccatcttctaggtctccacatggccagtttcttcttctcattcagaccttagtgaaaatagtaccttttcagagagaacttcccggattacatagtctaaaatagcaccctacctccgccttcacaccttcttttaccttattgtcttcattgactcaaagggtatctaaactccactaaaacaggtgtacctcacctcactgttcaccgttgtaaaccagtgcctacatagtatgtagtgagaactcagttttctttgttggatacttgaatgaatcttgtctctgacagtctcctcctgttcttgttactgtgcagttacacttgtatgactttgctgtcaattaaatgtagattcaagaagggaaaaggagcaatgtttgtgatcttcccccatattaatcttcaatccaatatatcatttccaaaaatctttatgttctaatcttcacacatgctttaagatcacattttattttacagaaaaataagtcagttagatatgggaattctctatactatctttgtaacttttctataaatataaaattattaatacaatatttagttaagtcagttaaaaggaaaaataaggatgatttattctagtcctattttggaatacatgttattacctaaatacatatctgggtatcttctttgcaagtgtactctaaaggcatttaaggacatatataaactaatgtgatacacagagatttttttccactcagaaaatgaatgtttaaaagcagtgttacttttggtaaagcatattaacaaactatacaaataagaaagtgattgcctaatcttatttcctattcactgaacacctgagacttgaatttatttaaattgagtaaaaaatatactatcacagaaacttgtgactctggctcactgtttattatcttgttatttttcctgagaagcttatgtcttattggaaacattaagatttatataaccttttactcactaggatattctacagtctagcagttctaatgcagggagtgtgccacaaatctaaactaccagcac

SEQ ID NO: 72541 - DNA, 2355 bp, Homo sapiens
tgatagaagagcctttctagttgaacatacagataatttgctgaatacattccatttaatgaaggggttacatctgttacgaagctactaagaaggagcaaaagcatagggaaaaaaatctgatcagaacgcatcaaactcacatatgccccatctactacaaacagattgtagtgctgtgctggtttattccgttgtgcagaactgcaagctgagtcactaaaccaaagagaggaaataataggttagtaaacattgtaatcccaggaactaagtttaattcacttttgagtgttttgttttttatttttgtttgtctgatttactttggggaaaaggctaaaaaaagggatatcaatctctaattcagtgccactaaagtagtcctaaaagtcttactgaagtatggacttttaagctcaggtgtttgtcctcaaatagctgcatggccactaaatgtgaggcattctgctaagtgggaaatacacattaaaatagagaaaatgagaatttcttcccttttatcaaaacaagaagcttgctattactacacttgttgattcaaatattattgagcaaagtcttttctcctcccaaatttggtctgtatagcatgccaattcctactatttcctttgcctggttagctcagtagctacctataagcatcacacattttgagaagtagatgaaacttatatgtttttaatttggaaagccattttataaggagtttggcaggcaggtgaacactaaagagactttccatgaattgggcacaatctaaaaaaaaaaaaaaaacaaggtaggaaaaagaaacttatttacaataattagaaatttatctgcaataatagcctgatcagctgactcagagttaatgattaatgtatgggtcaggattttgaagaaaggaagaatggtaaaattgacaaaggtgagagagaatagcagttataaagacagaagagttactagatgggagggagttaagcaaggttcaataagttatttttcctgttgactggactttttctttaaaaagcagtgtagctttgcatacattttttctgtgaaatagggtcttgctatgttgtcaaggctggattcaaactcctgggctcaagcgatcctcccgcctcagcctcctgagtagctgggactacaggcatatgccagtatgctcagctaagagcagtgtagctttaattatagctaaactacttacctttcatcttcctttacatattttattttcttctttggaatttttaataactaaccagatgaattgttacagtgtttattgggtgtgctgtaagtagaattttaaacatgcaaagccatccatcatccctttttgtgatcctacttagctgcctatgtggccattgattatcaaaggttagatttatagggtatacccatataaaaagaataatcacaaaataattaattttcccatatacctttcgatgacaaaaacaaaataggttggcctatgtttcttgatgagacttttccatatgatggtattggctaggcttggttctctgatatgtaaatacgatgtcattttttaaaatcacttgctgcagtcagtgtgaatctttaagtaaataggtgattaacttgttactttgaaatgtaaatatgtgaaattttagattaaattaaatatctctattccagttttggaatttaggaattctcattttaggttttttcttatttcctgtttaagtgacagttattaacatatctgaacaatcagctttgataaaatagtaattttgatttgttccctttggttatttatatttgtcacaggtattggttaagtcagtcaaaaaccatgtgttgagggtctgctatatgcacaccattgtacttagtttaggatttgttaagagtagaaatgaaatattttcagctttaaattctaaattggcaaatagatcttacctctactaatagttcttttgagtacaaatttaatttgaatgaaagtaaatctgtatcttgtgaatgaaaggaatttactttgttgtgtacagagaaacccatttgcctggcttttgtcaataattcatttgaatttataaccctttttttttttttttttttttgagacggagtcttgctctgtcgcccaggcaagagtgcagtggcgcgatctcggctcactgcagcctctgcctcccgggttcaagcaattctcctgcctcagcctcctgagtagctgggactatagccgcgtgccgccatgcccagctaatttttgtatttttagtagagacaggatttaactatgttggccaggctggtcttgatttcctgacctcgtgatccgtc

SEQ ID NO: 72542 - DNA, 2704 bp, Homo sapiens
aatacttaaatttgcaaaatctgatactgcttatggcatcaagaaccactttggaaaaaaaactttgttaaagtagaaatgctgttaattcttaggcgttttgaggtcggacattgtctcttggtggaataccaccttactgattagtgctaacatgagagggtaattattagaccttgcaaattagcaagtaaataaaataaaaaatattttatcacaaaaatttacactgattatgttaggcgagtgcccaatttcaaatactgtttgggttttccgtttgtttttgtttagttttctttggttgtagttcccatgctccatatgcagctttactgtagttcacagaaaaggtatcacctggacattgaaaactcaccaaaatccagccagtacatttaattgggcttagagtgaaaccatttgggtggtatggaggtatacagaatgaaaaatcggggtggagggcatgggaatatatacttataataatgtttcatggtatttagtaattataattgcttaggaattaatatgagttattagggaaagaaagaaaaaaacactccccaagaaaataaaattgcattttcttttggaaagaaccactttattttgcacctttctttttcttttttccttgcctatttttctttctttttttttttctttttgttttaaagatatttgggctatagggtgtatatttgcagaactactaacgtcagaaccaatatttcactgtcgacaagaggacatcaaaactagtaatccttatcaccatgaccagctggacagaatattcaatgtaatgggatttcctgcaggtacacattattcgtttttgtttttgtttttaaatcactgttgtttgaacttagatgtcttcgttggagaggtatatatttttagctgatggaagctacttttacttgagtctttgttttttgacttgcatttatcaaagatccgtagaaacagcaaaatttgtagagtttacatattggcatggaaatatttatgggtttcctgaatttcaggactgtatttttgtttcatcttgttttacttttttgttttgttatttggtatttgaaatgataaaatatgttcaatatctgtattaaaaaggtacctttagctcttaccagtagaaactataaatgaattcagtagtaggaatttttttctggcagcacatataatactgccactatttggcattcaaatataaattttgaaccttatttctatttagggcactatacagaatcacattatattgaataatagcatttaagtcttctcttagaacagtcacaatgtgggtgagagtcatagtaccctatggtgagttagcctgctgttttgcaacagagagatggtttacatgtatcctatccctggtattagatctctccaactgtatctcaatccctagttatattacagaacggtaatcaccaaaaactgctcagaggtccagaataatgagaatttgtttaaaacacctaaattttggctagtcaagtacttagtagaaagtgtttcttattaggaatatttctcaggtcactataaactcaagactaatagagataatacctgggacttttaattctacattcccttgtaagggtgttaattatcagtaaatgcagaataactacacagatactgcctttctccaaaattggtcaccagtgtggagaagacttctgttgtgatgggaattttatttattcagtaaatatttattgagtacctgccatgtgccaggcactgtcttaagtaaaaagttattgatgatgtaacagacatgatttttgcccccttggagtttgcattgtactgctatatgtagaatgtttaaaaagtaggtatggttttgagtagagacagaagaattctgttttcttcctgcttctgaatgtgtccaccatttctgagcccacgggaaaggcatagcttctgtgagggagtagatgtggtgaagatgtctatcagtgactcttaatatgtggttcagaggttagggtggtttataaggaagcttggaaagcaggcagcagaggttagatttgatagctaaagaatgagaatccatcagttcttgagtactagagacatgctttatgttgcattttagaaagatttagtaagatggtggtaggtaaaaatctgttaaaaagagctaactgaaatcagaaaccagctgtagcagtgctgcagacagaaagtagagtgaagataaggatggagaaaaaagggcagatggaaatgttttataggaagtgtataagcaagggaaaactaaagattatcttaaaatttctagcatgagaaattgataaaacacagaaattggagcaaggaaaatagttaaggagaaaattccatttaggagtgtagtgtatgtttagtttacaatatgtgatgtctttggaggatagttaccaaatatttttacaagtaagttcaaagaaaagcaagcctctaaaggccatttaaaagctaaaggttttgcgaggccgcggtgggcggatcacctgaggttgggagtttgagaccagcctgaacaacatggagaaaccccgtctctaccaaaaatacaaaattagctgggcatggtggctacatgcctgtaatgtattacaggcatgggattacatgcctgtaatcccagctactctggaggctgagg

SEQ ID NO: 72543 - DNA, 1033 bp, Homo sapiens
ttgtatttcagctctttgaaagactgtttacaaagttcttaatttccaaaatacctcttataaccttaaatgttaacagtcattcagcgattatatgtgctatttgatttttctggaagaatgtgatagatgccatatttatcagtgtgtaatggaaaaatgatttaacctagaatctaattgaatccgtgcactaacaaggtaatttgtgatgaaattatatacagccattaccaactttgtttacaataaaatttccattgttacagcgtaataattaataatgttttttgttttagaaaaaggtttataacacatagaaggggagtttggggaagcaggttgtattttgcttggcttgaaattcttttaatccttattcctaagttcttaaatgagaattctttcaccttgaagaggttaacctttcctttattgcaaccaggccatttggcaaacatttcttctgttcttcctttgtttctcctttttcttcgctttctactgcttctccttctgtattttctacttactattatatcagttcacattttatatcatgtatttcatatcttaacagcaatttaaaaagtcattcttaacctgtcatattaccacacaatatattatccagataatggtttattataatgtacttacagtaggacccaaattagaggtctaagttagatccttcgaaattatggacttactgattctaataaaataatgatagtggcagaagattagaagtcatgacttaggggaattattattctccttgattccctgctactcattatagtctaggatgactctgcctaccatcaccactaaaactctagagatataccttccttgtagcttatgtgcttgtttttaccagggtgacccatcttaattggaggtaatcttgagtagtctcttaggaaagccctattataattccattaaaactgttgggtattttcaatagcaaattcaggcctttcctttcaaccctaaaaataaaattgtgctttctctgaaatat

SEQ ID NO: 72544 - DNA, 1553 bp, Homo sapiens
gtactgtacaaccacatcttcaaaatgtccagtagccaagttccaccacttttcacagattggggtagtggcttccaagttgtacctattttggagttagacttgaaaagaaagtgctagcacagtttgtgttgtggatttgctacttccatagtttacttgacatggttcagactgaccaatgcatttttttcagtgacagtctgtagcagttgaagctgtgaatgtgctaggggcaagcatttgtctttgtatgtggtgaattttttcagtgtaacaacattatctgaccaatagtacacacacagacacaaagtttaactggtacttgaaacatacagtatatgttaacgaaataaccaagactcgaaatgagattattttggtacacctttctttttagtgtcttatcagtgggctgattcattttctacattaatcagtgttttctgaccaagaatattgcttggatttttttgaaagtacaaaaagccacatagtttttccagaaaggtttcaaaactcccaaagattaacttccaacttataagtttgtttttattttcaatctatgacttgactggtattaaagctgctatttgatagtaattaaatatgttgtcattgatataaacctgtttggttcagcaaacaaactaaaatgattgtcatagacagtgttttatttttcctgttggtgttgctgatttgtgagcatgctttaagatgaaaaaagcatgaatgataacttccttaaaaaggtgcggcatccaattcaaatattttcgtcctgattttaaagctggttggtgtagtgctattaaaatttcgttcagttaattttccttttgaaaacttgttcgcacgttgtttagggtgcccttacttcagcaaaggagaaggagtaggagagccttagaatttttgaggaaaaaaaaacctataacatacaatgtactgtatcaaactattttacatgaatgacacaagtattctgaataaaaaataattgaacattgttaaaaacaaggtgttatgtaataaatttatttttcataaatcaaaacatggagtcagctgtcttttttatatgtacaaagggtttttgttttaattttaaaatatgccttaataagtagcctctgaagaaatctcttcacttttcatgaagaatatctatgtgtctgtctccataatagagtactgacttgagtcttagatatggatccttttttcctgctatactcggtaccataatgtaagatatgaaacacagacacctatctaattggaagatattggtgagccttcaatcgctggaatcattcctaatttattctgtgttgtactgagaaggatttgactgttgtatccctaataattaattttcctcctccagaaaatacagaagattaggaaaaaaaactaacttttttcttaaaaacccaactcaatgatataaaaacattctaaaacaaaatcactgaggaatctctgtccttataggcccgacagtacagtaatggtaatttctaggagctgaattcatgttt

SEQ ID NO: 72545 - DNA, 2732 bp, Homo sapiens
tagcataactagtctctaccccagtctgactggaacttgtgtgagcatcctggtggccacagtgaaaggaaatcatcctcagctctatgctgtcattttcaccatgcataaagaagataccagtttcttttccttaatatgtcccccatttcacacttggggctttgaattggttacattgaaaggtgtagtaggtgatgtgctcagtggcattcatgtggtacattgaacagtggttcttgtttggctgtttatcatgtccttaaataaagtgaaagtacaacaatcaaaaacaattctgtggaggatcaaactgacatggtttattatatattttctagttgtgagaataagcacacttcatatccctcaaacagtcattcaggaatataagtgatctcaggtggattttttggtgaaagatgtatagaagatagtttgaagttactgttacagatgcgcttggagtgccagtattttgtcaattaaaggtggctttagagaccgagagagatggttggttagttcaaaatcagtatcctgcatggcaagcttgttctagatcaggggttggtaaactacagcctgtgggccacatctggctctttgcctgattttgcaaggaaaattgtattggaatacagacgtgtttgttcttttatttgtctggggttgctttagtgctgcaaggcagagctgatataggggtaagtggtggcaacagaggctaacttacacagtacgacatatttgctatctggctctttacagtaaaaattcctgacccttgttttggagaacatattttctgccttttctgatggggctcacattgtagtaggtgagaaagctaataaacgacattaaaaaaaaaatatatatatatataatctcccttcacttgctttgctttctttactatgctttctttagtatacagcctatgtgtatgtgtgtgcgtgtatttatacgtgtatatatacgtgtgtgtgtatatatatataaagaaagcgaagcacgtgaagagagagaatatcagagactgccatttttgataaggtggtcagggaagcctatgtgagatgacatttgagcagagatacaaacgaaagtgaaggagtgaaccagctaggcaaatattttgggaatgaaccttatttggggagaaacagcaagtgcccccttgagataccgagtagcagcagggagggcagtgtgaatagggggttgggtagggggatgcgtagtgacagaggtattaaagggccagattgtgtagggccgtatagactgtggtgcactttggattttattctgagtgagatgaaaaaccattgcaaagttttgagcagggacatgataccatttaagttagattgtaagaggatcactaggactgctgtgtagaggatagacaggggacaaaggtagaaggtgggtgtctgtgtgctctgtgtgctaggtaggcattgcgaagtgctgtggctgttggatgaatcagtggttcctgccttgaggaggtcttagtagaatagcagaagaaagagatcactgtaatgcactgctgctgacagagaagcaaaggtgccctgggatggggtaggaggggtacctgatccaaaccaaaggtgacaccttgacctgagaatttagagggggctgatgaagactctgattgtatatcagagctctgagattcttggaaggactacttgcatgcaggaattttccccacctgttaaccacgtgagcaagtgctcatccagagatgagtggtttggtggcttttaggtcacatgccagtgccaacaattgcagtctggagcattgtgttagagtgatgttaaggtggtatctcagctcagcaggatacaccacaggaactgaagggtgaaatatttgccatctttgccagagagcagaaccaaagtaattttggtttgggaaagttagtaccataggactgtagaaaagtctcagtaaattgtctgtggaatgtattgtagagtattgctactttccccgtatgcctggcagtatgaattagttgcacaatgtacgtctcagtaattaagcaaaccggtctgctgtctggagttattggatatgacccaattaaactttggaggatgtctgtaaaaatgattttatttttgggacaggtgatagtaaagtattttggataattagttgaaaaaattgctgccgttttaaattagtgtagaagaggacattcacctttctgttttctataatggggtgtctagatcatctagagagaattttaattatcataatattggtttaaaaagaagtagggagagaaaataaaatcacaatcatagaggaaagtttttttttgtactttctctgcaactgatagaacaaaggatatagatgatttgaacaaaacaattaataaaattgcctcagtgtgtctagctgttgtacctaatggcagaatgcacattctttgtaagtagactggacagtatctatcagcttgttgggaaaagcaagtttgagtatattttagaagattgaattcgaacagagtgttctataaattaaactaaaatcaatagcaaaaggtagctagaaaaccttttctaagtatcccatgatcaaagaagatattacggtgagaattagaaaattttacaaaatatgttgattagaatcaatatgaaaatactgtatataaaaatttgtgaggtgcagctaaagtcata

SEQ ID NO: 72546 - DNA, 1136 bp, Homo sapiens
gtgcactggcacgatcttggctcgctgcatcctctgtctccagggttcaaacgattctcctgccttagcctcatgagtagctgggattacacatgcatgccaccgcgcctggctaatttttgtatttttagtagagacagggcttcgccatgttggtctcgaactcctgacctcgggtgattcacccgtcttggtctcccaaagtgctgggattacaggcgtcagccgctgcgcctggcctgccctgctcttcttttcatttctttttttttttttttttgagacggagtcttgctctgtcacccaggctggagtgcagtggctgatctcgactcacagcaacctctgcctcctgagttcaagcagttctcctgcctcagcctctggtgaagctgggattacaggtgcctgccaccaagcccggctaattttctgtattttttgtagagatggtaaaagctgatttctgtccacttacttgccttcctcctggtgtcaggctgctgctctgcatctagggacttcacaggtgcctgacgtgacataggggctctctcagctctcctgccctagcaccttgtgcactacccatgtgtatttgattaaggcccacaggaaagagttggcaagtggatgcagatttgctgtgttttggggctcctggagattctaatctatcatttcagctcacatggagacattaaaagtttgttaacagttcagctggtatcttcttacccttatctattggcagattctttgtctttccaccactttgccacagatgaaaacagctgtggattactactttgcctatgaaggccttcttgatatctgatacttacttcctgtaggtttctttgtgttctatccacattttctaaatcctggggcaaattgtctctgtgtaatgttatagaatggaggttacagtcatcccatgggatttgattcattgaggcaaagtggataaaatatttccaaaaggcatcatttctaagtggactggggagttcacaccttggctttgccacttagagctttgtagtagtattcagttactctctgaaagtactgctttgttaattggaggttaaaacacccacatctgtcatcctctttgggctccgaagatt

SEQ ID NO: 72547 - DNA, 1019 bp, Homo sapiens
ctggcattttatgcagaattcaagttattaacagaaaactctacaagagcaaatgaagctttagttaaataaacatgaggatttcaaatatcagaatatcaactgtttggaatatctacattcctgtaccctttcagtgagtaaattggccataattatctttatttgtagaaaacaaagaggtgctggttcagggatatgtgatatattggccactggcctcaagcatgagttttgtcatttggagacagatcagtgctgccacctaacctcaaagaatgaggatgtggcctgtcatctgcatacacaaatgcaaagatatcatcacttcctttttgccaagagtgggctgagtaaatttgccagattgtggtgattgtgcttgtctgccgacagggagcatgttttgcttttagttgtccagggataataactgccggttattaaatgcctctgctaccttgctgtgttctttgtccataagacttcatcctccccttcacattttaaggggaggtatggttagctttatttttataaaaggggagcttgagactcaaacagtactaactcttccaaggtccagagcttttcgatggtagttccggggtggaactcagatctctgacccccatacctctgatctttcccctttaccatgcagcctctgggcttcagaaaatgtttcctacaggattatattggatgccactgattaaatgattactgctacttaattaattggagatagaatttgatgctagaaatgtttttggcaataatgagttacttaggtgactgaacttttacatttatttctaggaggtcattttttccttgtttttgttcgtttgtatcttctctcataaattgtagtattcttgtggcatgatggtgggccatttagttccctgattactttagatatagtgagttaggttttgactagaggctcaggagctttgaatgtagacatgttgtaaaaatggtactgctgtgtttgtcagttttgtttgaac

SEQ ID NO: 72548 - DNA, 1020 bp, Homo sapiens
tttcttgcgtctaccttgtattaaaattatctgcatttatttgttaccctcacaagactgagtaccttcacaaacaggcattttcttattcatttttatgtgttcagtgtttaaagaggggctgacttctacaagatgcttggtacagtcttgctgagtgaatggatgcatgttcactaaaattttcttgtatgtattcttcccaagtagaccataattctgagtaggaaaccatgtcatgcttcttgttacctcatagctctagcacattggtatacaacattgatcagtttgctctgtagcattgctgttaatgtccagtgtcctggaaacaccttctagggcgtatttggcagttattaaatctgttactattttatccctgtagctactattagaatatttataaaatgatctccaagacttttattgaatttgaatattgttatgggaaaaatcgatacaaatgctcttattagctacagttcttatgtgaatgattactattatttgattcagtctgtaggcagtaacaaaacctaaaatatatgtgttgttgagtaaatgaattgagcagttcagttgaatacacttagacttgactttttctttttctgcccttcagctattatttactgtgagtccttgaagttaatttcagaggtttttcaggatagggggttggaattatacaggatttcacacaccttattagctccttacttaaaataattaaaaaagaactagttcagggattagagctcccttgaaattgttgaaatgtgaaatttgaatttaagactttcttgaagacttgaatgcattttgcctactggtaattaattttttttcttttctttgtagttttagttttgattgctgttaactactactgataactgagccaaagtggtgatgctacttgaggggaatttctgcaacccatagtcaacgattacatggtaagagtgtgtgccttttacccttaaagccatttaatttctgtaacatagtttagaa

SEQ ID NO: 72549 - DNA, 1018 bp, Homo sapiens
gtctccttggaggctgggtatatattctagtcttatgcacacagcttcctggcagacatcaaatggaatttgacttaccagatgtcgtactgaatcatggtctgcagagatgcggatggatcacatccttggctggggaagtggggtggatacaaatatctgggtcaactcagtggttaaccaaaggttagtcatgttataaaaagtcatgtatatcaaaaatacaaaacagagtaagatagggggtctgaagcttatgcatgcaatcagcaacaaggcagtgtcaggagttgaaggaccagacaaaaccatctgtttaataagataataaaatctgatataaaaggaaccttggaaatgtaaaccacctccttcctttttggtcagagctgactcttaatgacaaatgatcaggtgcttagagggttaagaatggggagggacctgctgggatagagggaaagagaatgaatagaagcatcatattagaagtcaaggattacttgaataccaaagcagacaactttcccctccttggctgcctttttatcctggtaagacacagaaatgaagtagccttggcttactggcatatttataattgggacctgtaggaagcgtttacaatggggatgtggtgggcagagcaccagtggaagtgagagaccgagattctagtgtctactccaggatgtaggagattttgggtctctttgtcttaatctttgattgtaaaataaagttatgctagatctccaaggttccatttatcttaaaattttttttattaagtagctgattttgtctggctgatcaaaacagggaagaaaaatagttcctggtcaaagcatctcggaggttcctgggttaataatgtgcatcagaataaatttttatgcacaataaaggactataaaacagatgtaggttcaaatattaaatgtattcttgaatcccacatgttctgagtatctagttaaatgaacaccatggtctaaaaggacttagaaataaaata

SEQ ID NO: 72550 - DNA, 1709 bp, Homo sapiens
ccccgccctgctttggctcgccctccatgggctgcacccactgtccaaccagtcccaatgagaggaaccaggtacctcagttggaaatgcagaaatcacccatcttctgcgtcgatcatgctgggagctgcactgcagaccagagctgttcctattcggccatcttggaacagaacttatttttattttttaccaccaatatctctgctgggtcatacagccttagcagccaggctgtttgcaccacagcctagacctgctgaagggtcctttcttgccttgagccccactcaaaactggcagctgccgtgtcatgcagtctgtagaccagagccatatcacaggtgtgttgcccccagaacccaacctaatcagcactgggcttcctcagcattgggggatgcaagatataacaaattgtcttttccttaggaggagatacccagcatgcctctgagcactgggtccctcagaacttcaccgcagttgccagaccctgaatcttcacagggcttatctgccaccctctggagcatgtgtgtcttaccaagggctcctgtgtgctggccaccctgtgcttagtctgtccagtcagcatgacggtgttgctctctttcctctcttaggcccagcactttcacagctaggttgttgctggaattcgtattttgttatcaacttagcatccagaaagaagagttgcatgtaatgcctgcagggggagggtacctgctgccctgtaggggagaggcctctgcagcatattccagctcagccaagtgcaagcccagagagtcccaattgagggacttgcaggtaggttgtttagactcaacaatatcataggcattcatctagaattccccatcccagttttcagaatgctgggttttctctcttagggcccagacctgcatacttcacttgccttggctgagatttaaacatttccagctcttactctcacaactggaccttggaaatgggaaacccacagcttttcattctgtctgcccatccaattcagatggtggcgaagactgctttgtacccactaggaaggccctgttgccctcacatttagctgttaactgcttgttaactgcagttcagtatcccgttatccttatgcagggcattagtacaattttagcactgactagccaactccgctgcttttctggaatttttccactgaatctgcattattgccttggacatgaaaggtatcccttcatttggacattttccaggtcaccgtcactgtaatctttagcaatcgagccatgacctgtgccagggactaccctcctatcaggatggcatcctcaactgcagagtggtctgtgagcatgtcccagatcccccatctcaccacctgctttctcagatcattctcagggcacttgggtttgtctgggtctgagcaacagacaccaaggtgggatcacagctataggatttgattaaggatatcacctatgtgaaagaaaagggggtagaaactggggaggctgagagagccatcaaaccacagtgcaaacctgacccttgcagtggggaggagagggggttgggtgttagcgagctttcctagtctgccatgaggtctaagggagattcagcagagccgatgaggggttcttgtctttaattcacctttgtcagcttttctcggttatttcatcctgatttcttgctgcagacta

SEQ ID NO: 72551 - DNA, 1055 bp, Homo sapiens
cacagaattcatggactcagtcccaaattcaggcagctcatagttcatctgggaagaagacaactgtgagtcctgcctctgccaggcacagagacccctacagtttgcttgggatggttaatggggaaatgaatgaagtgccgacatgttgtcccttccaaatccctctcagagctccctgttgctctaaaatagagtgtatttatagaaaatgtgaggtatagtgaggtcaacagattaggagacaattgccatagaaaagatagcttgttacagttcccaagaggagggggtcacagcacaccacgcagggccacataggaagcacagggtccttgaggaggcagagcgggacggggagctgtgggccggagtcttttttgtggtttctgtgggaaggagtggacaaaggggaagcagagtcaggattggcgggtttgaataatttcagtgggctctcagcttgggggctgtttctacttgtctagtagtttggccatggggtgatgtgcaggtgggtagtggctaggagtgtgagagccacatcgaggaggtgataggtgtgataggtgtgtgggctctggattggttggtttgcattttgaagagggccctcttgggtgagctgttttccatctattggaattagtaaccttgggaggatggcaccaagctgtccacccccatgatccaaaagtttcccactgggccccactttcaatacctgagatcacatttcaacatgagatttggagagaacaaacatccaaactatatccctaatcttgtcaaaatgaaaatatattccagtcattggattttctagtattgtatgaagatgaggctggttgtatgattaggaggtttgaaactctataaactccttaagtaggaagttaagattttatttatcatctctttttttttctttttttttttttaagacagtctcactctgtcacccaggctggagtgcagtgccacgattttggctcactgcaatctctgcctcctgggttcaagggattctcctgcctcctcctcctgagtagctg

SEQ ID NO: 72552 - DNA, 1053 bp, Homo sapiens
aaagccaaacaatagatttgctgattttaacctactaaaagttaaaatgcagatactgatttctgcattgaggtgaacagatcagctggttattttatgtatatggtaccacgtatatattggcatgcatagatgtatggcaaatgcaagctaggaagaaaaggctgcttcttattctcattttgaatattaatattaaatatctgaagaatattttataagactcaaatatgcatgaaaatgctttttccttcaaagctttttgaagttgcactattttcccccaaacttttacatttattttctgatcttgttttctcacttcatcctgctccttttcagtttaggtggtttatgtggcatttttggtgacaggttttcacagttaaatttttcagaaactctgttaataactagaaaatcttccatgaaatgtcccatattggtagcctcaagcgaagggcaaatttttttttaactcaactacttttatttatcttgaagaaacgctgcaggtaagtattggtttctttaatagagttgtactgtattgttacggatatatttttaataatatctataatcattagctaaggcaaaagtatgtaaagaaattacataaaatgttttttaaaataaaattttcctggaatctaagctcttatgattgacttttggtagtggtaattgataaaaatatacaaattcacataattacatgaagactgcttgtaaattattgaagggtaaaattgtttttgcgtgtatttatttttgtaggaatgcttttagtctcttgtttttatggctgaaatgcctgttggcacaaagtgtaagtgatgaaagccgacataaactgtcagagttttaataatcaatctgtatctcatgctgtaataatcggcggagtgttgtgttagttgtgtttatggtgtttgcttggccacagtctcctgtaagtgaatctgcccacacagtatgccttgttctacatggcccttgtggtaaatagaatagtaatagcccctccggatatgtccatgtccttatcct

SEQ ID NO: 72553 - DNA, 1871 bp, Homo sapiens
gccctttgcttgttcgcttggcttgccagcagaatttcaacaaaatcccttgtcaacaaaacttcacaaagtgcctgactcaaggactgagagcagccctctggaagaatgccctaaagatgatacacggggtagagcgcaggttctaaatcactgcattttccaaatacagaagataatgtctaaggattttgcttttatcatctgtaaccagatgtatcctcacattttactctattgtaacttgtattaggttggtgcaaaagtatctaatgttacttctaaacacatttgatgtacctgctagacacaggcagggccgccatcacttatatataaactgtgggccaaaatactactttaaaatagtataacaactcttgagaagcctctcccgggttacattcctcagtaagacttacaaataaagctaactttaattcttcaaaagcctgatttttctttagttaacagaggcatttatctcaacctgatgtatttggacatgagttcatgtggtactaataagtccagaagtggaacctttgtcaacaaagaatgaataaattgcatttacctcaatgtgctccataattcagaattagtttagctattaatggacttgctattgaaagagtgagtagaattcagcttttcaaatcatttgctgtttgcaaaactgaagattgtaattataacactattcttattcatcagaaaatatagctctttccatttttttctcttcagacacttgtcagctttcagcagctggcaaaatattaattatgcaagtctctaaattttatgtccctttataaattgagaacttctgagtggaaatgtagtatcagttgcatgtttttcaaatagggttaggcatcggacctagaagcaaatgttgcttgtccttttctgcttatgcagcatcgagctgagagtacatgatgttgttctcaacaatagttggtgtgctttgagagtattgctgtcacttttgcaagaggctattgtgtatacactcccatagtcttggtgtatatgctgtccctattaattagttttctgtacagccgaaggggatgggatgggagcttttaaagttggactggagtatgtgtgtatatataaatttattttaaactatgaatggtcaagcagaaacacaataattggtttcattttgtgactatgtcagacattcagaaataaagaactgatagacttgaatatgaagcatttggaacgtggtgctcatctacaaaacacccagcatttcaccaaatggattctataaaacagtagttctgaaagatgttattaggcgtttccaggcccagtcactatgagaacatgatatgttagatgcttctcttgcagattgccagtgcacattagcttattaatgactttaagacaccccaaggcatagaaacatgtttaatccttctagctcctcattgcccagcctgccttgagcaggaagcatttgttggctttgtgcttgttaacaagaaacactggcatagatcatgtgtttttcattcagctgatagttgttgagcactggctgagcacaagcagtgcagaggtgaaaggcagaactccaactctcctagagcttagatgaatgaaggcaagattagagttccctgacgagtcctgtgatccaggtcagcttagggcattgtggagcacagagggggtcaaatgctcttacagagcccagtctacatcctgagttagccaggactcagttcttatgtttttgttcacttattccgaaatcttttctgagtacctactataagccaggcatgctctagacattggagactgatatagcagtacacagagctaaggggaatcct

SEQ ID NO: 72554 - DNA, 1106 bp, Homo sapiens
acaaataaaatatctaatgtttctgattgtgaatgagataaaatcccagatttaaaggccaacatgataattgaattatcttgaggaataagtgaaagtttggttcctgagattgtatttacacttaaagcgtgaaaaatgagaacttaagttgcagttagtgggaagcaacttgagcgatagctcatgtagcaataaagattctatactgtctgggatattttaaaattctacaacattgagtcagtttcagatttatatgagtatctctaataaacttcaaaagttctaaaggccttggactgtgacactttattttcatactcgtttgcacaaaatcccacatgttgacaggaataagcactggtgaggatgtgtgagggccgcttcatcagctccctaacagatggccttctccattcattttattctacaggcaaacatgctgaagacatatttggtgagttgtttaatgaggctaacaacttctacatcagagcaaattctcttcaagacagaattgatcgccttgctgtcaaagtcacccagctggattcaacagtggaagagggtaggtaattgcctgaaagcagtgagctagaagtgatgttgacaagatggtagtaattaattgcagtgtaattactgctttttccttgggatggcatgctgatatttcatcttgtctttcctagaagaatagcgagggggaaaaacctacaactttgtgttaattcacgatgaaaagattcatatgtggtctacctcataactctatactcttttttaaaaaattacaaatatagtatttgttttaaaggcttctttgaatacagtcagtattagaagccccaatttaggttactgacagttattttaaaaatagtttcttacctaaaacttacagagccactctagagatatggtccaactgagacagtgttacacataccttgtgtgacacaagcacctggtgttcttaggattgatgcctgtaaaatcctggtgattctgctgatttaaaaattttgttaaccttctcagaaatagcatttaccgaaagcctttaggctgcaggctttaaaataatgttaatgtcgacaagc

SEQ ID NO: 72555 - DNA, 1066 bp, Homo sapiens
catagtgatagctattatctgtgaaaggaaaggaatgcacatgctcttaaacatggtttttaaatggacaataaaaaatattatttggttgttctaggaggtgtttttaattgtgagtcaaatggtatttacttctaaacagttaaaaatatttctatataactcaacttgggggattttctctaaatagtctcactacaggatatcaacatgaaaaaagctttcaaaagttccacagtccaagaccagcaagtggtttcaaagaacagcattcctaatcctgttgctgatatttacaaccagagtgataagccaccgcctctgaacatcctgacaccatacaggtatagcttcatgagtcccagagcctctccttgagatgaggggagagctgggcagagctgggagcaagctgatgcattgtgtgggaatgtccttgatggttcatctgggttaaaatcagaattgcttcaaactttgaaaataatgattgaattatatacaatgaaactactcattggtacataattattaaagttacagtatttcagcatattgatacgtttaacagtagaaatgtgagttctgattttaacttttagatgtagctaccttaagtagaagtgagtaagttgcataacagtattgtgtgtggttatgttgttgtttttagattcgaagtcaattaggaactgcataattcatttataatgcagcaaaatacctgtttcagcactgcagagacatttgatatttaattcagaaaaaaatgtattctgtagtgttaggggttttgaagagtgaaaatatagtcagcaaattaaccttctgttactggaaaatggtaggacacgttatcaggacgagacttccaagaaaaacaatggaaaataaatagtgcaaaaaaataatatgaagagactaactaaaaatgctctttctaaacacccctcctgccttctcccagctcagcactttcttcccatacctgctgtcacctcttgtcccatatccctctttcacacactgtctctccatcccttgtggtatgtcctgtcctctcccc

SEQ ID NO: 72556 - DNA, 1250 bp, Homo sapiens
ttttcttccctgacttacaatacattgatttgtagagatgacaagaaggatgggctgaagttctatactgatccttcctatttctttgacctctggaaagaaaaaatgctacaggacacagaagacaaaaggaaagagaaaaggcgtcaaaaggtaaataatttcagtatgggaaatgtgcatatcagtgttcaaaggagattcttgtttagaaatagtaaattatttaaatggttgagatattggatatagtgctgaagtttttttagaggttgcatttctcacaaaagatcctgacaattcagtcaaacacagtaatactatcttcaataaatactgatatgttctccagcacttgctttgctttaacaaaagtagttcctaaactttgttttgttaccatgttttagtaactcctctcctgcgttctcaaatttttgtaaagcagtcagtattccatatcagatacaatgatcatgcagcacaatgatgtgcttttgtcttcttaacatttttaattgtttggttgccttctagctgtaattaaaatcttgggaagatgttcacatgggattgagaagcatatgtgatttgcacgttcagcggataggatttactgaaaatgagcctccctttaaggggtaggggtaggaagagaattgcaagtttgaaggttgagaaatatctgcatgcattacaagcagtcttcaaaggagaagcccactctactcaggttaagggatttgtgttttgaaaattgttcgttttgggcccagaaattagacttaggccactgagaggaataattctctaagggcaagtatttattaatatttttatatgtcagctgtatttaaaaatgaccatccagtttgctttacagattagagcgctttatttaggagaaatgcttagcattttgtgagttgatagccttagggttttgaggcattgaggtgtgttggcccagtaggagtgacagtttggtctggaggagaatttgaaaatcgaaaacagcattaaagggaagagaacatgagaacagtttgcagactgtgctgttgtaagacaccatggctggttccgggaaagaggatgcaaaggacttggtcacacacagtcttcttgtgctcatggctttgggagatttaattgggatatatcttggaaaagttgctaggttttgcagaatattcaagtgaagaaaaaagaaagataccaatcttttgagtggaaaaggaacaaatatt

SEQ ID NO: 72557 - DNA, 3899 bp, Homo sapiens
acacagtctgtcctctcctcttggcaggcacctgacccatactcctctgcagaattgatgccactgtcaatacactttcaatactctcagtcattccaggatgcctccctgacttccagactagacacacatacacacacacacacacacacacacacacacacacacacacacgtatatatttaaacataaaaatatatttgtgaaaataaatacatttatttttatggtacatttataatagtacctttatttgtgtcctcttgtggactgcaggctccatgagcacagatgccatgtctgtgtgtgtgtgtgtgtgtgtgtttgccatttgtgttgtcagtgcctggcgcagtacctcgggcatagcactagaagttcatgcttgctgcctggctgtggatttgatcatttagccagcatgtattgagtgtgtattctgtgtaaaaacagtatgttgagataccataagacaagagggaaacgtaggaaataaagacacatgattctcatccttaaagatcataaaattttgtataggaggcaggaaaaacttagaggcacacatagaaataacttctcacgtttcaagaagcacctgtttaagaactaagtatttgttgaatgaaacattttctggccaagtagggctagaggaagaatggtgctttttatgagcaggtaagtttttatcttgcttaattttgtgttaaactatttacaggattcacttattccgtaatcttttagaaattgggaacagaatgttttgaattattttctttgaaagataattgtacgttaagaagtcagtcaaaattgtgtggtggcgggaaataatttctctttatggtgtttccaggttgttcacccatgtaatatagatctgaaagaccttgtttaggtttaaaacaagttacaagcatattcaagtgaaagtttttttactttaatgaaaacgatggtaagcaactcttaacagttgtagcagggtaactttttgttgattctgttttgttggttctgttgggtaagaggagtgcactgctttagagtttctgtaacattagggtaatcgaaatgcgaatgtgtcttgtctgttcatcaggcatgggccttgtgcattataactgcatttaaccagctgttttcctttcccttctgtcttggcatgctctctttcctttcctggacatcaggagcaaaagcgtatagatggcaccacccgtgaggtgaaaaaggttagaaaagccagaaacaggcgccaggagtggaatatgatggcatatgacaaagagcttagacccgacaacaggttgtctcagagtgtgtaccatggagcgtcttccgagggatccctgtccccagatactaggtgtgtgtgtgtcactgctccctcagccctgatgcttgggcaactgggtactacctggttttattatcatttgaaatgcatcaatagcttcggggtttatatggcccttgatgtcttaagattttccttaaaaattgtttatctgtattttgattttgaaataatacttgaagacagtgttattttacattgggttcctttgattttagaaaatctctctgacttaaaatgtattgttgagttcatctagatgtagtgttttaacactgattctgaatttggggtaactgcttatgacttaagtttttactttaataatcatttaattctttctcttagcatggaatgttgaatttcctttgccacttggtatctaaaaatgattggcaggtggtaaagtaactaaggagtaccttcattgttcctttagtaaccctttgaaaaaatgatgaacaaaagagagatttacttcttatttcagataacttatatattctgatttcaggagaagaattctattggcgtttacttaaaaatttattagcagttaagtaaaaatatttcttgcaggcgtgaatgatgtggtcattaagtcacacttgtcaccaaaggcattcattgaacaacaggaaatgactagtcaattttaacgtttgattcagttttctatttctgcttttgtaaagttgtagtcttccatttgcataaactctcatcggcatttaaaaatttgaatagagaattcttacaatatgtgatcaagaatgtttcaaaacaacagcaacctggactttgggttgtatctgtgccctttttttctacctttgtaaaactcagtgtttagcacaaactcttaacgtattacgtgccttcaatgttcccaccccagaaggtctataagtcattgggaggatgtgaggcaagttctggtaatttttctgtacaaacttctatttgttaaatattagagaattattggagctttaactgagttttagcctcatttgaattttagtgtgagtttatttctatagaaagtaggaattataacacagttctgctcatagttctttgggtggggaggaatgtatgaacttaatagctcccatgatgtcaatctgcttttttgttttttttctaaataatttagctatgattgtttactcgtgcaaaacgtatactttgtttttatcctatatagacttttcaaaaatagatgcagatgggaaaatgatggatttttaaaaatctctcagttgaatgatactccttctagcatctgagattattccatgttggatataaaatggatggttattcagatatagtctgcctttgtatttatgttgcttacatacatctgcgtttctcttaattttcaaaaaataagtctgattgttttatttcttcagaattccttttgttgtctcctactatttcccatggcttcttactatttgcatacattatttactatcagataaatagattataactcatcattgtattggattataacccttaatttagaaatttttatttttttttactacagtgtgtcacttttttattataaaataagacatgcttattatatctggaagttacaggaaaaaattaaaatgaaatatgatctatagtttcaccatgcagagaaaccgttgtatgcattttagtgtatttctctttagtctttttctatacatgtgtttcttttttcttttacaaaattggagtcatgccatgttttctttcttttgacttttagaaattatatcccatgttttaggtattatttcgcaacatgatttttaatgattgtatccgctcatctgagtgcatccaagatactgagggaaatttaaataccaggtttcatggtgtgtgtatatgctattatataagtaatataccgtaacccatcttacatttttgctctctctctagattgttaggaatggcttgttcctgagaataaatttaagatgagcgctgggaagtgcttgcctgctgtatgaccagctctctgtcactgccactcagggagtcgcacacctccatgcccaattgtccttgttttttctcatccagttctgggccctggtgcagatctctggctgcccgcctgtctacccaaaaaaccctgggggatatatcgacctctcacactgagtctctgctgctgtgcctacttcctcccgtgtggtgtcgcctctggccctcccggccctcctcctcccatgtcagcgttgtctccagccctcccagccctcttcctcctcctcccgtgtcggtgtcatctccggccctcccggccctcctcctcccatcgtccccggccctcccagtcctcttcctcccgtgtcagtgtcgcctctggccctcccagtcctctcttctgtaataggtgatcactgaccatcatgaggcctcgggatctccactcacctccaccttggccgtgcgtctgcagctggtttctgcctccccactgggagtggggctcatctccaacagctgcctg

SEQ ID NO: 72558 - DNA, 1827 bp, Homo sapiens
gaactctgtttcctttaaaaggttgcactgtaagccagtgactcgtagtcatgcgcagagtcaagcacacatcatcagtgtctccaagggttataggaatttacatttttaaaatactctaaatctaaatacaggtcaggtccttcccccattaaatatatttttaagtcatttgctagcagctcacctagttcaaaagacataatcagaagtgcaccataatccagaattcatactgcaattagggaagaaaataatgagtagttattagttgttacacttcaattaaggaaggaaaaaggaaaagaagctgtctcttctcatttggaaggcttttctgtgccacatggtgccccagttaagaaaagctaccaactggaatcccaaagatggaaatgcagcgtgcatcttccctgctccctcagcacccccaatgtgtgtttggtatttccttcagagagagaaacacaagctgaaccctaacagaaaccagcaagtaaatgtgagaaaagtcagaacaagaaaagaagagtgggagagaaggaaaatgggcattgagtttatgagtgacgcaaagaaactggagcaggcagggagcgccaaagaggacagagtgcccagcgggtttgttgttttgctttctttgggttcccagactcagactgcccctgcttctgccgccatgagaggatgtacagcccctcctggccacatgtcctgtaacctgagccaggagcgtgtgactgtcttactaacgcccacggcactgccgggctgccacacttgggtccttcctctcctcctgagggcttagcaggaatcccgtccctgcaccccatgtctcagctctgctccactaatccaagatccctttcctttcggagtttcacacccagtttgtgtgcaaagaaaactatggaaagaaggcctttccatagtgcaccgcattgctttctgccctttttgttaagtacatttcttctgtttaagaaaaatatgattcactctactgcattctcgatttcttttcctgttcttactgttaatatttatccagttaacctgccattttatattttctaattatatgctgtcagtttcattgccactgaaatcttctgtcttatatcctgtttctaaatggaatggtttctttcatagccttcttagagaaaacgtatgctgaaatactgtgaaaaggaggctctgctgtttcctgcttgccggtctgtctgacttattcacttcaaagctgtgaatctgaatccatgtaacactggggcttgctgccgacttataataattatgttgttgcttggaatctctcacggggctatacctagttgatagtaaagcaaattaatgtctgatttttgtgtattagcaatgttattattcaaatacatccatgtgcctgttagccgacaatttttaaattaatttaaatttctcccacctcttgttttcaaatgccaggtcacatgcatcggacgttacggattactcttacccggctactcccaaccattctctgcacccccagcctgtgaccccttcctatgcagctggtgacgtgccaccacacgggcctgcaagccaggctgcggagcatgagtaccggcccccatctgcctcggcgaggcacatggccctcaacagacctcagcagccgccccccccgcctccccctcaggccccagaggggtcccaggcctctgcaccgatggctccagcagactacgggtaactcagcatgccttgtaccctaatccctcctggccttgcatttgaatcttgctctatgtggtaggagaattttaactccgg

SEQ ID NO: 72559 - DNA, 1089 bp, Homo sapiens
ggccaaggcagttggattgcttgagcccaggagtttgagagcagcctgggcaacatggcaaaactctatccctacaaaaaatgcaaaaaaaaattagctgagcatgttggcctgagcctgtagtcccagctactcaggaggctgaggtgggaggattgcttgagtgtgggaggtcaaggctgcagtgagccgtggtcacgcccctgcactccagcctaggcgacagagcgagacccgtctcaaaaaaaaaaaaagaattgaaattaggaagtttttacttaccttgaaaccagaaacccaataactgaagtgatcgattaattaattggatctcttctctgcattctgctctaaggggaaaagtataaatgaaagaaagtgagctcatattaatgatttctttaaaaaaaaaaaagagtttgtgctggacttgtcatatttgcttgatgtcctaagccagtggtttttcagaatctataatattcaacagcataacccttttgtcagatgaaagtcccgcgttgaccccctgaccacaaaacacatggaaacagagcatctcaggtggaattgggtggggagtctgccctcgcctgtcttgggctgcccagagagcccctgggaacctccagcccacaccatggattcttaaccaggtcccaacccaggttggtcgagggtccctgacatgttatgggaatatccaagagcttctcgcctgtggggagctgcacagacttggtcacagtttagtcatctcatctggaagtgaccaagcaaggagcctggctgcagcccgccagctcagcatcagggatgtccttcagaggagctgtgatgctgctgcctctgcgtttttcttgtgtgcccatgaaccaggcccacagtgtggcccacgcacccttctaaagaccccagggtcctctgtgtacctggacatcattgacacacttttattttgtcaagataaaaaagtcctagaggtatattagctcatgaatatcaagttcggggtcattgtaggacggtgttggatttgccttttttttttttaacaccttataagccctgtctaccaagagtagatac

SEQ ID NO: 72560 - DNA, 1777 bp, Homo sapiens
tgacacctgtgtcctgagtgagccgcaggagttcttagctcctcagcgagcaacagagagcactttagatggcacctttcaccacttggtcagaattttaaaagcttaggtttaggtgaaagtagatattgacagctattcacctttcacggtgctggggccagattagggatcactcccgtgaggagggccttcaccctgttctagaagcacatggttgtcctcctgttgttggcacattaaatgataaaaagcacctcatgagattcccttgatcagccctgcagctgtagtacagtgctgtgccctcacctccacccttcctgttgttcccacgtgggcaataccagggacccatggggaaactcaagaatgacagcttctatattttgtaattctggatgaaagataactgtgttgaacaaacaggtgctccaggctttgattatagatacgacttcaaaaatatgctaagacgcttgacttattaaggactttaacctactcaacagtatttcatatccattgtggttagttactcagttatgttgagaagaatctggagctaaaagcagagatgtttgaggtgacggtaggaatgtgagcaggatggtgatgggggtttttgttaaaatgcatctgagcaagtcagccagccccgaagtcccctcagtgtgtgtgtctcgagtggctacctgttgggcttgtgggcagtgattgtacagagcctgtccattgggtgcagtcatgtagatctgaagccctgaaaagcctcatgtctgcatcccctttccaaggctgcttccctggtgtgtctgttctctcctctgtcccaggtgctgggagcgtcctcttcagcgtcttttcctagagctggtcaccactaggctgtcactataaattccttgaatataagtaacagttattaatgaacttctaaatttctaatttctctctctctctcttttttttttttttgttgttgttaaaaagggcctactacattggcgctattcttaggacttctgcaacttttaaagtcttacttgtctttcttgttgcttttgtattaggagttccccgtgtgggtctagaactcccctttggtaatgcttctttgtttttttatggcccttctgttctcaggatggagagaacacagaagctactatccatgtcaggatttattctatttatatcttattacaataaaattagtggcactttattcataaatattcatgagcctgttaattgttagttgtcttcctgtagctgaatcaacaagttattttcaactcaattttatgacttgcgaaaaagcttttgccctgttgtgtaccataacatttaaaagaatggaaaatgactgaaatccaatttagattatttttagagtatttttccagcaaattcaatttattctgaaatttaaatccagatcttttctaatatggtattacaatgaaaagaataaagagaagatttgaattttcagtttcattttcaaaaactatttaccaaaacaaatggagaagaaacatccaaaagcacatttcatttctccaaactttgtgttttaaattatagttataaattgtaaggtaattttaaattgtccctcgtattatttctccacgtctgttttagtttaatgtctcctaagcttttctctcatagcgtagacctagggaagggatgggaagattgcccagtccccgatggctgcgcacacaggaggcggcggagcacaaggcaagtgagtttgcactgtcag

SEQ ID NO: 72561 - DNA, 1050 bp, Homo sapiens
tgttgggattacaggcgtgagccaccgcgcctggccttccctctaccactcttgagcaccccgtgcatttagccttattataagagacgtgtgtttgaaaaatacagattccttaaccaaggactaacgccattccatctgttttggagccatattgagtgctgtgtcaaattatgtggtgtgacaatgatgggtagggtggggtcatattaagatgttcagaatgttgttttgtcagtataaaaataattgatagaaatgtgcaaaactgggcattgctgggctattaaaactgaccattgtctatctgttcattggatatcgtaaagtttgataattcaaggacatggtggatatcttttatgaaattttgttttcatttttatttttaataggatgaaagttaaaaaactgcccatgattctagctctacacctgaagagatttaaatatatggatcaacttcatcgatatacaaaactctcttaccgggtagtttttcctttagaacttcgtctgtttaacacttcaggtgatgccaccaatccagacagaatgtacgaccttgttgctgttgtggttcactgtggaaggtaattgcaactccggggacatagtagtggaattcctaggttagaagagcagggtacattcaagatgttcatgaattattcatatatagaacttttagaaattctgtattctctcaagataattttatttcaaaatggagttttagctttatgttttatcatttcttaaaaattttatatgttaaaatatattgtttttatttttattatttattactctacaagtactatatctgatttcctagaactttgagatctgttagtttttcttttccttttttggggtgtgtgtatagagggttgttggttaaaataaatcacttctgagtttaattgcgtatgttcagcatatcaatggttgtaaaaagcattttaaaatggcattggaaataatcttcaaagattcattttttgattttacctgtgtgtgtatttatcatttcttattagccaattt

SEQ ID NO: 72562 - DNA, 1050 bp, Homo sapiens
acaaaactttatattaaatttttaggagaaataaagtcagtcacaaatgaagaatgtaatttaacattttgggctaaattttttttttaatgacaatacagatatcctgtcctgtgtgaagcatttttattcagtcttggcctatgtttttttaagaatcagtgtatatggtacagtttatttcatgctttaaaataacacaaagactttggaaagtcatgaactctcacatcatactagcctttgccagtgagagtcagtcaaaagtgtactttggtgttttatttatacatctggtaggggttatttattcagtgtccttttggataatccaaattaagtagttctcttttgaacttgagggaaaagaattgtttacttactgataataatagaatggcatttaattctgttaattgggaactgtggtttactagtatttgaaaaaatcaaagacaattcactgtttttacagataagcagcaaagatgaagattttttagacctttctgttgacgtggaacaaaatacatcaattactcactgcttaaggtatatgtagaattatttagtttgaaatttaataattatttttagtctggaatattttttaagatacatgatttcctggtatctacaaaataaatttgttttgaatttcacacaggggtttcagcaacacagaaactctgtgcagtgaatacaagtattactgtgaagagtgtcgcagcaaacaggaagcacacaaacggtaattttagagctttatggatttttaagtgattttattttttgtaattgatgttggaggtgggcttagaaaaacaatctaggaaaatttacattgagtaaaaattcttaattctatcactaacagttaatgttcattaagtattactaggtaaatgatattctactcaatgtttattttacaaaaactgtgtaccctgaagtgatttcctatgtctagcgattatttaatcatcataaaccagtacagttaaaatatttggctttgaggctttcctgatgatgtaaacttttttcttg

SEQ ID NO: 72563 - DNA, 1019 bp, Homo sapiens
ggttgtccaacttctgctttaaagcttgccaagttgaaatatttgtgaaataataagtcaggtaagctaataagcaatttcttcttaaattctcagtatctgttatgccaatatataaggataggttttgcccttttctcaggatcaattagtagtatttttaaacaagattttaattaattttacattttccccaaatacagataaaagttttagatgcgaaagttatttgttatacattacaaaaacattgtgcatttatattttagttctgatccaatactagatattcttttataaattggttttttatgaagttatgaattctgaaataattctctaatataatgtttttattttcagagctttttgacaactacatgcaacaagatgcccatgaattcttaaattacctactaaatacaattgctgatattttacaagaagagagaaagcaggaaaaacaaaatggtcgtttacctaatggtaatattgataatgaaaataataacagcacaccagacccaacgtgggttcatgagatttttcagggaacattaactaatgaaaccagatgtcttacttgtgaaactgtaagtatatcatacaattttgtatagagaaaaattgaattactatgttaaaggttgttctttgagaaagacagaatggaagatgaacttgaaagttgtaattcttaggtataggagttaaagatgtatttttcagttaaaaggaatctgtctgtattcttaatgtaatgttgcttattgacaatgaatacctgaggtgatagaaagatacttactgtagcttgaactgtttgattttctttcagtttaggaggccatagaaccatgttgtggaaattatgtcttatgacataatctcataggatcatacagatcagggaggcatattaattcgtttttcctttttctacgattacctttagtatccattgttgggataaaaactaaagcatacagtgtaccctcaaggaggggaaaaaatcccac

SEQ ID NO: 72564 - DNA, 1033 bp, Homo sapiens
taaaatacagttacatacttatggctttatatgtttgtttgtcaaacctggggtatttttacagtgttcgttattttttccaaatgggctttttttcttttttcatctctttctctctctgtctctctctctttttttttttttttttggtagagatggggtctcattatgttgcccagactagtcttgaactcctggcctcaaatgacccacctcagtctcccaaagtgttggattacaggcatgagccactgtgtctggccttattattattattattattatttttttttttgatagttcaatagttactaattctttttgtatttaggcagattgaattggtaacacaatagagttcttaaatacttctttgaaagagactgattctagaataaatattctaagcccatcttctcataagttttgcttcatttttctaaacttcagaaataatgcttaatagaaaagccatttttttaatagaaaagcatttttattatttgatgttgctgacatttgcaaatatgttttgaaatatatttttggcttttgaattttcccttgagaattgtgtagagaagaatatacaaatcaaagaggatttaatatattattcattgcatatctttccttctgagattttgtttgttttaaatctttggaaagtatgttactcatttcagtatttccactgactttcactggtagatggttcttactaaattaatttcctgccatactatgttaaaaattttattctcaatagatattagccccatattgttttaaccaccattgctttatgttactaatctttttgatggtcctggaaagaactgattttaatttctatttattaatgaatttttgtttttacagttttaactcatgttacctaatcatagcataagaggactgttgcacagtgctcctgcatagagtacagcaacagtggctccatgcatgttacctgctgatgggatggatgctagctgagtgtttgagtagactaatcatgatagatatattt

SEQ ID NO: 72565 - DNA, 1051 bp, Homo sapiens
ttaggagctcttttttaaaaaattattattattttttttgctctgtagcccatttctagaacatcttgggagttctaattatgttttagataacataaaaagcatagaatcagacataattaagcaagaatttcacttagttccctagtttttacagtctaaatacatttttctttctttaaaactggaggttactgataccaccattttcgtcaccaacagcctaataattcacaaagctatttgctaatttttgacacttttttctttgccagtaccattaagggatttgaatttttttgaggttccatgtttatttctttagttatgagtatgaccttggacaagttacttctctgtacctgtaaagtgagagtaaaataacatctagttcatagggttgttgactagtacctggcccatggtaatcactgtgtcatgttggctgttactgccctttaacatgatttgctcccctccctgtggtaaaaagtattcattggcactactaattaatctgttagctcaacatatactaaccaaaatggaaatttgttttgtgaaatacaattgtcagttccttttcattataagaaacgttagtttattagtagtatatacccctgagaaagcactaatttattttgaaattgagtggattaattcataatatgaaagctgagaatgtagattgtcttctttctctattttgaatagttcatagaataatttatttcttttatctgggaacaaaaataactggtctaatttgtgacattctcaaacatattttacaagtttagataagttgagaatggcaaaaaccacaattacttttgcaacaatctaatacttttagaagaaaaatctatcttaccttattttatactaaaaaaaaaaaaaagcacaccagctttttgtcattactagaacaaggtgtgtgcattcaagttagcttcaggacttattttctttcagatttttctgtttactgaggccatattattatatttaatttccttatgctctatcctttagggagcataacaag

SEQ ID NO: 72566 - DNA, 1114 bp, Homo sapiens
attatcttagtcaatttcaaaaggaatgcgataattaggtcttttacagtgacaattttgccacatggctgagctacacacattgtatgggtcatagttcattgtcaaagactagatttcaggagtggtgtgatactctttaccgactgttcattcactcaagtactgtatatcaagtatacacttagcagccactaagtgctagaggcgacgctgagtactggggatgcagtattggtcagggcagcccctgttttcttggtgtttacattcttgctcatggacacaaacagtattcaggtaaacaataaatgtatgctgtaatcagattaggacagtgagacacagggatttgccagggtcacacacttagtaagtgggattctgatcccaaggatgtcaaatcagaagctctttctagggcttccatccagatacattaattacatgtggggcgtgtgtattgttggcaaatacagaaaatgcctggccaaatgagatcgttccaaaggtactattaaaattgggtgtgtctgtattcatatttgaatacattcgaatgtacccccaaatagtgctgaatatctcaaagtaatttgcagtcttattctttaaagaaaattgccatttgtcctctgagaatcacaaaattgaaaagcaaagatacctctttggctttgtaggtgctgttttgctaggcttggaacgctcctccctgccacaccccgtatccttcttgtctggcgagtgtgtgtgcctgtctcttaagcagggagccttacttgaataatcctacccctgtccaacccgaccctccatccccttcatacagtttcatggcatttttgtaatctcagtagcacttatcatacttactgtgcagtaaatttttctttgaactcttactcaattgtgagggccttgaaggggaaggattatcatttacttctgcagtttgatctggagtaccaagttctgcattcagtataaaagttttccaaagtccttcctgcctcctcctggtatgccgggtgaagcagggatgatgtggctgtgtgtgtgtggaatggtggagagaagatgggctggacttaaacagaacacttctcagaat

SEQ ID NO: 72567 - DNA, 1044 bp, Homo sapiens
ctgactcgttttaaccaaaggcatgacagtggtagtgatagctgatatttcctgagggctcattctatgtgccagtaagcacttacaaatattatcttacttaattcttatgaaactcctaggaggtaatgggtggtacctattcctatgcatttagaagattctacagtgtacaaaaagtcgctcttcaggtttttccattgctgttttgggattgagctttctcaagtcacctacgtcagctggcatttgtccatctgtttttcagctttcaaaatgttgctgttattttttatcttccccatgcatatggtttaggtcgttagacacacacacacacccacacacacacacacacacgcacacacacccaatgggattctcggaggtaacaaaattagatgagggtatttaatccatcattttaatctggagcccctagggatgaattatttagatgcaggatacctaataattagtttaactcatattgttttagctgaattggatgttgaaggcattccaatactaaatgaggagttgggttacggagtggacattgggacattgttttttagctactcaaactcattccttcttcctactagacctccatttacttgggggccttaactcctgtcccatgtgcatattcttaggaaggtactccctacccacatcaaaactaaggggaccagaattgcactctccctgctccaataaacatagggtagacatcccttccagtcaaccccctccctgactaaaaacaatattctgatttctgtttgattcattgattgagatgggatcttgctatgttatataggcaggtcttgaactcctggcctctaatgatcctcccaccttgacctcccaaagtgctggggttacaggcatgagccagcctgcctggccaatattctgatttctataaccataagttagttttgcctaatcttggatttcctatgaatggtaccatacagtttgtacttttttttcctgtggctctttttgtttagctgaatgtcgttgagaatc

SEQ ID NO: 72568 - DNA, 1033 bp, Homo sapiens
atttattctgttattgatggacgtttctaattttttgcttctacccacagcgctgttacgtacatccttgttcacttaccaaagtttctacaagacatataggtaggagcagagtgctggggtttagtaattgaaaacttttactagattttgccacattgctttcccaaagaggttttaacatttgcgcacctactagcaggtgcgtatgtttagacgtgtggaggagaaactatttaaagacatacaaactagataatatacttgcttcattctcgtttgaccttcgtacccaagcaattatttctgcaaacaaacaaataaacaactactaatagcacttcccgcaccgccagccgcagttttccctgcggagacgcggatacaaggcagcttccggcgaaggcggtgacgcaaaggatggcgtaagcacgctcgggacgacggcgtcctcttgatcgcccttgaaggcccctttccgggctgtctgacacgatgcaagtgtcagcttgtgttggccggttgcctttctttcgcaagaggggaaaatatcctcacagactttctgtgttctcagagacgatcttcttccctagaaagaagtcgcttacggttggcgtttccctcaggcagcgccgtgggcagcccacaggcccttgtaaggcgcgcgccgcggccccgcctctttcctttcggccggaaccgccatcttccaggtagggcctacgcgtggctcccgggcgctaggtgttcgacagacttgaaccgcgaccttgtggcctcagaggtcgttcattgggaccgtggggagactctctaacctgtttgaggtccattggcatgggcgggttaaaccatgttctgccagacggggagcagcgtgcgccgggtcgggtctgggccgtgggctgagaaccggactgcgatgttgcggccctgcggggggacatttgcgagaaagacgagactgagtcgcttggggtgaggcgactcgagttaatctttaaaagacttcgttttatgttcccgtggc

SEQ ID NO: 72569 - DNA, 2402 bp, Homo sapiens
aagaaaggtttaattcacataaaaatgtaaggctgttttattgtgttctccactaaattatcttctagttagtaattacatgcccttggcattctaaattgggttctacagatagagtgtggtagaagtcctgttgtgtttttatattctcatagagaaagggtactagtttggattctcgtatcaagttctgctccttaagagttttgatgttatagaacttgggcagttttgccaaaagaccttacttgctaaaataatgattttttaacctttcaacagaactaactgcttggtgatccagctttcagtttgcagttctcacttcgctactgaaatgtgaacatttgaaattacaggggtttggggcaaatgccagttttcagtcgtatttgactgttctgctttctggtttcagtaattcgccaaaatgacgaacacaaagggaaagaggagaggcacccgatatatgttctctaggccttttagaaaacatggtaagtaggtttaccttccttgagagaagcatggcacacatttgtgttctgttgtgttcaacatgtgttgtagttcatagaatgtgtatcaatagaattaaataactagcgtctacccagcttatttcgtgataaggtaaataaattaccaaaattatatggtgattttgtgactaagtattgatgcaagattaaactttggagagaggttgtgatttagtaggctgattgtgctgtcaggagaaattgtccattgggaagataataagcatgtaaccatcaaaaatgatatatgtgttaaaagctagtaaaattgcatttcttttactctagatttttagccttaatactcactataccaaatttatttttgtaggagttgttcctttggccacatatatgcgaatctataagaaaggtgatattgtagacatcaaggtaaacataaaattgggaaaataacactacagaagatagaaaagttggatttaatctagtgtaggaattcaaatactagtgtatgttgcatctgtaagagtatagaatggatttttttttttttttttttggagacggagtttcactcttgttgctcaggctggagtgcaatggcatgatctcacctcaacctccgcctccctcccggattcaagcagttctcctgcctcagcctcccaaatagctgggattacaggcgtgcaccatgatacctggctaattttgtatttttagtagagaagtggtttctccatgttggtcaggctggtcttgaacacctcgggtgatctgctggactcagcctcccaatgtgctgggattacaggcatgcaccatgattcctggctaattttgtatttttagtagagaaggggtttctccatgttggtcaggctggtcttgaacacctcgggtgatccgccggactcagcctcccaatgtgctgggattattacaggtgtgaaccaccgtgcccggcctagaatggattttttaaagtgctattcttagcagaatttaaattttcctcattacccgcttggagttaacagctagtggaaattgggtggtagggtgggaaattatgagtttatcaagttggaaaggaacgccttagtgcaaagtttaattattgatgaagattactattactatgattaaaaaccctcctagtgaaagctgtgttcttctgtgacctggatttaaatgtatcttggcactcgagcttaatgatgactgttttttttgattgcttgaagcaatgtgaaaaacacatttcaccggctctgaaagctcttgagttgccatttgaaagaaatcttagaatactttgcagttacttaaagtcagaattttaaaggaaggggaaatgctggtatataacattggtttctttaatagggaatgggtactgttcaaaaaggaatgccccacaagtgttaccatggcaaaactggaagagtctacaatgttacccagcatgctgttggcattgttgtaaacaaacaagttaagtaagtagtgttgtagttctttgtggctaaccagtattccctcatatacccccttttcactttgccagttggacttatgtctttattggtcattcaagtggggcaaaggaaatatccttttaaaactcaggcaaactgggtgtttgtctgtatcctgtcagaggaaacaaattgaaatagatttactggaaagtcttacacagttagttactaagcggtttgtttgttttgtttcgagacggagtcttgctctgtcgccctggctggagtgcagtggtgggatctctgctctctgcaagctccacctcctgggttcacgccattctcctgcctcagcctctggggtagctaggactacaggcgcccaccaccatgcccagctaaattttttgta

SEQ ID NO: 72570 - DNA, 1101 bp, Homo sapiens
ctgggtaaaaggtttatggtttatttaataaatgaaactgcaaaatcagttttctacatttctgttatatttttgttaaagcacttaaaagaatttctgctctgtccaggggcaagattcttgccaagagaattaatgtgcgtattgagcacattaagcactctaagagccgagatagcttcctgaaacgtgtgaaggaaaatgatcagaaaaagaaagaagccaaagagaaaggtacctgggttcaactaaagcgccaggtaagaatttggtgtatatttcattggttctgagagcactttaaggttgagatttaacacatcacataattattttattccctttttttttcctttaatagcctgctccacccagagaagcacactttgtgagaaccaatgggaaggagcctgagctgctggaacctattccctatgaattcatggcataataggtgttaaaaaaaaaaataaaggacctctgggctacaaaaatgtttctcttcattgagtagaagtgtggtgtcctctcccccaaagaaatatttaaagcaaattttggttgtgtcctaattcattatgtaatgtccttgctattcaaatttaatgtatttcttgctgaaggacatgaggtagcttattgtgcaacaaattactcagaaaatggcgaggtattatatatgaaatacttgtactggtttgaagatagtccttctaaatcatcaaggaagaaataaaatattttttttttgagacagtcttgctctgtcaacctggctggagtgcaatggtgtgatctcggctcactgcaacatctgcctcctgggttcaagcaattctgcctcagcctgctgagtagctgggattataggcgcgtgccaccacgcctggctaatttttgtatctttagtagagacagggtttcaccatgtttataagtctggtctcaaactcctgacctcgtgatccacctgccttggcctcccaaagtgctgggattacaggtgtgagctactgtgccaggacaaataaaacatacaaaaataagtgggatgtcatctattgcgtaacagttaagctcaggatccagagtttgcttttg

SEQ ID NO: 72571 - DNA, 1059 bp, Homo sapiens
gttacactaataagagggtgtgaggacagttgtttctcacagacatgcctcttagtccccacttatcaggctgggaaagttagggttagggcccgagggagtaatatggttatatctgacatgtccccagccctgagccccccacacctaccaccatttctgtcctccgctctgtttagcaatgctgaatacataaacatcacacaatcagtcagtcattccgtaagtttaacgagcacttccggtagggcagacaaccagggcaggggccacagaggtacaggacacagtctctgtcctgaaagtagggcagtttggggataactagcaataatattctcaggacatgtcagctggcatatactcatgtttttaaaataattaatgctccccaagaatatatgtgtccatgcaacacgatacctttggagaatggcagtaccaaataagactaacatggtccttggaagaatatcgtgctgatgtcctccccacgtaatttgttgtttgtgctcagcaggaaatgttgccagacttttctgcaaaaattcacactgaggtcacacctatactaataaggaaaatgagtagtcagaggcacaagacggatcaggcccctattctcccttaagacatttgtatggctctttagcttgcaacatttgtggaagtggggcaactacgtgggggcctcttaaagagaaaagtccccatgaaaatgtcccttctgtcgttcatgtattcaattcttggatcagcctggccagttaaagagatgagctttgttctgtaatacccaatatgttttcttcattaggagaacagttcagaaaataagcaaagatgccagtttcatctttaaaatgacttcattttttataaattgatttcaaacacattctagtctgagcctggccactctggtgacctccctaggaccatttccttatttgtaaaataatcatatttataatctctgcattcctgcttcgttaataacaacaacaaaacccaaataggattctaagtagcatagtggcctgatcaattgcgctggtg

SEQ ID NO: 72572 - DNA, 1031 bp, Homo sapiens
gggagcctgtgacccttggggtgggaggcaggtgggtgtgtttgggtgcggagatcaccatatgaggtctgagaagtaggcccattaggagtttggattttattttgagggcaggagaatgtcagataccatgatatgacgtggcagcccatgtcacacacaagtgaggaaaacgagggtcatggaggtcaaggaatctgcccagcttcccagtttttggcagagctaggcttcacactgcctcagcttaaagcccttaatttcttaaaccactgggctgcagtccatacctttgccccttgcacctcctctaatttatgggccaccttctccaggtgtcctccggggcctcattccttaacctctccagcactggaaggccgaccgcttcttccttgagaccttctctggttcttttcctcttcctcgtctgcccttttcgttggatcctcttctgccctctgcatgttccaccccgcccagctccctcttgcggtcttacatagccaccggcatgactcataacatcctttatgctttgcccctctgcccttcctcttgcccgttctagcctctaaattctgggctctgtattaccagtagatccacgtaagagcttgcctttccttttagaccggtgtgctgtattttggatactggcgctaccagtttccttaatacaggttgaaaaacttggagtcatctttgttgtcccagatctctcatgcagattaatttgacaaatgtttattgagcctactccacgcctgccgctgtgcaaggttctgtggctccgcccctggtggtatgtagctcactgtgttcctgtttgcttgttttgctcctagtactctcatggaggcctcggtgcctccctcctggacgccttggtagtatgcttttcatagtttgatgcaccaaactggttatttggttatttggggtgtgtgtttggcttttactataggttcaaaatgagtcaccccctcccaactcctgggttacaaaaggtggttgcatttagggtgttg

SEQ ID NO: 72573 - DNA, 1043 bp, Homo sapiens
tatggttctgctctaagtatctgttttacctctaatgataagccaagacaagttttatggaggcctttctggaaatccagttcataatgacatctcaagcagcattaaggttgtcagattctaagctgagaataatttgtcttaagcatgatttaggcctagtgtaggcttttgggactagtgtatttcaccttcccatctgcccagtgtgtataaaagatgactgatgtagtgtgtataatttcagaagcctaatatgaaaaagcattttgttacatgatagtcatcaggttgagagtctatgtggtatggcttaacactctggaattcgctaagactattttatagtattactattctttggaagaattagcttctataaagtaggaagatatatgtgtcttaaaacttcttctcccttggtttattaatattttggtttatataacttcttacagttgtgcagccaatggctgtgatcaaaaattcaacacaaaatcaaacttgaagaaacattttgaacgcaaacatgaaaatcaacaaaaacaatatatagtaagtatgattttatatgcttaaattttttgagtatttttacacttactgcctatgtttctgacattttcagccaggtgcggtggctcaagcctataatcgtagcttgaggccaggaatttgagaccagcctgggaaacatagtgaaatgctgtctctgaaaaaaaaaaacaaaaacagaaaacaaaacaaaaaattttggggtaacagagaccctgtctctaaaaaataaaagtgaaaaataaagttttcgtcaaccaaattttgtctgccaaatgtctgaatttacttaatgccatcataatgataaaggttttaatttggaagcagacattgtgcaaattagtgtattgggagactattccaactgaaacagttttgctttttcaaatgttatatgattcttcaaacctttttgagataaagcagaattttacagtaacaaaatgggtgaaagcagaaattttatacagtctccaaaattgttt

SEQ ID NO: 72574 - DNA, 1031 bp, Homo sapiens
cctgtgtctgctggggactccttcctaattcaccagtcctgggaaggcaggaaacagtgagccatgcttcgtttcataatcaagctgagaagaaaaatgtgtgctggtctccactccatgacattgattattgggagttggataatttttgaaaaagtgttcagaaaattcttggccaggtgcggtggctcacgcctgtaatcccaacattttgcgagactgaggcgggcagatcacctgaggtcaggggtttgagaggagcccggccaacatggtgaaacctcgtctctactaaaaaaatacaaaaattagccgggcatgatgaggggtgcctataatcccagctacttgggaggctgaggcaggggaatcgcttgaacccaggaggcggaggttgcagtgagctgagattgcgccattgcactccagcctgggtgacaagagtgagacttagtctcacaaaaaaaaaaaaagaagaagaaaaagaaaattattgctacaagttagaagaaacagtgtgtgaatggccaggaacatgatgatgctttctcactccagccagaccaagttcaggggcactggctggaaccaggagtggcctctgctttgctgttatgagaaagtaaggaccattgatggtcagtgtcctggggtctattttgagaagtccccgggtcacatgagcattgagagggagactatttactggtctactcctggaccatgttcaaaactaccaggagaaatgcacaagccctgcccacaacaccgttggtgtgcccaattggtgattttcacccttcagcaattcatccatttattccataagcctttaactgaccacattttctgtgccaggtacttgggctggggataaaatgatgaggaaagtgaatgcaatttctgtccttaaggagcattcaatccagcagtggagagcaagaaaaataatcatctccacagtgaatggattaggtgacaagtgttccctttgccttgcctagccaatctagccaatatgccaacatggg

SEQ ID NO: 72575 - DNA, 1047 bp, Homo sapiens
atgttttcttctaccgaattgtagctctgtttctgttcactttgcagttacccttgaatttttcttcgtgcatatttaacataaagtttcaacgtgaacaatagctctgtcccctctgcacaatacaaggacctgagaccacgtgactccaaccaccctgaggtctgacttagtggcaagtgttgtggctcctcctcattctcctgtccagttagtgttattgtaattgttatatactgttggggtttggttagatttcatttctgagctatgtaaaatactgaaaggctgatgcaagcacagtttatgatagttcctaacattccagtaacatcccacaaaggacatgtgggcaacagaaggccagagtgggattaatggcagcacactgacccatactatctgaaagttgaagttgcaatccagatataaggaaagactttataaaagcttgggacgcaacaacattttcaccattatattacccgtttccaagcagtctggaaatcactgaagcaatttgcctttttatgggaggggttgggggaagggcagttcagcaaaggtcactatcaccaacttttctagagcaaatgcaacttgcattgtaaatccagagacatgttttcataggaaattttggaaggcagatttagagggtttcgttttctcaagatactgtgcacagtgaccagttctcaaacagctgaatcctccctctctgtcctagctgtggctcttttctcactagaagaccctgaggtctgttcattctgttgctgtaccttcagaacttgatacccattcttttataaatgaaagtgggctgctgctttatgattcctcacatgtttgaagctgtaatcagatacatggatggttaaaattaaatctgaagttaacctgaatttcagcttctgtgggcacttcacccatttcatcatgcctgacacccatgttacagtacattaatgccctgttaattcagacttaactaatttggaatttgaaagcttaaagagaggtgaggttaacttggcactttat

SEQ ID NO: 72576 - DNA, 1135 bp, Homo sapiens
gcaacatcaaatcaaattacaaaagaaaaggataatttttcttaggatattacactttaaaaggtacacaaagaaagcagttgtgtccattcctgtcaaggctcctcagtgggctagccatgagattggataacccagcctcttgcttagaaaagttgtcgtttaccagcactcattccgctatgtgctgagacttcatgcatttttcatcagaaaacccaggccaatcttggggcttccccccatcccagaagcctttcttaacacctttttaaatttattttaactctcgctaaaaagggtggcatttaaaactcaatttttattggatacaagagtctattaagccaaaccattagtgttcaagaatggctgcttcacttttattttttataaatgtgaccagccaagatatgctgtggttggtcagtgtcggggtcacagaagcacatggaacctccagtggcatcccagggtacattcctttccgcggttgttgtttgacatttgagataggaagaatgtgttcctatcatcatttgttgtctaatccgtttagattcttaccgtacctaagaatcctaaaactaagctatgaagcattttgacttttgaccaagtatgaaaattattgattctttaaaataaaacaataagaatttgctattttctgagccacctgactcgtgggatacatttataacaacaactagcatttatatagtgcttcaaggcgctttgcgcatagtgggtgagaagtggtctactcgtgcagtggctgggcagcacgttgcagacctcagagcttgtctgcacctctaatgatggggcaggcagagagcagcagcgtcctggagaaacttggtccctagtgcttcctttaattttccttatctgatataccagtctagtttggaggttggcacattgacctctttttttcagagcattttctggtgtgccaggcataatagcaaagattttagatgagaaatacacagtatagtaaaatctgtttttgagcccacctgtgttgaaagaatacctgtcgataaaaggctactattcaatgtgtgtatggaggtctctgttgaatgcaaagctatattcaacagccatgtgtcctcctcagtgg

SEQ ID NO: 72577 - DNA, 1042 bp, Homo sapiens
gaaatcttgcagtcatctcctatcaactccctaatgcactctcctcagcaaacactctaactctgcattttcaataatccccttcgctccccttactgttttccctttcagaagatgatctttaagaagaaacaggtattctccagaaataactagcatgggacaagatattttattagagggcaagttgagatgaggggaggaggatggtaagagttctacaatcccggagttgatgttaataccggcctggaccattttcatcatacaaaggtgataataattgaagcttaaaaacggataacttctaggagagagaggaaatattcatgaacaagaaaaaatgtctcctgtcaacccaagcgcagggactcctctctctccttggatttgtggttcggtccttcaccatgacctgttgatatctaccccctacttccattttcctgccacttcttgagtctaggacttctcttcttcatatctaatttagtagaataccccatcatatacttctgcctcccaactctcctcccttaaatctgaaacaatcactgccaggttaatacatcagtaaccctgcttgccttgcaaaggttcaactaggaggtcaagtccagactgattaatctaatagtcagggtcctccacggtctcttctacaacctgtcttgttaatctcaattcttcatttcaggcacaccagctcattcatttctcacaacattctaggcactatactagttgctggtggtacatttcagagcaaaatactgacctgtcctcgtggaatatacaatctagtggaagagccagacatagcagtcttcttccttccctgcaaacaccttattcccacattgcagcctgtcctcatctcatgagccagtttgttcaccttcatccttaaagcttttgttcagccattctcccccatactgattcctcctacattagttattattggcattcatcacttttctcttcatcacttggcacgtgatgagttacagagaattgtttgaacattttacgtatgtag

SEQ ID NO: 72578 - DNA, 1005 bp, Homo sapiens
ccaggatacgtgtgtagaacgtgcaggtttgttacattaggtatacatgtgccatggtggtttgctgcacccatcaacccatcatctacattaggtgttactcctaatgctatccctcccctagccccccatcccctgacaggccctggtgtgtgatgttcccctccctgtgtccatttcttctcattgttcaactcccacttatgagtgagaacatgtggtgtttggttttctgttcctgtgttagttgattctgaattatccttgagactacatttcaaagacgcaatctttgatattgtactgtaaatgtgtaaaatcaatcagaagcaaagaagcatgtctaagatgacatgcaaatgtattatatacctcaaacagcattactattagcacaattaattggctttaaaactaccattgaacagtgacatatttggggatttcagtcagtaaaacaaatcgattgtttcttatgtcacactatataatctatggtgtctttacctttcatcaaaagttgtttttttatcaagaacttgacagtgggagccaggcacggtggctcacacctgtaatcctagcactttgggagggctgattgcttgagtccaggagttcaagaccaccctgggctttccaccatggaaaccctgtctctacaaaaaaatacaaaaaaattaacaggacatggtggcgtgcacctgtagtaccagctactcgggaggctgagatgggagagtcacttgagcctggaaggcagaggttgcagtgagctgagattgcaccactgcactccagcctgggtgacagagcaagaccctgactcaaaaagcaaataaataaaaaaatcaaaagagacaattaaaacttataataaaaaagaacttggcagtgtaagtccttcttagccaactagaaaattaatttctttttttatgactaatttattacctgattcaacctttaattttttactaaaaaaagctaaccagtaatattaca

SEQ ID NO: 72579 - DNA, 1035 bp, Homo sapiens
aacgacttactcctgatatgcatgcttttcgtccccattggaatatctgtacccatgttgtccagtacaagacactagccttttgttggcattgggtttgaaatgtggctagtcccaactgaaatgtgatgtaagtataaaatgtacactgtttttgacatgtaaaatttcaaaaacataatatgacaaaagaatgtgaaatttctcgatcattttgtgtcattggctagtaaatgtctttgtgctagactgagctctgtgagctctccagagtaaccctatcctctggtgcagtgcctggcatgcagcagataaccaacacatatttgttgaatgagtcatgaattttctggtacataactgatgtgcctgttagttatgtgccatgctggctaactgataggggaaaacaagataaagtggttttaaaaaatgtattattctttactcttaggttttcttcatctaggctgtttccatggaaacagcaaccaaaagattttcaggattggcgtaatgctctttgggtgatatttgctgccattgttaaccaagacccacaagtttaaatatttagatgtgtgtttcttgagtttgagatccaaagtgtaaaagtttgatttgagagaaagttgctaaatatttgcctctttggggtgcctttgaaattcttcccttccattaacataatctgcaggaaagtaagagttgccaaagtacaggtgctattctattcctacaagatacctttgttattgttttactttatattgtctattcctaacttacttcctaattatagctttgtaaatatggattactaattgacctttacctggttagaacataagtatattgtctgtaacgtaaatgaatttcttttacgggaatcgtaagttcagattgcaatgaggatgctagtagataaggatagaggaagttatatcccaaattgttcaaacacctagagccattggcaggaaaaaccaagtgggattccagatcttgaggcactaatttacaaagtagtggtga

SEQ ID NO: 72580 - DNA, 1749 bp, Homo sapiens
gaagccgtagttgggcctgcacattgatcatctgtatcctctatttttatactagagcaatcgggatttctatgcctttcaaccctctcttcatcctctagcaggaccagtcctattctaatcctatcccttgcttgtgactctaccaaaaaatatttttgcaaacacttaagtttgtgtttttctaagaaaactccccttgtggccagtgtggatggtcaaatggagcagggaaaaactggaggcaataaattaaatatttattgatagagtttgtggaggcaggaaaatgagaggcgaataattctgtgtagctggagtagattaataataatgtgttgcaatgtgatatagtaaatgagaaaaagctagttacaaaacaatattcagtatgatctcatttttataaaaaatatgtgtgtagaaaaatatctggattgaagacctcaatggctgaaggcgagaggaagacagccctggaaatggtccaggcagctggaacagatagacactgtgtgacatttgtattgcacgaggaagaccataccctaggaaattctctacgttacatgatcatgaagaacccggaagtggaattttgtggttacactacgacccatccttcagagagcaaaattaatttacgcattcagactcgaggtacccttccagctgttgagccatttcagagaggcctgaatgagctcatgaatgtctgccaacatgtgcttgacaagtttgaggccagcataaaggactataaggatcaaaaagcaagcagaaatgaatccacattctagtcctttatgcagtatacaaggagaactgtcctgtaggatattctcttcctgatggtgcagaacccagaattagaagtttgtggttacagcatactctgtccttcagaaaggcgtgattctagctgttgaccccttgcagctgttggaatctctgcaagaacctctgtattcttctaataaattccctcttttatttaaactagtttgactggtttctgttccatgcaaccaaatggtccttgaggatgactttttttctaattaagccagcattgaaaatgaggaaactgagaatatcagaggcctagacaagaactgtgatcatgggaattaaaagaagtatatatccatgtctgtagttggagtggtgggggtaagggaagagacaaaaaccatgaccccagttagattgttgtttaaaaacagaaggaaagaagattggggtggggacttggcttcttgctaaactttttggcttttaaagaattgcatcatttgctgtgattggtagacttggcaagggtgggaataatttggaagaagtgtgagaattctggttttacatgagagttttagggagtaaggctccatctttgaggcatttacaggaaagataccagtttactgcttgaattttgggatatacttagtcatgatctaagtaaggtaagatgttttgattatattacagaaggagaaaattgggatgactagaaaacattttcagtccttaagtaggtatagcctagggtaatgtagaagaagccctatttgagagaaggtaaagccaaggagaaggaaaattccatataggggaaatgactgttttggaaaacacatatcccacccgccagtgctctgtgctttgggcccttgtttatctatcccctcttcctgggccagtcttactcctgccgtactcttaagtcaaagcttatgtgtcaggcct

SEQ ID NO: 72581 - DNA, 1072 bp, Homo sapiens
gtttgagacaagcctgggcaacatggggagtccctgtctctacaaaaaaataaaaaaggtagccaggcatggtgacacatgcctgtagtcccagctgcttgggaagctgaggcgagaggatatcttgaacctaggaggttgaggctgcaatgagccatgatcacaccattgcactccagcctgggtgacagagggagaccttgtctcaaaaaaatatataaaattaaaaacttgtaattctgtaaaagcagcaaatgtagggtcaagatagaaaacataagaaaggaatctactttaggcacggaagttaggaaaggtgttctagagattacaggaagggagagagctggctgtgcaaagaggagagaaaatgcattctgggggtatagcatgtgcaaaggtcctaaagcagaaaactggtggcatgaggaactgaagatattgaacaaagatttgcatgtttttgtagcacagtagacaaggagaagggcctgtcctctggagtccatgggaggaagagttggggtagtagggattttggattttaggttcagtgggaatgacgtcttctttactttgattacagagtggggggagatgaattatagggaggctggagtagaagcagagagagacactataaagagttgaagtggcctggaagggtagaagctagtgatggagaagagaaggtaggtttgaggtatattttagaattgaattggcacagaattggtacacttcaggaactgtggaagatgaagaatcaaagatgactactgcctagctttggggccaattactgaaattgggaagcttaaaatggaaaatagattgggaggtggaaaagatgataggagtcaaaagtttcatttgtgaacattgtaagcagtggctatgtgagttggagatcgtggaagagatctaagctggagacaaattttatgagtccttgccataaagatgacataaattgattaaaaaaaaaaaaatagagggtgacaaagaagtgggcccagaacaaagccctaggcaacttcagtatttaaagtttgggtcaaagaagagttaa

SEQ ID NO: 72582 - DNA, 1062 bp, Homo sapiens
atacaaaacacctgcagaaggcagttgggtggagggaagaaactgagaagggggcaggcaggttaaccaagagtcttgtatatgtgaaaggaatctgcataaagtctgtagggacctgagggaaagctgagttggtccaaaaaggactagggagatgaatgtgaatcttatacatcctgtgaaaagttaatccgcatctgatttgcactccaatagcatttcattctaaataaactcatgccagtgattcaagatcagaaattctcttcagctgtaaagtactgtgacttttaaaaagctgattattaaatatataccaaaggcttttaacatgtagtaattctgagtacttgctggtactttctattttcaaagtactttacaagctaattatttacaaattgcatatagctgtaacatctaagtactctaattagttggcataatgcacaggttcacacagaatctcgagagatggaaaggtgtctacaaagtggtctcttcagtactgacccaaagagtgtcttgcatctcaagagataggaaagcatatcaagttccgtggcctaccactccccactcttcttttagtttcccttaaacacgttattcagattttagatggtctccagatcactagacaaaagtcttctttttggttagcgtaatttagagtcattctttgtaacaacctttaaactggtctcttaggaagtttacccaaatctacccatctgctttcaagtacttattaagacccccaaacccagccttttcttgctcaaattcttaatgttgctattttcttttcctgctttataaactatcctggtacagttactgcgtgggtctggtttttttttttttctcatgatgaaattcttctcaaacttggattattagatctctaattatttaactatacagtaagtatgtacctaatagtagcacagtcctgagaaatggtggaaataagagactatgagtctgtcctgaaaacccttctgtggttttggagaaggcagacaagagctgtacacatgaaaaagaaaaccaattgta

SEQ ID NO: 72583 - DNA, 1183 bp, Homo sapiens
cactcctaccttgtattttttctatagcacttatcttctaacatatgagatatataatttacctttttattatattcattatatattgcctttccctctacccctcaaacacacacactgtaacataagctctgtgagagcagagatttttgttttaatgttcactgatgtatccacaacccctggaacaatgcctggctcatagcaggtgttcaaaaaatgtttatcaaatgaatgaatagcagattgactctgtattgtttttacattaaataccccaagagctgaacttgaatttaaaaagggaaataactattctataagcttcgaattgagaaccacaaatttgtggttgtgtgtcttcaactccatagtttgtcacatgtagttggcaagagactgggcctgtccaggaggagtcagacctagaggttcatttaggcaaagggtgaccagagcaggcaaagatagagtgccagaggagtagcctatgcagtaggaaccaagcagatctgatagatattgccaggtagatgattccagaggggtcacctgagctaagaagaattgggcatgttgtttatacacacataagaaggcagggctttgtatctgcaaggccaaatttgactgcaacgcatctcacattaatgagaactgacccccgccaaggccgacaatgttggttttgtgagcacctgttctacccatatacctactgtgtgattttggatttggggaattcccagaccgataatatttcaaaaaaatctaatggggtgaaaggatgtaggattgcttaagttttattttgcccttactttgtgaaatggactttccttcacttccatggaaaattgccagaaatcctagtctttatttaggtgacctgaagcacttgaaggacaaaacaaagacttaaagcattcaataatttgatgtctgttgtgccatttttatcatgtttgctccacaataaattgaacagactcttgcacttttcccttgggtcctcatgagcatttgtctacaactgttaataagttacatgggatctaagaataaattttcattggaattcagatttcaagtgaaggatcacccaacattgcgatccctcatctaacattatttcagatcctgagttgctgctttgttctgcatacttaaacataagtcccgg

SEQ ID NO: 72584 - DNA, 1032 bp, Homo sapiens
atctatgattactattaaaattataactataaaatgattatttttttaaaaattcttaatagatttgttcagtgctctatagttacaaagtaactatatatatatatatatatatatatatatacatacacacatatatatatataaattgtatttaatccccctaagaattctgaaaggatagtagaaatatcttcattttaatcgcatagctttgtgaccttgaatatcacaggatcacagagctagtaggtgcggaactgggactcattttctcaccactatattgtggctgctttcttattctcttaaggttacttgatggtgtcctagatttaaaactgtaaaggaagaactgcataatttgtcttctaaaagcactgagaggtgttttagggactatataaagatagaacagttactgagtaagtctattcagtctggatttttcgggtaagaaattctgctctgaagcttgtgtattgcagatcacaataatcatagacacatcacatagcattgggatagtgttagtgttggtacttaaagtgttgtcctctaaaggtaatgatcctgggctaaaatattataattataatctgtctcctcatcgtttctccctagggtgaccatacatgccatctaggcttaaatattggtaattttgagttaaattttcaaaaaccagatattatttagtgttaggcaagttgttaacttctctaaaccataatttcctcggttttatatgacaaagttaaaccagatggcctctaactctaacatttgagaaacttttcccttacattttttaataatatagattgtatttaatggatctttacccaaacattttggttcaggtaattaaaatgaaagttatagtgaaaagatccttgaaacttttctaaaaacactgggcgttcaggaattaatatagtgtatgtcccgatttctatcaagcaaacgctaagagagaattgtaaatttaggggtctaatatttcaaatgagatgtgaaagtatggtccca

SEQ ID NO: 72585 - DNA, 1787 bp, Homo sapiens
gtaagcgtaagagtgtattagactttgggaggaagccaaattatgctgtttggataatcagcatgatctatctctcagaattttcccctgcggtctcaattgggtacctattctatttttaacttagttctaaactctttgttagcattgctccatccaattaagctgcagctgctgttccatccctaaggattgtttatgtttcagtggatgagatggtcctaatatgtacggctacttaaagtatagttttaattcagggacaagaaaagattgtgtttaagtttgtgatattttttaaaacaatgcatagttaaacattggctctagaacatgctttcacatttcccttcttagttatatcatcacatataatttataagtctctgaatgataaagtgtggtttgctgggttttggttgtcttgcagctggtttctgatgccagaatcatcgattgtattactctctgtggtttctttcttttggcagctgatgtgttgttggtatgatatgtgttatgatataaaggtaaaggttggattaatcgtaatagaattttccatgccttgggtttttctccatactatagagattagtctccatgagctgcttccttccttcctttcagttaatctctgcagcctttctagtggttcctcctgtgctgttgaattcagcatctgtaagaatgtgtttgcattgtaccagagctctacaactttggccagctaagaaggaagcatctctgggagctttgaatgtcaatataaaaccttatttgcacagttgtgcacttttggctgacttgttcagtggaccatctaagttcatcactttgaacttttataaacattttccttaaagggatgctgctctcaaagttaggtttatgtgtatgtttaagcgcttaactctattaactactcctttatataaatatggaattttcccaaaacacttgtatatatattaactaagtttttaaaattgtaaaatgggatttaaaattaccttgtcctacttaatttcattgccgtataaattggcaccagaaaaacaacttgaaacttgacggtgtagggtttaaagagttaagaatttactgatgggttttaatacattaaaaaaaattttttttttttagagatagggtcttgctgtgttgcccaggctggcctcaaacttttgagatcaagccatcctcccccatcagcctcctgagtagctgggactacaagcatgtgccaccacactggcataaattttttttttgtatagtatatttttgtagttaattattgatgtagaaaatattgtctacgtatatatgtactattttttcaaaatctctccctgccagtgtgtagaggaaactaccatatgcctcaaagccatgtttgatgcctagagtgtgaaagacagaaaatgcctggtgatcaagatgaggcctggtctggcagtccccacagcaggagggaagcacagttgctctagagtgggctacaccctctatttcactggcccttcatcatctcttgcctctaaggcaggactgtgccttgcacttaacggtcacaggactgtcactgaacctgtgatgttgtctgtggagtgcaggctttctcttcttcccatctcattgtgtattgctagatttctaagaattagaagtatacacatgttttcttcctggggttaaaaatggctttattcagatgatgacaggtaaattatttatcttgaaatagcattttcaagagactaatttctatgtgtatttttaaa

SEQ ID NO: 72586 - DNA, 1063 bp, Homo sapiens
aaacagggagatcgggaaaggcttggtggagaggtaatgtgagagctgagtgtctggtgtaaaggttgtgagtggagagtgatttggacagagggcataacctgggcaaagctcccccgtgcatgtaacagcaaatgtagtgttggcagttggtgggagtgtctaagccatgttatgtctctggactgtcagagccaaggccctagatgtggttatcccacagagcatctgtgtggcaaggccttgcagagacaggccagtggccccactgtgacatctcaccctctctgtagtggcaccctccactccaacactaggcgctgtcatctcaaaacacaattagcatctccactaagaaatggagttcagaggatgttaacaggtatatatatacaatgaagcaaaagaataatattggaagctaaacaaaggccatttatctctgatcagtagctcactgaagggaaaagtgttttccagatctgaaaccttgctgagattttcagacagccctagtagatcaaagtcctcaatcctgacaggaaatattccagctctgcctcattctgtgtccttggtcagtgtctgtggtttcccagtctgccctaatgtttgatgacactaaggatacgtgttgctgttgtgcccctgtttgtttggccactacaggggattgctccctcaggaacctgtagctcttcatttttttcattacatttatttacccagtgacatactatatttttttcttttatcttcttctcacctcctttgtctttcctcttcttccatctcacccatcatcatctattctgtctacagatgcagtatttttatttttaaaaccttgcatttgtatcatgtcccacacatacccagaacccatttattccccagatcttaacttaaccatgtatgtgccaggcatagagaaaactaggttgaaaaagacaagttccgagacctttaggagtgtaaaaaaatagctatcatatttcttctgcttcctataaaatacagaacacttggatccaaatcaaatattttattttatcctcataac

SEQ ID NO: 72587 - DNA, 1011 bp, Homo sapiens
tactcagagtttacactaggtggcatgcaaggaaagctaacaaattcagaaactcgattctgtgggagcaggattctttggtactaatcacgatagtgggtccagctttggagttaaccatttgatttgtgatggtttttcttttctcctccccaccccaggatgaagtgtcctcttgctagcaccaataaaagatttctaattaacacaattaaaaacacattgccctctcataaagagcaagaccatgaacaaaaagagggcgataaggaaccagcgaagagccaggcccagaaagaagaaaacccgaagaaacacagaagccatccttacaagcacagcttccgcgctcgaggttccgccagttactccccgccacgaaagcggagcagccaggacaagtacgaaaagcggtccaaccggcggtgaggctggaaccagggccagccagccctgcgggcctccgtgctccttcggggtgcggtgtgcggagaaggcctgagctggcagggcaaacacctgagagtgactttgacattaggtcctttgttgtttttaaagaggctgctggccacaggcaaaaaaaatgacctagcaactcttgaggaaacaagtgcaaaggaggatgtcttggcaagtttaagctacttctgcagtgtagtagacttacatattgttgtttatcttgtttggaagtgtgtttcaaaataaacatgtctagaatttaaagttttcagagattgttaaaactggttccaattttttggtcatttctcagaaaaataaaatacttataaatcctatattttactttttgggggtattacatttaaaatttagaaatcatcagtccagtgaccatatttatgaaaagctgtagccctccaaggtctgggaatttatcgagaagctctttgatagctctgcatttgttttcccttaggtgaacaatgtaggaaatcctcaaagtggctttgaatttaatgctccacttcagttaccagaggttaa

SEQ ID NO: 72588 - DNA, 1150 bp, Homo sapiens
ctcagtcctcaaactacatgttttagtattggctaattaaatatggtagtcatgttttaggtgtttaaggtgtttaagcagtaccttatttccaggcaccaaactctgttcctactatccattattatttaacaaaccacctcaaatcacaactattttaataccttcatggcttaaaatgacaaggtttattctcttacagttctggaggccaggagtctaaaatcaaggtgttggcagggctggttccttctggaggtttctgggagagaatccatttccttgccttgcactttccaaccttttttttttttttttttaacagtgaaccatatttcaatttattgacattgtcaatttatgaacaagacaggatttttttttcccatgaaatgagatccttttcaatctgccataacatgtgcccatacatcttcaccttggaaatgcagcatttcaagctttagtcagggtagattattccttctttactttcacaatttttacgctgttgccagaagtctttttggcatttgctttgaattctgtcttcagtgcatctctcactacttttgcacagatctgggagtatcggatgtagctgagtccagcctgtctccagtaggccaccatgctgtagcgaaagcggagcgcgtcgggccaaatcgccaagactctggcaatgtccttttttttctttttttttagacggagttttactcttgttgcccaggctgaagtgcagtgatgtgatcttggctcactgcaccctccacctcccgggttcaagcaattctcttgcctcagtctcccaagtagctgggattacagacatgtgccaccacacccagataattttttttgtatttttagaagagacagggtttcaccatgttggcctggctagtcttgaacttctgacctcaggtgatccacccacctcggcctcccaaagtgctgggattataggggtgagccaccacgcccggccaccctttccaacttctaaaggctgcctgcacaccctggctcatggccttccctcccatccatcaccgcagtctcttgctcccatcgtcatcacatagccacattctggggtcaaatctccctgtgtcattttaagccacggcatttgtggtaatttgac

SEQ ID NO: 72589 - DNA, 1633 bp, Homo sapiens
gctagtctcaaactcctggtctcaagtgatcctcctgccgtggcctcccaaaggaggtattacacgttgggattacaggcatgagccaccactcctggcctagtgtttatacttcaagttggactgattttaagggtttgtatgaaaccaatgcttttttgaattattttaacttatttcgtgtagatatgcactctaagggttgtttataaagaaacatgcacagccatatatagaaatggttatgttttatgaacaatataactagtttaatgcatagttataccttattttaactgcctgtgagccacaatttcaggtactttttaatatatatttttgtattaaaattacctcaggagcttagcttttttcttctcttttaaaattatgcagacattaaataagaagttgagtaaacagattcaggactctagaattaaagccagagctagaaattcttaacttataatttttaaggcattgagttagaagttacatatgagacaaggatttgtgggcatgggatgaagggccttacaggatggagagaccatacaggctatggagtgagtctagaaagcatagaacgtgtttagagaacagaaaatacctaattttataagctctataaggtgtatgaatggtagtacaaatggagaaagggtattagagcatttactcattttattcatagtcaacgggtaccctcttcagtggatattggaatttatgttttacagacaaggaaacttagttatgtgttttgcccaggctaataagttatggaagcacaattcaaaataggtctgtagctttggctttgaatacctgggtagtgagtaaaattttcatttcatgtggtggtttttacatagttgtaatccaagcagtaacacttacaggaagattagattgtcagtaatgtgaacagtagattggaggggaagaagcaaagagagccagtcttaattggttggatacttttatttctgtattcctcagtgatgttataaataaatattttgtttttcagagaatgactaatagtagcagctccccaagccttctaaatgacagtgccaagccatattcagcccatggtaagacctgatcccttttgcttatgtgtgtctgtgtatatatttcttactctaaaagtaatatacaaccattgtagaaattttgaaaattgtaaacgggcataaagaagaaaataaaaattattatcttcccactcagatctaactattgagatttagattccaggccaggtgtggtggctcatgcctgtaatcccagcactttgggaggctcaggtgggaggaatgattgagcccaggagtttgaaaccaacttgggcaatataacaagaccatgtctctattattaaaaaaaaaaagaaaagtgtataagttatatacaaaaatttcaacatgctattttattaacatcttgctctttgcactattagttatttaatattaaattcatgttaattttaatgaaggtaagtctgaaaaaccaggaagaagaaggcagagaaatgaagcagcagtctatatgtactacattgtgaagagatttaaggttcctttacgtaagggcatttaatatattttttaggatttag

SEQ ID NO: 72590 - DNA, 1118 bp, Homo sapiens
tgtgttgaaatccaagacaggatctctcagagtctatggttgacactgcccccacccctcaccctcctttttatccttcccaagatatggtctcaagattataaacctttatttactttaggtcaacttactgccttcataaacacactcacaatagtatggttaagaggtttttttctcttatttgatttttcttttggttctagtcaaatagatctatcctgatccatatagcttttgaatatttgagcaaattggttcaccagtttgtgttttatttgctcagaaaatatttgaacataactgtgtgttaggtactaagtttaattattgtgtcatttgatttttataggcattgtcaaattaaacagttattagatttgcgggttacccaagttttatgtgtggaaacttacgtaacttacctttcagatcctctaacatcacctgcttcatccttgtttaatgactttggtgccctcaacatctctcagagacgaaaggtaggtgaaattgaaacttgaattaaactaaatggaatttagaagtgatgttggcattgttacctatgtagtgtcaatgtttttgtaagtggagggagagctttttatgggctttagtgtttttcctgccttttgtttatcctttttctttatctttttatatgtggaaatttatttgatctctgcatggaatagagattttgtgtgaagggatgaaatcctgcttatttttgttcagtttatttatctcaatgtattctgttcttaagataacatctaatttaatgttaagttgctgttaatgtgacccattgtaagcatgttaatcatgtttaaactttattttttgatggctttatctaaatttcaaaaattcttccctaatttactcctgattacaaggcaaacttaaaattttcaacatttcataatgggcccaacaatttaaaaagttgaaaatctcttcacattagaaatttaattttatttggaatttagattgatagaccatgtatggatttttgaagtattttataaggactgatgttgtgacaagttgaataatttgatgcctttgagtcttaatgagaatcttgttaatactaataatcatct

SEQ ID NO: 72591 - DNA, 1578 bp, Homo sapiens
tactcataatgtgtcatgggaccagtgctagtctgtgaattgtctgttaggagataaacactgaaaataaatgtctagagacttctataacaatttgataatactgtgacattcgaatatggaatcatttttctaattatctttattttacaaaattataggaccatgatttataggagattttttaaaaagtgatcttttttgatgtttgagaagcactgattttcttttatttgtcacattaggaatgcctaattttatagagagaaaaagtaaccattatttgaggtttgttaaaaataggagttaatatacaagagattattacatgagtaaaccttaatagcaagatagataaaattaaatttgaccactgttatgaaaagaagtagttttgagagtcactgaatcacaaatgtgatctagacaagcattaaaatttccaatgagaaattatttgggaacaaaatatctttacaacagagttagatattggaatacagatattcataaatgaagtgattcagtgctatgatatcttgctgatgattcttgctaagatagaagtgtttatgtagggcaaccatgtatgattgaggcaaatcccaggcaaaatgagaaatctttcaaatttgtgtcagcttggctttctccttttatatctttctgggctattgcccttcttcatcttctttttttattcacctagtcacatttttattcagcttccccctacttcttccatttctttggtttatacccatcgtttatatttctttggtttactttagtatgttgtttcagtcaatatgcggttttatgtggatatttgtattatatttttaatacggagataacagattttcacttctgtaaatttttttaagttttaataacaagttaaattctttggggttaggaggcaaagacttttgaagtatcatgtttatctcttctgttcttgcttttaaagctttttgttaggactagggaagtgggaccaaagggagctggctggttcgtctgctgatagcttatttttgaggagatgtggttgctagaggtacagttctggattattctgcttgagagaaaaattcaccagcagtacttttctccgctttcttctttgtttgaacctagcttgggtctcccttttgcactgttgtttatcttaagagcacccatctctctctgttacaaaacttactgatgataaatattttatgttttctgattaacttgacatttaaaagttttcttatagcatttttattctaaagtcttcctttgaaaaatgatttttacattatttctattctaggcaagcaaatatggaataacaaagactagagcatatttacggtagagttcttctatggaaaaagataaagtaaatttggagaaattaatctgagtatagcatagacaatttggaatgtaaatcttaatccttctgatggttaagctaggccttttttgcatattgaatcaagtattgatgtcagaaaaaataaaggagaaaatggagaagacattgaaaaataactaaaattttaaaggagattgtaatctaaa

SEQ ID NO: 72592 - DNA, 1031 bp, Homo sapiens
caaccatgtacttcctgtactttattttaattggcactttgtgtgcagcgaccatttgtttttgtttaatccagaaaacttcctccaaattcatgattgtaggagaattttgttctgttgattgatttttaaaaagagctctcatgagtttgttttggaagcctttttttttaaaggtgtgtgtggtagtatggtgtttgatgctttatcatatttaaacgtgaactgaaatttttttatgccttttatatacagtttgtaatactgttggctgtactcatcatctaattttatagctttgaagattttgagttcttatacacagtaatggtagtttaagtaaaaccatggtgcatttatctcttgaacctacaaactagtagatcattctaaggttagctggttggcttctttacactctggtcattctatttgcgaagtgtagtagctgatatttaggggcctagcattattgatagctcatccctattttcctaggaggtaggtatggggaatgaattagtaaaggtgaacttaaaattctcatccacaaacatgctagcctaagctccaaattaaatgtaaccaaaaccgtgtggttttccccaactctgttttattcccaagatttgttgtccttgtattttgaaaacggggaaggagaacttttaaattctagttatttgaatgaagtctttatcagttctcattgattccatccatgctaattaaatacaaaaatatttcttcatttgggtatatgtattttgttatcttaggtttagctagaatgacattaagattgtaatgtgttaaggagtattacagaatgtggaattgatttctttgagttggatatgagatgttatagttaagagtacaattgttggaacctgaccctatgttaattttgagataataggcaagttattttaaccttctctcagacttacttttatcatctgtaaagttggtataaaataggcgctatgtcccagaattatgtgaattaaatacattaatggatatag

SEQ ID NO: 72593 - DNA, 1653 bp, Homo sapiens
gcgggggtgggggtagagattggggggttctcactatgttgcccaggttggtccttgaactcctggccttaagcagtcctcctgccttggccttccagagtgctaggattacaggtgtgagctgctgtgcctggcctctgctggatgttttaccacgggaaaaggggtgtattagtccattttgacactgctataaagaaatacccgagactgggtaatttataaaggtaagaggtttaattgactcacagttacacatggctgagaggcctcaggaaacttagaatcatggtaagtgataaaaccatcagatctcgtgagaattcactcactatcacgagaatagcacgggggaaaccactcccatgattcagtcactcccttaacacatgggcattattaatataatttgagatgagatttgggtggggacacacagccaaactatatcaaggggattgggaattttgttatacaatgttaacttacacgtgtggagcacaaaagctggttatcaataggatgtggcattttcaaatgcttttatttcataataaccagcaagatgggactggtcaggctatcaagaatagaggatcaataagggaatttaccttttttgggggaccactgtgttcataaggttggtctaggtaaggatttctagaagctcggaagggaagaggagttggtgcttttgtttgctctgaaggaggggcttggatcttaaagaactgaaaaaactttagtaaataaatatttcccttaaaattgtgtttgccctgtttattttctgatcttctctttaacctcttcctttcccttagcacctgcttccagttaatcaccaatagtggtttttaacctaccagatgttgccacaagtaagctttcactagttctctatttctgttattattgcctcaagttcatatccttctttctcgactagtgattcgtagccagggcagttgtgtctttttacccccagagaacatttggtaatatctggagacatttttggttgttacaactgggtacttggtgcttagtggtatttagtgggaggatagagatgctgctaaacatcctacaatgcacaagacagccccccacaagaaagaattatccaaagtcagtagtactgaagttgagaaaccctaacctagactactgccagagtccactaatttgtcgacctatttccacttttactccctcttccccaattcttcctccacactgccacagaccttcctttctaaaatacaaatctgattttgtcatttattctttaccatggaatgatcctcagattccttagcttaggaaacaatatgtttatatttacttatttattttaatttttttttgagagatgagacatgtcactgcagccttgacctcctgggctcaagcgatgctcccacctcaggctccagagtaggtgggactataggcatgggccaccatacccggctccttttttcattttttgtaaagatggggtcccactgtgttgcccaggctgatcttgaagtcggctcaaacagtgctctcatctctgcctcccaaagtgctgggattacaggcatgagccactgtgcttggcactaaaacaatactttttttttttttttttttgagactgag

SEQ ID NO: 72594 - DNA, 1509 bp, Homo sapiens
gggattaattagtaatttggaaattagcttatagatgagatattgttataatttacattctatgcaataaaacttttctatgtaatctttcgcctcaccatcatgttttacattgctaccatctcttttcagatgttattttgtattttgtcgcttataatggtaccttaaatagtattgataccttagggcaggagtgtccaattttttggcttccttgggccacattggaagaattgtcttgggtcacacataaaatacaccaacactaatgatagctgatgagctttaaaaaaatggcaaaataatctcaatgttttaagaagtttacgaattcttgttgggccacattcagagtcatcctgggcctctggttggagaagcttgctttaggatattttcatttagttacacagagaagattttacttttggattagagtttaatctctggctatttattgaaaaaatttagggtttataatggcacatgtttagagatctcttctacctattgaggagaggctttaggctagttaagggttttagggcatggagtggaaggagaggaatgatgaattccctttttgaaatgaagaaacgtaatttaatgagtgcagttaaagagggaggatgatacgttggatgtatttaaaaccatttttggggacgggcacgtggttcacgcctgtaatcccagcactttgggaggccaagacaggcagatcactggagcccaggagtttgagaccagcttgggcaacatggagagactcccatctccacaaaaagtatagaaattagctgggcgtggtggtacacacctgtagtcccagctcctacggaggctgaggtgggaggatctcttgagcctgggaggcagagattgcagtgagctgagattgcaccactgcactccagcctgggagtgagaccctgacttaaaaaaaaaaaaaaaaaaaacccaagaaacaaaaactaaccaaagagcaacaaccttttttttcaatgttgtttactgtactactacatagaaagtgaattgtattgactgtaataactgtgtcaaaagtacatttgaggcccagtgcggtggctcatgcctgtaatcccagcactttgggaggccgaggcaggtggatcacctgaggtcaggagtttgagaccagcctggccaaaatgatgaaaccccgtctctaataaaaatagaaaaattagccaggtgtggtggcaggcgtctgtaatcccagctacttgggagactgaggcaggagaatcacctgaactagggaggcggaggttgcagtgagctgagatgataccactgcgctccagcctgggcgatggagtctcaaaaaaaaaaataaaaagagacactgtctcaaaaaaaaaaaagtacatctgaatttgtgaaggatctgaattacggaagaccttttaaaataattttcatgcattcagatatatgacctggaatttaggtgtccatgtataaatcatttgacaacct

SEQ ID NO: 72595 - DNA, 1842 bp, Homo sapiens
tttttgaagaaacttaattttaactctttgtttcagcagtcttatacctcatgacagaacaatgagtaaacatatattttcttatttcagagtttaaattaattaccttcctaagcatgaattagtgttttctgaagggaaaaaatacatacaagttttccttaagatgcagtctagtgcaaatttgctgtaattaagagaagtgagatagtggaaacaagcactaattttcatgaataaaagtcctgctaaccactattaagatagcttattaattttcttataatgttaggcaaataatttatgattttattgaataatttattcattatcaatctgttcatattattgagatttaaaagaccaatttgtgttactgttttgttgttgttttttagtctgaggtttttttttttcattgaatactttagggtgaatgcctatttaagatagagtgagttgtactcaagtctaacgtgcatagaattaaaattttttaaaaatcaatttattaggaaacaactgcgtttttaaaagtgggttagttctcagtaggaaataaagtaacaagatggtgagctgaaaaagttgtagtttggcgaactttataaaaaagaaaaatctgtattctgtgtccttgaaaccatttcttcatattgcagtgagaataggtaagtgacagtagaaaaaattttgcaaagcatttttctttgctgataagttaaatttctattcattaagtaaagtcgtataaaatcagattaaatgtatttttctaaaaacatctgttgctttatataatattctttagcccattaggagtgtgggttattttggaggtgtgggtttggtgcaggggtgggaggtggtgggtggtggtaaggatattagaaggagtgttttagaaacttgtttcctatcccaccgttcccagtatcctgtatatgttagttatgttagtttagattagtgtgggggatgttaggagtggcctggtttctttccttctttttcctagccaaggaagtatcgcctggggatgctggaggagaggctagttccgatgggatcaaaggcacgaaaagcaaagaaccctattggctgccttgctgacaggtgtaaatcaggagtacccatcaatatggtttggtggaacagagtcacagaaaacaatttacaggtaaaaataatttttattagacatttcttgaaagtgaatgtcttggctgctttctgtgtctgtttggggtggtggttgtgaaaggattggatgacttagctggtatacttaggtaattaaaaaaatttttaatcagaataaagttagtgacccttaaccaactaaatgattttttcttggtggctttttgagcttttcctctttgtagaatattttacttttgtttgtttgttttttgttttttcagacagagtctcactctgtcccccaggctggagtgcagtggcaccatcttacctcactgtaacctccacctcccagattcaagataccatgcctcagcctctcaagtagctgggactgcaggtgcacaccaccatgcctggctaattttttgtatttttagtagagatggggtctcgccatgttggccaggctggtctcgaactcctacctcaggtgatctctgccttggcctcacaaaatgctgggattgcaggcatgagccacctctcctggccgaatattttactatatttagttaaatttagtttttctgttttcaattttgttaatacttgagttcaattatttttactacccaagagttattcaggataggactacattgaagagtcatataaggccgggcatggtggtgc

SEQ ID NO: 72596 - DNA, 1003 bp, Homo sapiens
cactttagagtaatgaccttgtgttcttcatggaagggagaaaaaaggtcattaagaattcattgtggttctgtctactgtgacaaagtttaaaaattttagaaagaataaagtgtgggctgggtgtgataactcattcttgtaatcccagcactttgggaggctgaggcgggaggattcacttgagcccaggagttcgagaccagcctgggcaacatagtgagacccctgtctctacaaaagaaaaaataataattagctgggtgtggtgacatgtgcttgtagtctcagctattcaggaggcagaggcaagagaatcccatgagttcgaggctgcagtgagctgtgattgcactgttgcactccagtctgcgtgacagagcaagaccctcttaaaaaacgaaaacaaaaaaactgtttcttaaaaaaaaaaaaaaaagaaaagaaatgcctcatgtatcagctttctacctatctatattttcattaatattcttatttttcctcctgtctcagacaaataggtgtttgttatatactgaaggccatcttgatttttttccagcaacttattccttcatgtgtctcttcaatattactcttatttctctatgttggttacatcctcttaacttataagcattccatgtttaaatcttttctgatactttatgaaccccacaacaaagcatgctacatgaggaaaaggttctttggtcagtacatttggaaaactctgcgatacaatttgggaaatggttcctacttattatggtgactactttttcaccttttgttcatcccttaattcccaatattttccctttccttttcaccattctattgaaactgtttttgataagatcgtctaactgacttttttttttttttttttttttttgagacagagtttcgcactgattcacccaggctggagtgcagtggtgcgatctcggcttactatagtgtctgcctcccaggttcaagcaattctcctatctca

SEQ ID NO: 72597 - DNA, 2019 bp, Homo sapiens
ttagctcttagattgttattagtgggttttttttttttgtaagacttcttggcctttgtactgccctcaagaactctgccaagctctgtcattgactgttttttctttcactctttcttcatagtgctcttctgtaatctcacatgtcttcaatacttcagctccttcctagtcacatttgactcctggatacttttttcccctcctagtcctctgcactcattctattatatttctggtttcttctgaacatcttcatctccatgacataggacttaaaactcaacctgtctaaaatgaacaccaagttagggatcctccccctctcacagaggcagggcgggttcctgtaaaaaataaaaataaatgaataaaaaataaaatgaacgctgtatatttttcttcaaacctgtttttcatttacacacatctgtagacacttattcacaactatatgccaccatatatcttggttattgatatcatttggtgtctaacttgtgagctctttttgacccctcacttccttacctgccatatccttcagcaactaagatctgttgctggtttgaaattatttttactctgttagttataatgtagatccacctttaattcttgcttggattattatattgtggtgtcttagctggtttcctgcttctagtcttctttttcaaacaactacctgattgtctgatcttgcctctcatctttgtcattgggggaaaaaaggtcaaaatcccttatgaaggcatccaagctgctccttgctcttgttcctattgaactatttgtggtaccatgtagctaccatgaagagttccatgttcttgcttctcctttggctattctttttgaacattcaccttggttgatgtacccttccttctgtcttgatttagcaaacttgtcttttaagattgaattcatacatacggtcttatggcctaattaaacagcattagatgtttgctcacattgtcctagcacttaccagattctaattattcatttatagaacttatcacataaactaatatcaatatactgatcatggcacattgtagataatatatgtcttttgatacatggatgttctgagttcttgagagtgtggaattgggttcaggatacattgtatacctgtgaaatgtcagcctgtgaacttgtagaacacagtgtctatgttttatgtctttcttcctcacagcgcctagtacactgccttgcacagtgtcttttatatattaggtattcaaataattaaatggatggacctggattattgattagctggatgaatatttgacctaatgtgttcctgaaatttaatgctttacatatttttgtaaattttcccttggtacagtttcattaaataaaatatcaacgtggaaaatatttgaaaatcttaatatatgttaaaatttatgattaatatggtaggattctttgttagaaagaatacatctaagtattataaattactgtggaatatgacaaataggttttactgttatatggctatggatagaagatatgcataagtagcaataatcgtagctgtgtaaagtagttcttgcctctttggaatgttgtgatagtctcactttcctgtactacttattcactgacctaagtaaacatttttcctccttttagggacagtgatagaataaactaggtggtatgccctgtgattatgaattattactgttattggagcacttttacatgtaaataacttcagattcttttaagtacaggttcagtataccttatccaagatacttgagactataagtgtttcagattttttttttggggggtatgtttgaatccatttagtggttgagcatcttaaacctgagaagacctggcccgaaatactgcattgaacattgactttgagcatcatgtttgagctcaaaaagtttcagattttggagcatttcagatttcagattttctgattagggatacctagtttgtagcagatgcacacatccggtttta

SEQ ID NO: 72598 - DNA, 1756 bp, Homo sapiens
gcattttggactattttatcaagatatcaatggcttttatcttgaccctcaacttctaagatttaggtttaactgggacataccggccctgacatacttttcattctgttggtagccatttgttcccttataactaggaaggtactacgttagtaaaatgcagtggctggttttcttctccagaaatcaaggaattggccatctgtttagagaacatgccactgttttcgggaatgttatagttggaaattttttaaaaacacatttaagtcacaaaagaggatttttttcccctttggaaaatatagcctcagacctgattatactttttcagaaattcatgccttagatgtggcagtaaaagattgattctgtagttctagtgtattttaattaagcccagatttagcatttgttctatattttatcactttttatttaactttagctggcacataactgataatactcgttttggagtttacatttgggttagcctggtgacttgttaccttccagatctagtattttgaactcttaactcattcaaattaaatagggaagttgttctttctgcctcctgtggaaatttaatgtgggcaatattatatagactttttatgaatcttatgtatagtctcatatgttctagtatttcttaaagctaaaaatagcatgccacttgaatatataaagagttgtagcatagtaccactgtgaaaaaggtgttttccgtgtaatctcatagccaaatatttttcagtgtaacaagtcacgcatggtactgcatgggcattaggatcgctttagtttttcttatatcttgattcctcccatatttgccgtgtttttaaatgtttctctaacctttactttgttacttaaatacatgataccatattattagggaaatgtttgaagtacctacaaaaaagaaagtgattaattttggaagaaaggcagttttgacctttatcttggtagaagtggtttaaagatactaaacttgaaatttgttgctcagttttgaggtaatctcaacctcccagttctctaaaacttagtagtttggtaatgatgcatgcttgataataaagacaaattttacacattactgaggttaaaattctgcaaatgaaatgattaaagtcttcaaatttgatgatcagatttcctttaagaaatataattatgacacaccaaaatatggaaccgaaaacacttgttaatcctttcaataatatattttacttagtaaataaagcactgtggaatatgcctagtagattcaatgtcttttttcggcttaaagtgtgttaacttactatatttgatttttaaatagacaccaaatcctactgcaagcgagtttattcctaaaggaggatcaacctccaggctgagtaacgtgtcccagtcaaatatgtctgccttctctcaagttttctctcacccatccatgggaagccctgctactgctggattagcgccaggtaagttgagtaactatttccagtgagttccagataccatgtctgtaagcaccatttactattaatttatcagaactgaaattgtatacttgaatgattcacatttgaacattaagagctttatgttctagtttttggtaccataggccaaatgtgtagttgagaattttaaagcaaaatttaaatatgaatgaaattacatataagaatttttatatataaaactcacaaaaaaatttaaaggggaaatggttatttaggaa

SEQ ID NO: 72599 - DNA, 1036 bp, Homo sapiens
ttatatgtctctttccaaagcatccgcaataatgggatccatatagcaatcagaaaactttggccttaattacatgccagtttattttgccctaacaatacttccttcctcgtatcagaaataaacattttgttaacttatttcatgaaactaatttagacatgccattcaaaaaaaattagccttttcaattggaggagttaaaaatattaaagggaattttaaatttaaaaacattcagtttaagaaaatccattaatgcttatggtataggtataagcttatttggaggtaggtatattcattggtcccaattggacctcacaatagaaacttagggtgaaattaattaatttaaaaattaaattagctgaaaatctattcttctacatagccctagcattaaatggttattctagctcctcttaacaatgaaagtgatcactctctggaaccattggaaataggtcattatatcatatgaaatgtattcttgaattctaatgactattattttaaaagtgctcttcattcagatgacaactcagttaaaatatttttcaacaatgatgaattattttgcattaattattttttctgtttggttattggtttaacactctggagatgagcaaagaaaaaatatttaagtctgcctttcggaaaaaccattgtactctcagtgtcttccatcatttcttacctacaaatgttgttttgtttaaggaagggttcttgacatttgccgtgtaaggttatagaataaataaagagtttatttacctacggtagtggtgatttagtttatttttaattcttactgtctattataggtgtaactcattgattttagttacaagtttttaatttaaagtttctatccccaaaactattgccctcgaaagtatcaaattactataaaatatgaaaccttaaatactttgacacttatgtaaactagggtaacatcattttcattacgtatgggaaagtacatatctaaatatatttttgaccaaatatatttgtcaaaatt

SEQ ID NO: 72600 - DNA, 1579 bp, Homo sapiens
tttttcaggtatattcagcagattcattcaaatctttccaagttatttagtttggagattgctttcttcattaaaaaacaagtaaattaacaactattttatgattaagatgagggatctcaaggtttttgtgaagtggaccttttaattgccctgtaatgaggagctcatcctagaaggaagctcctctgtgtatgcatgtgtaaggacacagattgtgatgcccctgggaaatttactaacagtagaactgtagaatcataacagggttgggagtgcctgctggctatattcccttctcagttgggaatttcaggaaactgaggcgagacgtttatggcgcagagagggatgtggctgctgcagctggcttggagacctgtcaggtaaggcttaaatagctaccagtagataatattctactggttgtggaatccctggttaatgggtcctcataggtataagagttcctcttgtgaacttcctgtttaaatctcattgaattggctattttgtcccataattagggggtaggggctggatgggagtgggtagggatttcctttaactacgagttaccgatccagtgatctacagctgcagcaaagtctcttgctgctcttggactgctttcagtgtattatgactcgattgcctttagaacatggtaccagttctactgaagcagctatgtgattttcagcataccgcttggtttctgtgttttagagtcttcagttctataagaaggtaatagtagatgattttaagtctttctaatctaaaattctgtgtttttgagacatggaaatctgtagaagcatagaggacagtaaagagacagaaatgaagacagtggtgcgaagtagtaaaaagggaaggataacatttgtactagacttaagaaagattttagaaggcatatggacttcttgacttattctgtgtaaatagaaaatcttcccatggctccctttgtttcataggtggagatgaggggagttttgtttcagcaaatgtaagattagagtctggggtgaatcagagtattgtatttgttctggatgaactgagaagcagagagaacaggtgtaaatgaatgcccgagaatgtttccgatctgtttcatagctgaacgtggagagttagatgtcgatcttccttccaccttcttctttagtcaagtaggttgagagcaccagggatcattttttcttcaaccttttagctcagtgatacccagagcaatgtgcctactcagtggagaagatagtatttgtgtgaataaatttactgttctgtgtgttacatgtctagttaggagtggtcctctaattctgtaggaatgaatcagatggttgtagccccttctgtttcttgaattatcctttgattcttctcagcttgaccatgaaattcatctttttcttattcttactgcctttcagatgtagttactctagagtagggcatgtaggtagggtcttagtaaaaggagaggaattatagatgtggcctttttcaaacccccaatgcatataggcatgtaaatcctactcataaatgcctgcaacaacct

SEQ ID NO: 72601 - DNA, 1515 bp, Homo sapiens
ctatggttctggaactagtaatcagatatcttttatttacatgttacactttaatatgtatgtttttaaattgttacaaaaaaatcaactaaattgttcacatgagaacatgtcctggcaaaaaaagaaagagaaaataagagaaaacaactaaattgttgttaatgttagataaataagaggcacttattgattcaaccacagttttctggagatcaactttaatttttgtttgtactttggtggtagcttttttcattggaaagaaatccaaaattaaaattacattgttaactaaatcttacttttttgtgtgaatttttgtaattaattttcataagacactcttgtctttaagtttcttgtttgtaaacaacacaacacaatttatcactatgaatgaaggacaccatttactcaaacagtcactaccactcaagaagaaaaaaatggttcttttcaaccaaaacagttatatttagtagctaacacctttcttccctctgttttgatgcttcgtttaagtaagtgttattatttaaaagattgccaccattgtagagtctagggagatcccatcattttagatcatttggccaagtttggggacaagcaggtaggttactgttttgtttcttcaaacatagagaccgaagtaagtaacctactattataggccagtgggtaagattcctactagtatagttaaaaccctgatgctggttttttaaaatatgttgaattattcatgtttttgggatttaggcactgcactttatacaatcaatagtctaatgatatttgttaaattaattaatgacagttcatctagaaatgacaccattaatacaggcaagactgaagttatgtcaaagggaagattactatgtgtagaccaggaaaacaaagtagttgtgcaggctgtgatctctatcaaatattgaggactgtgtgtttgataaagctcaggttaaattcatcatataaattgacattatgtgcctgagtttggtcaataagattaaatacattttatgagaaagctttaaggtacttaattattttgttaatgcttacagtatttctaataccagatagtcttaagtatctatcatagatagatattcagccaaaatgaagtaggattatataaattagttgatgaaattctgtagttattaaggggaaaatcagagatggaaattaagttgcaattatttgggttagatccacatggcctctattaaaggtgatttacatgtaaaaataagtctaggcaacacagcatgacctggtctcaaaacaaataaacaacaaccataggcaggtatggtggcacacacctgtagtcccagctacttgggagcttgaggcgggaggattgattgagctcaggagttcaaggctggagtgagctatgatcacacaattgatctccagcctgggcagcacagtgagaccctgtctctgaaaatgaaaataaataaataaataaatctttttagagtactttga

SEQ ID NO: 72602 - DNA, 3384 bp, Homo sapiens
gcccagcctggtcttgaactcctggactcaagcgatcctcctgccttggcttcccaaagcgttttgttttgttttgtttgtttttcttaaaagcaaacagtaccttggtatcagtgcatattggttaaatatcagctctctaaaagtgatgattttgcatgactatttagaatattgaaatcatatggattcttttgttttacagagctctgtcttaggctcttagtccctgcttttgttatgtggagtttctttttatcttttcaaatatttatatccaaagagtagaattttgttttaaaattagcattgttaggccagtgaaaacattagattgggctggaacatggaaaaattaatggaaaatggcctagaggtagacagattttttttttttacatgttaagtacctgatgctcctcttttaaaatctttttaacagttttatttgccatcagcttcacagagtttggcacattgtttcttgagggttgtcagaatgtggggagaagagactagtaggtaataagactggaaaagatgggttggaacctaactatatcactggaactcagaaatgaacaggcaaccaaaccttaagacttaattatcatttctgcccctagagaacctgtgaaccagaagcaccaaaacttaattagagcttagaacattagttttcatacatttttaaaaaatagcagcagtactcttgtgaagtcctgtgtgaacccccaaacctaaagttacataaagcagataaagctggaatttaccggttcgggtttattacattaactcataaagttattcagtgagaataacaaggctatgtagtattttattgaatataatagcttgaaattggtgggtgaagaataataattaactttgtatccctcaagtctccttttttatatttttaatcatatagtaacatgaaaatcatgaattccatgggtaagttgtgtactcatgtgttcaagtttctctgagtacatgtgcatttaaacaaagattattgcagagtcactaccttcctaataaaaaacatctgtatgtatgcacaatggtgacaagagagaggctttaccttgaggtctgcatgaaaatatcctaacccaacacaaaattaagtatattggtgttggtatgttaaaacatgaatgcatgttaatttgacctgcatttgtgtgtttttatttatttaataaacagtggaaaaacagataaaaagaaattcaaatcaggcatttacaaaaccccgaggcactgctggaagcctaaggtgtagttaaaactgttttaaaaccactgccataggtggcctgtttctcagtaggagggaatttaccagtacataggttaaggaggctggaaggctgcagcacttttcttagctgagattcctcatttgaaccaaagagtacagaaaagtgatataagcgattattttgtcattctgcaaagggtaatgtctatcaggtggcattatacaatgggtgtttagctcattggtgcttaatccccctgaaaccccttttgaaaggttgggaaagtgaggaatcaataaggcattaaaaaccaaggaaccaaacaaaaaagacacttaaccaaaatgtcagatgcctatattcaaatgagtacaattttcaagacaatgcatggtcactactatattgtatttcacaagtctgagctcttaggcactgagtttatggctgagaatcaagatttgttcatgttaaaacttggaaatgagaaagatatattttaattaggatagattttcatttgattaattaatagcattgatactttttttaatgaaaagttgtattggccaccttcatgattctgtctggatgcaggcttgagtaacgtttgtaaacaaaaaaactttcagtctaattcatacaaaaggaaaaatgatgtttcagtgttatgaaattagcttgagctctttagttccttttcttattttttccccttttttttcataatagtgtattatagataaaaccactaactcataaaatgggaatgttcccttgttttgttatggcatatcttgaagctcaaaggctatgcatgttgatttttttttgggtttagacataataaggaaggcaagccactatttgaggtcttgaaacagaacatgttactcttttcaatcttttgattcagaatattttatttaacaagtgaatcagaaccttgaatttaaggaattatgtaacatttcactagttcattatgtatggcgttaagcagagttactctagatatccaaactgcttttctggtggagacttttaatcccaccccccccaccccccacccccgccaacacacacacacacacacacacacacgcatgcacacacgcacacacacacacacacacacggaaagtaaccaacttgtcaaagaaaaaatacaacaaaatgaaaatagctttggcccttataatactttccatttatgttcccttcatattttttcccagtgagaaaccatatggtttgtgctatagcttctcttgaaaactttgttagctatttaacaatctcactgtaactgagtgaaagctttaatcaagaactgcccatgacatatagatgcctttggttcattggctacttctgtagttgaaaggaagttgaactatttttttggacccagtaagtttgtcctttccacttgggtgttgaaagagcttatgagcagtagctgttctgatttttgttggttgttttctctagggaacaagctaccctctgagtcagcactggacttgaagataaatcctacaattcatgaaactgactgattcgactaaaggatggatagtttgggcagcgttggacagctctatgaggggtctgtttgtttaactgaagggattgttgagttcagcaacttttaattcccctaatcataaggggttgctgttgtgaaaacagggtttgtgaaggaatcagttctggcaattaacatcagtattcttactgacttcgtttttattttattgtcaaacttctttaaagtggataaattttactgctttttttgccagcaagaatttgtatgcactgagaggtcagcatagaagctttgcagtctacttatgaatccaagtttctttttttaaaatatatgaggttataaacatttctctcaagtaaactttttgacacttggattatttcatctttacaaaggtagtatgcatttgtggcttagaatttttaagatttaatggaacttaatttgagtagtaaatattttgctagtttagtgagtatattttggcttatggctaacatgctttttagataacttttattaataagatataatgaatttttaccctaaaac

SEQ ID NO: 72603 - DNA, 1295 bp, Homo sapiens
gtcttcttgatcccttttgattcctcttccctacccccaagcagtgatttgaatattaattttttcattgagatataattcacataccataaaatcaatccttttaaagtatgtaattcagtaggttttaatatatcaaaagatcatggaaccattaccattcaaattccacagcattttcatcaccccaaaaggaaactgtatctgttaaccaacacttcccgtttttctctctctccattccctgaaaaccactaatctattttctgactttttatagatttgcctgtgctgcacatttcatataaatagaatcatataatatgtggcttttttatgtctagcctctttcagctaatgttttcaaggttcatccgtgttgtagtgtatgtcagtatttccttccttttatgggtgaataatattccattatgtggatatatcatattttgtttacctgcttatcagttgatagacatttggattatttccactttttggtaattatgcataatgctactatgagcattcatgtacatgtttttgtgcgaacctatgtttttagtgctcttcggtaatatgcctagtagtggaatcacaattccactgttagggtcatagcaattgattatagccatcctagtgtgtatgaaacagtatattattgtggttttgatttctgtgtccctaatgactaaagattttgaggagttttccatgtgcttattggccatttgtatgtgttctttggaaaaaaatgtccattcaaatcctttgcccagttttaaatttacttgtttgatttttttaaatcattgtgtggtttttatattcttattcatactagacctgttttttttaaattgatacataataactgtacataatttgctggtatgtgtgttgttttgatacatgcatacaatgtgtaatgatcaaattagagaaattgggatagccattccctcaaacatttgtgttgggaatatttcacttcttctcttctagctattttgaattacacaataaattgttaactgtagtcacctcctatactattgaaccctaagtcttattccttctaactgtatttttgtacccgttaaccaacctcttcagtcccccacccaccaacacttctcaacttctggtaaccaccagtcttctttctatctctatgagatctactttctaagcttctgcatatgagtgagaacatgcagtgtttatttttctgttcctggccttatttcacttaacataatgaccttcagtaccatcttgtattgctgaaa

SEQ ID NO: 72604 - DNA, 1914 bp, Homo sapiens
cctgtggtgtttatagcctgatttacctcacctacctactttagttgctcagaaaaccagaaataattatgttgaggctcttcagaaagtacagagggctatccaaagaaaagaaaagtattacctcagttctctgcttatttttgttcacctacatgttttcagaaaacatgttggtatcttatgaattattagaaattgaaactcatatccctgttaatcataattttgtgactagggcatttttggtagcccttttcttatattgtgaggtggcatattatttcagtggtgaaggtttttaggcattcaccaaatagccagaaaacagttcctggataagcttatttttttcaggaagggtaactgttgctctaaatacccttttcagtctgctcagaactgatcacctccattaagcctttgattaacgctacctggttttaattaatttgcatttcatcagcatttatgcatgtagtttgtagtgtattagtttatatttgggtttttttaagttattttatgtcttttacatgtgacctggtctttttttctcagctagcttggaatctcctgaagggtaaagacaattgtcctttccctttcttcacaataaactcataatagagggcgctttgcacataatgtttcttactggttgtggttgttccactggaacatagtggttgttccactagaacataatggtatcaattggcctaattctaaatagtatgcatctgtagaaattttcagagtatgcctgtttagagttaatgacaaaaaggcatcaaaacaacagactgcttgatactaaaaatatggcacttaagctgctatgtatttcaacttttttttttttgctttttcaaacaattttgttaattatatttggctgaatgaaatctagtagctcttcattagataatttgaatttttaatactgtaatatatttggggaatgtgctatttgtattgttaatgattcttaataaaaaaggaattatgccttttataaaagaaaaacttttataaaaggcataattttataaagagccacaattctgttacttcccactcttccattaatttattaaatttttggtcactcttgctattaaatttcctgatgtaaaccttgatatggaggagactattcttgcagtaaatctgctaacatatttggaaataagtacatttgaaaaaagaaactttacatttgctttaatcagagctttttctacaacaaaacaagataaaattatttccttcatctttgcacttacgatcccaaagatgatgtttcttccaaatgaatgtttgcattttattttccagacttgttctctaaaaccaattattgctccattaagaaacatttttacatcttcttcaggaatgtcgttgtctgctgggtcttcccctcttcattcccccaagattactccacatacttctcctgctcccagaagaagaagtcacactccaaatccagcaagttacatggtgccttctagtgcctctacatctgttaataatcctgtttctcagactccgtcttctggtcaggtgatccaaaaggaaactgttggtgggacgacttacttctatacagacacaactccagcacctttgactggaatggtatgtctacattaaagaggaaattttagtactctcttgtaacaggaccttcttagttgtgaggcggtctaccccctcctgcagctttttattgtgatgcaaaaaagtatttcattttctaacttagatgagaagtctagtctcttcttctcaactcttcaaattaatctagttctgccttactaataattctagttttggactaaactggtttaatcagaaattagattatatccatgctcttattttagtctttatggcatgttt

SEQ ID NO: 72605 - DNA, 1196 bp, Homo sapiens
tttaaaatgtattaaaatttattgctatcatgtaaagattaaaattttatcaaaacaataataaagcttattgattatgaaaaattagtcaggctgggtgtggtggctcacacctgtaatcccagcactttgggaggccgaggcaggtggatcacctgaggtcaggagttcaagaccagcctggccaacatggtgaaaccctgtctctacaaaaatacaaaaattagctgggcatgatggtgggtacctgtaatcccagctacgtgaggctgaggcaggagaatcacttgaacccgggaggcagagcttgtagtgagccgagattgcgccactgaactccagcctgggcaacagagcaagactccatctgaaaaaaagaaagaaaaatgagtgattacatttacccccttcctacctttttaggtgtttccaaactatcatatttatcctccaactgcacctcacgttgcttatatgcaaccgaaagcaaacgcaccttccttcttcatggctgatgaactccgacaggtatgctttcagaattcatagtaggaatacttaatgtctcctgtgctttagtgaacaggggaaagaacagagctcttttcaaatcatattatttaatcaaatatgctctagtaaagcacatcgaatttagaagttttaattggtattttttttaaggaaacctgtcttttaaaaaaatttcaaataaattatgtggcaggatataaaacatagaatagctatttaaatggttcactgttctgtacttcattttatttctatgaaaaggctctttgaagtatataaataatttaaatggtttctaacagtatttttctaatagatgtaggttaaaaataagtagtttggctcaggaaataactttaagagagctcaatatttttttaaaagaatgttttttaaaagtttttttgttttgtttaatttttggtaaacagctagttatttggtatgtagaatttcactttacactcagattctcagaaatatttttgtttcatagaagtgagttctaccagtatagtgttttttaaattaattattaccagtttactagtagaccttgaattttcagccacagcgttagtcacgtgttttgggtagcccagctacccgtgtttaaggggcacatctacttaaacccaatcttaattatggcatgtctaagt

SEQ ID NO: 72606 - DNA, 1045 bp, Homo sapiens
tcaaaccttcttgaatatattatttaatatatgaattaaaaatttttatttggaaattagtacctcatgagcaatgtataaatatggcaatttttttccatttctgatggaatatgaaggagacgtcaattagagtttactggagtagaaaaattgtcttccaggttttcgtcttgttaacacaaagtgcatggtgttggtcgacatgtggaagaaaattcaacactcaaatatcgtaactttgcgtgaagtatttaccactaaagcatttgctgagccctgtgagtaacttgtaatttgtctttctgctggtgagcttcattatttgaagccagctttcagtaatgagtgtttgtgttttattttaagctcttgtgtttgcatatgatttccatgctggaggagaaactatgatgagcagacactttaatgaccctaatgctgatgcctacttcaccaagagaaagtggggtaagaaaaagatgcaggcaaactatattttgactaatgcttttgctctgtggaagagtagttttctattttaaaatacgtataatttttccctgtaatcatttagtttaaagactctattacattttgtactagttgttttcatgttcctgataaagacatacccgagactgggcaatttacaaaagagagaggtttaatgaacttacagttccatgtggcttgggaggtctcacaatcatggcagaaggtgaaaggcatgtctcacatggcggcagacaagagaagtgaatgagagccaagtaaaaggggtttccccctgtaaaactgtcagatctcatgagacctattcactaccacgagaacagtatgggggaaattacccccatgattcagttatctcccaccagctccctcccacaacactgtgggaattatgggagttacaattcaaaatgagatttgggtggggacgcagccaaaccatatcacattttaaaaagaaatatgtcaaagaaatggagatgatggtcaagaagttaggaaataatgtcttttgcatatttactaagat

SEQ ID NO: 72607 - DNA, 1272 bp, Homo sapiens
tgttctttatgtaattatttccctaaacaaatgcttttgtttgaaggttggattccatgttacttaatctaaggtttcaaaatagaattttaagtaacttttccttaaacatgaaatattttcttctttgtccctttctaatatatacttaaagaattgttttatcattgagattttgcaaacaaccagaatacttgaattctaacaaatgtgtgttaaagggtaaatgatttcagagaaaagtaaatccattttgagatgtctattcattaatttatgtatttagggaaggtctcagtctatgggggcaagaaagcagcatcacgttattatgctttttaatcttaagattttcttgacttgaaaattaaagaggaggggagaaagatttgagtccatattctagtatctttcagattacaactcctttcaagactctaattatagacaaaaatatattacttctgtttacttgttacttctttttttttgcatcctgacagttgaaaaaagaaagttgtggttacatggctgtttcacatttaaaatctggtcatagaatgtggtcatttttttccttttgctatgtcatctgtagacacatgcataattttgtggaaggggatgtggtacaactattcttatagatgactatagttgttgctcaaatttattttggtagtaacacctgtgaaatgactgttggctttaatttataactgtgtttctcaactgcttaagtttttgtgggggctgtcttatgcatttcagaatgtttatagtggcctcttctgactgaagggcctggcttctgcctactgaatgccagtagcaatccccctctacccctattgtaatgccagaaatatctccagatgttgccaaatgctggagtggtttcttttgagaaccactcttttatagcattcttttccagtaattttttaatcataattattctgtttttggtgttcactgattaatatattaatgtttatattttcataggaagtagtccttttttctaatagtttaaaatattgtttgagtagtcgtaacttccctaaccataccatacatgcataaaagcctaccattttcttacactatgtaatttattatcttagcacaagtgaaaaaaaaaagcaaagtataagaaatatattgatttagaaaatgagaagaatagcataccatgtggagttgatacgagattcagaatgagtctatatcagtaaaacaactagaacagagtctggcacacagtaagca

SEQ ID NO: 72608 - DNA, 1033 bp, Homo sapiens
tgaacaagttacttcttcaaattgtgttttgacaaccttattagacaagtgtactactaactccattctgcttatttatgaggtacccctcataaagttattgagggatttgaatgagtcatgtaaaatgcttagaacagtgtctggtacatcttttgcaagtgttagaaagctaactagttctcttttatgaatgactaataaacagcttggaatggtgaaaaggacactgacctgttagtcaagagatgtgagttatagttctggctttctcagtttctgacttttacagctgtaggtatatcacttgatatctctgagccttaattttaccatttctaaaatggtggttggtggaggtggtgtggggtaggatggaagttaaactcaattctgagatccttcctaatattttgggaaatgttacttttccatgagtatgcaattttttaaaaacttattttaattattttctttaaattatctggtccttaaaggttgcgagtaaattgtgttggagtttttgatgttttaacatttgataacagtcaaaataataatccattggcattaatggcccagtaccaggtgagtaagaattaacatggatatttacttgttttcctttattaaagacaaattttgttcattttaaagtatttcagtgttttaagcctagattttaatttattttggggtggtgtctatgcagactttgaacatgtatctccccctcccctccctctcttttcttcctttcctttcccctctctatttctttctctctcttttcctttctattcttttgcttctgtcttgctctgtcacctgggctagagtgcagtggtgctgtcagctcactgcagcttttgaactgggcccaagcaatcgtctcgcctcagcctcccatgtagctgggactacagatgtgcactactgtgtctggctaaaattttttttatttttattttttgtagagatagaggctcacgatgttgcccaggctgtatttcttaaccattatgatgtactt

SEQ ID NO: 72609 - DNA, 4054 bp, Homo sapiens
tctggactgtgtcatacatgtactttatttcaaaaagtggatgttcttaccttgagtccgctttagagaggtgatgggatgtactaaaaatcagatgttattttttaaacccatctggttcttcagctctcttggaccattttggttttctgtctcataatagagaataatggaatattctgggagggaggcttaatacagcatcagttcagggtggaaccaaactgaaaattctgctgcttgaagagttggaagactgtgtgttggtacctgctgctcaaacacgtgataaataacaacaatctttggtatgctttgctggatactttggattgaatcgcccatagaaatttatagttggcatttatatgcactgatttcttttggctgagatttctgtaatttcatgaatataacttggaatgttttacttgatctaaagtgtgattgagaggaattctttttggagttcatcacagtgtcctccagcaaacagaaatgatggcaacagtaatagttctccttcccatgccagcttccctcctgccattctgggctcctgactctatcaccagtgaagttttaaaagttttctgggatgaatctttgaatcttttctaatagattcaaagtagtttgtctacctaatcagtctgtctccttatctcatgttcagtgtcagattcacaaatgctagttttggataaattttttagtatgaacttttaaatgttattttagtaatggagtttaacgtctttttactcattatttgggtaggctgttgttaagtataaccatataatgctagaatttcactaatgattgccttaaagttacaaatattccaacaaaccagtggttctcaatcctggctgcatattaccatcatttgtggaagcttagaaaaataccaatacctagatttttatcccagactaattataccaaaattgggacgaggggatggctactgctgattttggttttgtttttaagcttctcaagtgatggtaatatacagctatgcttgaaaattccttataataaacgaatgttcagtaaatgaacgtgtgtctaataatttagatgagttctcagattttaaagatctgcaaatgtctgttgtagaaattgcttcaggtggtttcatgttaactctgaagtactccattcttgaaggcatgtggttgttaatagcttcctaccaatcagggccacttgggatgaccatactgtttcctggagttataataggtgataaaggacttaattcagccagctgtcttttgaaaatccttttagaaggaaagcctcagaatggtaaatcttgagtgggagaggttttaggaaagcaggtggtggttccagagctcaaagatctgttagagtgtgaggaaaaatagtctatttggaaacaaagatagatgggatgtcattcattgaggtttgcagcatttttgatgttctagagaatttgctctaaaatctggttaatgctaatgtttgtaataggataacttttcttcagataatccttcacattcccactatattctgggagttacagaaaatgagcaaagtatgtatgttaagttatagtggtcatagcaaagcaaatgtatagtaaccttaaatttgttgtaatagagaagaatattacctctatttaaataagaaaaaattagaaaaactttttaaaagtggcaatttgtagttggcatgggaattgcttaaagtctcttaaggcgtggacctagaactaccttcatcagaattacctgggtgctttaaaaatgttgagccattttctggacccacccaatgagaatctctggtagagaggctcgaagtcgtctttttaataagctccaggttattctgagaatcaccagtatttgaggaccctgcctgcagcttatttataatgatgctttttccatttaggcagtagtgtcagtgtattaaatgagtacctgtgaaatgaaaattaaaagttatatttattctttcatgtcagcaagcagatctgatatcattaggaaaagttgtgttggctttggcttgcaactctttggcaggaattcagcgagagaatttacagaaagccatggaactggtgacaatcaactattcctctgacctgaagaatctgattttgtaagttttaatatatgataaattgtacagaatgattatttgcgataagacagagctttttttgttttaagtgattgttttggttcccactatttaaaatcaagcaaaacagaaactttatgtctttatttttattgcaaagtaaatatttcttagataaattgataaaccagtgtgtttaaattagttattgatgttttaaacatttggttaaagggcacccagtagaagtttgttggtatccactagctacatgtgaccttttacattgatattaattgaaatttaaagcttacttcttcaattacactagtcacatttcaagagctcagcagccacatgtaattactggctaatataattggacagcacagacatagaatatttccctcatcttggagttctgttggatagtgctgctctagagagtgtgaaagccatcatgagtaagcctcaggtgcaatccagtcatgtactctggccaaaatacccattctggaaagcatttgtgtggagacccccatgcttacactccagtatcttaacgctccagagaatccttgagtatcgatttgagatgaatttggcttaagagaaacccattgtgtggactactgtcacaacagaaggacttctccgtaagatatagctactattgggagatcccagagggtgggcaaccacgacctttattacagttatgagctatattagagaagaggtgctaatcaacagtctcttttagcttacagctgcccattctgatctttctgtgtagccctggatgatccagtttctttttggaccagccctggggtatgaattgggggatggagggtgggattgcccacctgttctttgttacactggcataaatgtcctacttgtgacagcactagaagccagtggttgtctggatcctattcataatcaaattcaaataagatgatttatcttctgaataaaaatacttgttttatatatgatcacaacagtgattcctagccttagtttgcaaatacctaggatgcctcaaataatttcaggttataatctctaaattttcctttttaaaaaagtggggatagaggacaaaaataatcagccatatgttaataattattgaaactgggtgatgatacatggggattcattatattactattctattataaatgtttgaaattttctttattaaaaaaatgaataaacaaaaaagccatactttaataataaacacaaactaaagtttatggagtaattaaaccatgtatcgggccctttcaaactgcttgatgtgaattaatttttttaattctcccaataactctataaattagataccattattagtcccattttagagttacaaaactgagccacagagataaaataacttgccaaagtcacatagcctgtaataacattaaatatgattagcagggtacacatatgtccatacttacggatgaattgctaagatatagtttattcacatgggtatagctattcatttatccacaaaaatgatgactactatatgccaaatgcaggatactttgaatgaggtgaacaaaattcccatcttctggagcttacaccctaatgggaagaaagagtaaataaacataaaaaccagtgagatattttcaggtagtgataagacctatgaagaaaataagagaattacaagcagaagagtgaaggagtgagtaggaggctgctttcatgagaaagggcagagaatggctttacgtatagaataagcggcagtagatgattgagaatctttgtgttctaacaggtagcccttgaaatgtgtagtattttctgccactgttctaatgatagaagaaatttaactggttccttctgctgcgtgttactgcatttc

SEQ ID NO: 72610 - DNA, 1057 bp, Homo sapiens
tatcatattccttttaggagcattatgtaaatatgcagttacagctttctttgattatttgaataacgtctgtttcctactagactgtaagttcctaaggtcactgaaaactcacagtggtcatctggttcttcacagcttgttttcacatggaatggtaggaaaccgatatttacttcctttttgtttcctaaacatttttctattttatgcttattggtgaagtagaagatgtacctgacctttctctattctgtaacctacagagtgggaggaagagaagagaagatatttaaagatatttttaccttttccattttatctaatggtaggggctgaaataaggaggtaatgtaaaataggaatgcataagggatgatttccccctgacatttgctaactgaaaactggaattcatagacttactagttcagttagattattttttaaaaacactgtaccagactccctcccaattttttgtttattgggaaaaagtaaaactagtttggagtctaaaaaatagacatatggccacagaccatacagcatgagttactgaggtaaaatgttcatttcccccaggtttcagaaggatcccacttggtcagagactggagaccgttatctgttgaaactctttagggatcatctttttcatcaggtgacagaagcaggtgctccctggattgacctcagtcatataatttcttgtcttaacaaggtaatttgtatctagattttttaagatcataattctgcctataatttgtatagagttgtatcttctacaaatactaggaaacttaagaaatcaggatgtactcttaaagtagcctgtaagacgttttattaataacattttctacaatgggaggatttttacaatacttgcatgaataattttttggggcagtggaggacagagtcttgctctgttgcccaggctggagtgcagtggcctgattttggctcactgcaacctctgcctcccgggttcaagtgattctcctgcctgagcctcccgagtagctaggattacaggcacccatcacca

SEQ ID NO: 72611 - DNA, 2578 bp, Homo sapiens
ttttgggatgggttgccctgaataacattacggaccaggtaaataatttcatagaagttcagtatagtacgtaattcttgtaagagtatcgtatgcaagctctctgtatgccacccactgttagttcaaattgagatttttgttttgttttgttcttaagaacataccaagaaaataccagtgaattgttggatatgaattccctgttagttgatttaaatcctttctgaataaagatcagataaacagtaactgaaggagcatgtatagctctttccttcaaattcaactagagcctttttaaaaagacatttgcctgctagtcagatacatttacatttatgcaaattttttaaataggagaaaattaagaaattgtgttaaaggcctaaagttcaggagtgtattactttaggttctttccagtttgctggtttttttttttttttttttttttttttttgggcgggggggaggtttatgaagttttgctctttgaaccacagctttattatggtcctttacactggagacagacacagagacactgttcagaagatgaactaaactcagcagtggtctggtatcaagagctttctgatgttttacagcctgaatttggagggataacgatctgctgtgcctttgcagtcactgcttagcccaaagtaatagtacttttgataataactcactctgtgcgatattcctgaataagtccatctcaaaagtttgggattttcctcctcttaactttcttaatatttggacatgcagttgtcgccaaacttgggtattcatggaatttctagtaaatgaaatacctatactttgatactgaagactgccaaatacataggaattttctttcttaaaaaacagtaatgaagactatatctcctttcccagcactgaatgttttactagcactgggtgctcaccatgcaactgaagaaaatgtggaaactcaaaaggtcaggacagacttccaagcacttgcaactgatgttactgtcttcaattttaataattacacatatttgtatatttcagagaagtttttaatatttctctgtccactttttataagctttaaaatgattttctctgccttgagatttgcatcaagaaaaagcacctctcttcacctgaaagctttgaagactagagacacgctttacacgttttaacaagtatattgagtccacgtttggtagcatcagttgttgagttaaaaagaaaattattgcatttgatctggatggattttaaaagaatataatgttcaatattaaaaggataattcacatttgccaccataatgttcttttttatgtaaaaagaagaacttggagacattaacatgaaaaagtcttttatcattagctcatgtatttgaggaagagcagctgtctttttatatgttttttgacaaatcatattgtattcttttgtacaaaaaagaactacttgtattctagaagaaatatgaaatgcttaatttataagcgggctggagattttttccaatattgttttctttgaaaatgaaaggggatcatctattttagttttggggtctgggaactttttgaaaatttaatttgtggaccaatgttttgtgaaagctaaagagggcaggggttaaaatagggcttgaatttctcattctgtatagaccagcaaacttccctgtgcaaggcaagtttacatcacaaatccaagaatgtttgcatcctaaatgctagtttgcttcagcccctagttaacctcaggacttggtttgcatataaaaggtagacagctgatatgttttcatgaataaatattgtcagccagaaaaggttggtgtcaggtaatgcatatttttttaagctttgttttatatttatttttcatttagtttttattgggaatggttttcaaagaactctcagttctgcctaggtgtttttgggggagccctgttttccatagtgtaattccatttaagaggttgtctaaaagtctttttaattaatagaaagattttaatatccaagagtagtcaaattaaggatataaactttccacaccttcctgtcgtgacagataaaagcacagaaaggacaacccttgaaatcatgtaacgttggtcatttcaatattttgtacctgttttaaattctgttagtgtatttacttcattgtaaatatttttgagggtacctttgtattttgcttttgaccttggttctgtgatttggatgtcaacaacttccctaaaaagcaccagtgtgttaggttctaatgtcatgacccaatttgtgttattcatctttaatcctgttttcagtctctatgtgtacagcagtatttttaataaagaattacagagataaatttgtccttttcttgcacgtgttcatataacaagatgatgattatcttatgattggattttaaaagattggttatttcctctgtattttggaggaatttttgtatttggatgaaatggcagcagatttattcattaatttatcaggtagtccttaagtcttatctactgtgtccttggatctgttctaggcactaa

SEQ ID NO: 72612 - DNA, 1032 bp, Homo sapiens
cactcgatgcgcaaaggtttgtctctctctaagctaagagctgattgagagcacccttgtgtctttaggctgggccaaggctggcacacagtagatacttagtgtatatttgctaaatgaatacatccctaccctctgctaattgtgcagcatttccttgcatcctgttgatgactgagccttgtttgctttttcctctttttgtttagtctagagggatgatactaaggatagtttatgggagctaatttgaagaacaggaatagacttgataggtgcaacaataagatattattgaaactgcccaaggattatcattatgccaaactattttccttattacttttaactccacttgcagagtgttcaggaggattgttattcaaaaaaaaaaaaaaaaaaagattgacaggaaaagtaaacaaagcataatcctaacataaacagatagaagtggctatttgattttctagattcttcccacaattccaactcgttttgcttagggtgtattactctcagagtggaaagttactggtgagctatggaattcctgggaagtagctgttttccacacatctgatttctcatttgactgtcattttctaagaatagaaatagagaagacttacaaatcttaaatatcttctttaccactgtgaatgtttaacacataagacagtgagatctactgaaattctatactattttgcaaatttggggtatgcatcaatatttatcgacccatccgtttagggtcttgacatatgtgccaacctaacatgcaaataaataaaaaaaaaactaaataattgaagctattagattcggataaaagtgtagagttgaatttttctggaataacagagccttttctaaatatatttaaattttgttttggcaatattaaatctaaaatttctattctatctaggattagaactagtaactatgttagaaaataacaattatggtgatagaacataatatttataaatttgggtttaagtgatgctaataaaatatggtttg

SEQ ID NO: 72613 - DNA, 1019 bp, Homo sapiens
tcactgtaatcacaatgtacataccatggaatcaaattattaataatctcaaaaccctgctactacttttaaaaatctgcattttcttgacaaataggagggtttatttgtttttttgtttcttgtttgtttccctgacatcaaagccagtgagaatgtggtccttcatgtgtggcccaggagaaagtcattagaactgctcttgacttctgtcccgttcttcatctcctttccagtgaaaccccagatttacgaaaaggccgtgtcatcgtttccagacccggctctctacccactgggcagcagacaaatcctgacttgtaccgcatatggtatccctcaacctacaatcaagtggttctggcacccctgtaaccataatcattccgaagcaaggtagggacagtcagtttttttactaactttcaaatactttttgacacctggaattaagattttttaatggacgcagatgggaatctgcatgtgggatgtactgtatatttgaggcaaaggctctccctgccttggaaaaaggtgggcaacagctactcttctttcttactgaatataccctatcactggctaacaatttcataatttttctctctagtttacagttttagaagcacaagcacaaaactaaggtcctcccatgagctgtgacatgagctcaggttggaactctggtctcctgtttctcaactgaagatccctagactttggcaataccactatgtcagttgcattagcattcccatttttcattttgtattctttggttatgatccaagttcttcccaacaccagtgatcactatgtttcctacttttgggctttgctcttccatctgtctgaaatgcacctccacccattgcctgcctcctaagagggctttatttatcaaaccccatggctcagctcttacgtcaccttctctgtgaactctcctcactgcctcattcagaatcacttcttccccctcagtatgaacagcactttgttcacgcccttgttac

SEQ ID NO: 72614 - DNA, 1048 bp, Homo sapiens
cagtaacatctattttgttatttgtttcctgttagggtgatattggtctcataatcacaccttattaaagtccaaggtagctgtgatataatccattaaacaatcataacttttccgaggagtctaatattttatgtctctctctcattattttattaactctctttctgagaaaatttgatcttctgcttccattgttaccgaacacttccatgacaggtttattttagttcaggagcacaaaacttatctctgatgactcagagcattgtctctggcattaataaaactccaaccatttcctaatatacagctgtgattactcgctagatattaacttggttatcatgtatttattattgttgaatatttactttagaatatgtttgggggatttcagccccaataagcatctgcagattattgggatttcattttatttttctctaaggatgagtaaccctatgtaaacacatcttttgaaaaggtagatttgtagtctaatagggttttaagaaaaagaatcaggagtatagctctgtctacatgtcacaaaacccagcatgtaaattatgaacaaactcttacttaggcattattgattgcctgctgtgtaacaggcgctgttcccacctgagcactgattaggatgtaacatctgatatgtaatgtacagaaaaatcaatatcagcactttatcattccagcttgtataaatccaccaaacctctagcataatgtattaaatcaatttaagtacccaagtaattatatttaactactttacttaattaccgaattatctagtaaatttaaatttccgctaatataataatttcttacatttgtttcttttcacttaaacaaatggtttcatttacttgatgccatttaatcctcacaaccatccaatgaagcatcgttctcttcattttacaagcaaaggaccaagaattcacttcacattagggctctgtggggagtcatgggaaagtgctcgcactggaataaggtggtcaggttttcccttcacattctcagtggcagg

SEQ ID NO: 72615 - DNA, 1006 bp, Homo sapiens
tattatacaaaaatgtgaaggcactatttgggaatcaaaatagaaactggaacaatatgcattttatggtagtttaacagcatcacattacagctccatgacatattcatttttttccagaaggaactgtgtgtggatctgaagattatgtcacatgacaggttataagacgtagttgaataaaatttaaaagttccaattcccgcttttatacttaaactgttacatggcaagctcctatacggaattgatcaaatatctcccagatcttttctgtgagactttccttctaagggaacccacagggatccacataaatgacaaatccataacattgaaacatgctgtcatcatctctatagatgcctggaactttgacactgaacagtaatgaaagcagagtatttggtaaaatatctggacatagaccaaactgtaatcctgatgctatgtaaaacagaaaactttccattttagattgcgagtcacatgcattccatgctatgcttccaaactggtaattgtttatttaaagagaacacggaggatgcctttggcagaactgaaatttgcaatcctaaataatttagagattagaaatctaaagttaaggcagttcaagcatgttattagtactactagtcttaataatacaactctatgcaaatgctcttgcagctaaaagcattttgtcactgatcagacactatgattctaaagaggatgcacaaattgataaaaaattaacaaactaatttaaaaactcagttactttcactaagccacctgtatatttagtctcacatacattgagtgtgtttattgaaatggcatctccactgagcaatcagttgtcatgtctcttccaggtgttcacaatctgaaaatgtgtatatttcagcctgaaacaacttctgagtagcataacactactggcaattatgatccattctataagacgtgacgtcagagctcagtttcctctcagacctctaaacagtgacat

SEQ ID NO: 72616 - DNA, 1057 bp, Homo sapiens
aaacaaattcaatcatgccataacctttcagaggctttcagttttggaataaaacccatatttctttgcacataagatgtttcacttttgtatttcatcagcctttacttctgcctcactggaaacatatttagccagttatctcaaactacctgaagcttgttcatttatattttcttgcctttattcatgttattttttcctggaatgcctttcaaactgacagcattcagagatcacctcaggaatccttcccacatctaaatttggtattttcattgtaccatgtgtgtctctatcatatcataatgtttaaggcttgctgtaattgtctagtctggactttttgagggcctcttatttttctgtctcctacttaaacaatatttttgacacagctgcctgggtgtgtgtttaaattttttttctatttaataatgttttttatttgtgttgtagaatgccagaggacttggatctgagctaaaggacagtattccagttactgaactttcagcaagtggaccttttgaaagtcatgatcttcttcggaaagggtatatgggggagttatgactttgattttgttatgtttctgtgaattttcacaatattctttaagtattttgataggctatacatgtgtatttagttggcagatggcaagtaatataccttacatggggtgcagaggggaagaggcttagatattttctgtagtggaagaggtgtctcatcaaagtagtaggttcccaattagagcatcctcctaggcagtggtgcccattagcatgatttggtaggattctttttatttatttttttgctactgataacttagccatttgccttcttgtcttaactattagggtaattcacttttctttgggaggcactagaacatagcagttgagagattaaactctggattcagtcggcctgggtttggatcgtggctctgctctttactagatgtgtgcctttggacaaatcacataattaatgtctcagtgtccttatggatagaataggcctaataatagtctgtatcttcttt

SEQ ID NO: 72617 - DNA, 1048 bp, Homo sapiens
gtggcctggttctagttgtgccttacctaacatactttatacatagtaggtgttcagtaaatgttaaacctattgttcaacatgtttattaaagatatattaaatattgaaagtgttagacctgaagggaataggcttagtttatatagtgcaagaagtacctcatcagagtaatagcaataaacatacattcattaaatttcttctagatgtggcaccagattttggcaagttttccctagtgattgaagtcttgaccaccaatgtctataatggatacattcttacattattatatatacctttttttttccttttggtgtgtaggtctatgaatttttagcacatgtatcaattcctatgactgtcaccacagtcaagatacagaacagttttgtcaccccaaaaaactctctcatgccatccctttatagatatgattttgagctctgggtattgagtgatatttaatctcctctaaatgttttttttttaatgtcctttcagtttttcttgtgtgaaaaatgaacttttgcctagtcatccccttgaattatcagaaaaaaatgtaagtatattattatgtccttatttttatcttctaatagataaatacttttactaatattggtttcattttattaaaacaattttggtactgaggatttgcccatgaagaatatgaggcgttattttcaaaccccttgtaggatagacttaaaaattacactgctcctctaaagctccctttctatgcgttcttacctgcctttttaatgtacgtctccaaagggtgatccacttctccattcctctcacaggaattttctctttcaataatgctgtttcttttatatttttcctgccatttttgctgttgacttccaagttcatatctctagttttgacctctttaagtcctgcatctccgagttactgtaggacacagccactaggcacagtaggtacttcgatgaatatgacatcatccccatccttaaataacttaaaatttaatgaggaagacaagcagtgggtaggagaaggc

SEQ ID NO: 72618 - DNA, 1001 bp, Homo sapiens
tatttggctaagtcattctggaagctactcgttttccaaagataaagctcttaaaaaacatggttttgagtaacctagggttgaatcttggcttagccatctactagtcttaagaacttgagtaagctggagagctttctgaaccttagattttttaatttaatgtgaaataaggagaacagtaagagtagcataggattattctgaagattaaatgaaatcacatgtttggcacaaaattgttagcttccctttttattttcctcttactcagatttcaactacagattgctcaaattctggatttaagtttttaatactatttgatccaaatatctttgcccagaattctctgtcttttttttttttttcttatctctatacttttgcagttttgggttgtcaagatgtataacagctgcctgctcctccctgcttttgatgcattcttaggactgtactctgatctaactaccagaccccttgctgtctggtttaatttacaggttcctatttttgtttcttcctcttcctcccacttcctttttttttttaggtttgacaatctagagaaatttttccacactataaagattttaaatatctctatggaacattagtaattgaaaataatatatttagtctggatacattttgttgggggtggggggaatgtgagaaactgccctcttagattctaacggtgtgattatctttaaaatactactatcatttagtcaaagaccacctattttggtagtctgtgggaatatcaaaaattatctgcattagctgggcttggtgacatggacctgtaatcccagttttagtgggaggatcactagagcccaggagtttgagaccagcctaagcaacctattgagttggactttcttcaggaatttgatcatcctacatgtatcaggaatgaggcgtgatgttaagctctgggattttgcatttcattacatggtatatgccgtagttttcctgagcagaag

SEQ ID NO: 72619 - DNA, 1311 bp, Homo sapiens
agtgatgatttttaaaggttttctttcttaagaattcttacgtttgtgtggatacaacaggtcagaagacaatacagataaaacatttttgtgaattaagagattgtttcccgtcctgtgggaagccactagaaaacttaagaactttgaaaaaaaaacttttgtcaatctgttttttctttttaaatccactattttgagatattattgacatacaataaagtacacctatttttaagtgtacagttctgtgggttttaattaacatggaacctggtctcctaaacagaggagtagaatgttttcattgcctcacaaagttcccttggtcccttttcagtcagtcaccccaccccagccccaggcaatcactggtttgttttctataactttaggttagttttgactcttctggattcttatgtaagcagaatcattgaatgtatctcttttttgagagtcttttaaaatgtttgtttttgtttgctttcagatccatcacaaagcgaagtcatgggagagccacacttgatggtggaatataaacttggtttactgtaatagtgtgctgttcatggaaaccgagggctgcatcttgtttatagtcatctttgtactgtaatttgatgtacacaacattaaaagtactgacacctgagaatttctgctcaagtagtatcagtgatcatttaaaatttggaggggtctttggtttacagccatgtgacaattaaaagcactaaagggagatcatgttaaagctcttaatttatattaaaacagtagcctttgtctttaaaaaagttgttgctcatgaatattataaaatgatctacaggtttcaattcaacctgtttctaggtttttttgtaaatttagttttgattaagcattataagcatttgagtctataaactttatagtagcatctttcagaataaacatttttaattgatttcagtggcaactctcaaattgattacaatatgagatatatcagtgtcgtccattaacactcataagaataatatttactgtgtcagtgctattttaggattatagttattgtttgattatttcaggttgaaaagtagaagttccaaggttttgattttggtctggtctttaagtgaaaaattaaagcaaccagtagatgtaggttaaacttttacttcatagacttaatatgtaattaatatattgccaagcaacactgttaaagaaaagtaaaactcattttttcttgttcttaatttatatattacaagatactgtaaggtattctttatgaagttgatatataaaaattta

SEQ ID NO: 72620 - DNA, 1049 bp, Homo sapiens
tcccaagtagctgggattgcaggcatgcgccaccacgcctggctaattttgtatttttagtaaagacaggatttctccatgttggtcaggctggtctcgaactcccgaactcaggtgatctgccctcctcggcctcccaaagtgctgggattacaggtgtgagccactgcgcccggccagcagatcagtcttaatcggcagattatataaatagatctagacctaaaaattacatgaactcttgttctctgtactggaataagaattctagagtaaagtaaccttaaactgacctgtccatagtctactttaattcatcaaacagagttctacaattaattaattcaatttttagatacaatgagttaggatgcttgtagaaaaggaagtatttagacagagtgaaagtgtttcctattttaaattggccattagctttcagaatcagccagtgattttgaatcctttctctcacagccagggtgccgttccttttcactattgtgccattctctgttctacggtccatgttgtcaaaagtggttcgttcgactgaacaaggtgagtttaatttgcttaagaaatatgaatctaccatctttacaaactcaaatctgtgtacaatcaatgtttaatgcttcagaatattctacagccctttttatgcacggatctccttttgaataaagtggtaagctctgtgagggaaaggcttacactcttgcaagggagcccctgcctagggccttgtactttagagagctccctcggctctgggccgtgccccgccctaagaagaaaggagctctcagggccaagtgggagatgcccactgggagctcaccacatctccttccttctagactgaactctgcccacctgggtccctgcaattcccagcccagttctgggcttatgtccagtaagggcctggatgatcctcttcctcagccaccttctcctgagggtggactgtgcccagtgtgctcacctgtagaccaaggaaggagccaaggggcgactccttctaaagggtgtggctggacttt

SEQ ID NO: 72621 - DNA, 1510 bp, Homo sapiens
aaagatttttgccgaattttcaaattgactttttcatttattgtttcttaattggattaatattcaagagaacctactactctagatcccttcccttaaagttggtgctcttagacctctgggaaccagaaaccacccctaccctcacctgccacccacgctggagtggtggcctactctctgtttgctccttaggacaaaggaacatttttgtttcccaggaggcaccaccatcgccttcagtgattcattcaatgactaaaaacggtttacatctgttttttaaatcagcttagcatttcccagtatacaaatggcacacactttttatattgactttggaaaatacagagcaatggcaagcaaaaaatgttttaagatcatgcaaaatttcttccatcaagtaactagtgtaatgattgacacatcttccaatctgtgtgtgtatgtcatctgtcattgtcattttggtccttggaagttgagtttatcttactcctcaggtcatgacatactaccacctttatttactttttatttttatttatttgagatggagtctcactgtgtcacccaggctggagtgcaatggcacaatctcagctcattgcaacctctgcctcccaggttcaagcaattcttctgcctcagcctcccaagtagcggagactacaggcgtacgccaccacgcctggctaatttttgtatttttagtagagacagggttttgccatgttggccaggctggtctcaaactcctgacctcaagtgatccgcccaccttggccccccaaagtgctaggattacaggcgtgagccaccgtgcctggcctagtttttttaaatttatttttagagacagggtctcgctatgttgcccaggctggtctcaaattcctgggcacaagtgatgctcccacctcggcctcccacagtgctgggattataagcgtaagccaccacactcagccacggtatgctaccatctgtagacagtgtaagtctcctctttcaattttatcttattttaaattcttttatttagtaaataaaggaagatgtttctcactaatctatctgtgaagacataggtaaaaaaaaaaaataagggcaacagccaagctctccctaaataaaggttttttttttttttttttgtattttttggtagagacagagttttaccatgttggccaagctggtctcaaactcctgacctcaagtgatcctcctgcctcagcctcccaaaatatgaggattacaggcatgagccaccacgcccgaccaaaatctgaaactttttgatcaccacactttaccacaagtgtaaaattccacacacaagtactcaatggcaactgttttatgcacaaatttgtttaaaatattgtataaaattaccttcaggctgtatgtatgaggtatatatgaaacataaatgaattttgtgtttaaatgtgagtcccatccacaaggtatctcattatatacatgcaaatatcccaaagtc

SEQ ID NO: 72622 - DNA, 1031 bp, Homo sapiens
tgtttattatcctggctatgcccttacattgctgttgtagtcaacctatgtcttcagtgttctgtattcatgttaatgtttatttttaaaagaactgttagtatatgtgctgttgtggaagggaaaaaacagcccacataagtaaatctgcactgttgaattgtatggatttagcctcttcccagggagaaagttattcagctgaattctgtaattgatcatttggtgtttctcaagaatattgatgaccattttcaacagcttgggatgagtaaggaagataaaattatatctttaaataaaaaatggtttctatttattgatgttaaggatatatgggtaagaattattcttactaaaaagacaacagttacttaagtgatcattttgtaggtttgctatttgtaatgttctagaatttgttttattcatgatttattttgtctattaaaacccgtttaaaattttcttttaatttaaacattgatgagacttggctgggtagcggaatgccagaaagggccaaattcctgcagctgcctgcacaccattattctgaaatgctgctatttaaatggcttagctaatagctgaaacatgactctctgaggagggtggtagctcctctaattttctgcctttgcctctgcctttcttcttttcctcttcttggaagttgtatactgagtgttagtcagtgcacaatttccttatggattcccagttggagatgagtgaataccctggtgagttgtggacacagcatcacagagagcctaatactgaatattgggttggggtctgtgttcctccctagattagagattctgaagcaaagagaccatgtataaccttcagaggttggtttcagatgtttacacagcatatccagtaaagattggttaaagaatgagatttattggcacacataaatatggacactgagcagtacggcagggttcccgcatgacatcatctggtgggtccagattcatttccatgtgactgtcctggctctcttctccacatcc

SEQ ID NO: 72623 - DNA, 1055 bp, Homo sapiens
tctagcatttacattgtgttgggtattactagtaatctagagaggatttaaagtatacaggaagatgtgctcaggttagatgcaaatactatggcattttatgtcagacacttgagcacccacagatttttgtatctggaggggggggtcctgggaccaatgccctgtggatactgggagatggctgtattcaggtaacttgccaaggccacagaggtgaatttagaactctctgattctaaactcacactctttcttgggaaccacgtcttttctctcagaagcacagatgtgcatgaaccctgcaatatgatgccaggaattggttctatttgctatggaattcaggaatgtagcattctatgttttgtgataggcatgggataggagacatgtgacaaaactgtaaggtggacctttaatgaattactagcctagacaccttgaaaaaccacatgcctggggcatggtctccgagcacagccatttttttctgaaatgaacaggtgctgcaacccgttgtgctggaattgtcagcgttggctgtgctctaacagtaataaagtaagaaaaaatgtccaagtgcttattaggcatctgaatttaacttgtgcctcctgcttaattagcatagtagtttggaatcctcagctcccagcctatctgtgatctccggctgccccggatagtgggtttgtagagccaccaggcggagggcgttttcccagctgtctgtacttggcgtgggctgcctgttttcccgcaagcctactgcttgcttgatttatctttattaacgtaaaatgaatctataagtacggtggcactgcatgctatttaagatcatttatatccaacttcagctaactgaagatggtgaggaaaatataagtaagcctaaaggatgttggagcagcctaaattgatgttgggaaatttgtatatgaagtgaagagtctgttattcttagtctgtttactattgtttaaaaatatctccaaaagatttgactgtctggtgtctcaggctgcacgctggtaaaagtagcagattaa

SEQ ID NO: 72624 - DNA, 2682 bp, Homo sapiens
taacttaggtatctttgagagtattttgtattgggaacatatttttactttatgcatggattttcatagttgatgaagctcataattatggctctcacattcttctaggacctctaaaatgttatttttattgactgtggtatacatagagataatttacataagccaaagagtagaaaaccctttgaactctaaatatattcagagataaacatcataaagactgacttagtagtctcacaagtatccagtaacctatatatctccttggatatacttaattgtttttaaagaattgggctaaaaccctacctttgaggctattcgtgagagaatttcaaagtttccaaacttagatgtctcgttttgaggaggttagatattctcattaatcacttctcagccttttggctaagatcaagtatagatattcttattaaattctagagttttatttcttgttttaatatataaaataagtaaatgttcttttaattattgaataggatttgggttctggggataattatctgaagtggaaaactgctagccttttggaaggttaatcaatgaaaatgagggttaatatgaaagctttttgcaatgttaactttagggtttacactgatgaatactataaaatacatttacatacataacacatttgattttctacgtctgacatgcattttaaataagatcagggttgacaagaaatgttattaataacttacagaaacagccattaacccatctcatgttcatcggcaatgagagagtcattttttattcatggaaaaagcagccaaaggtggcttgtgaggtcagacttcagagaagctattgcctgtttgatgttactcttaatgatgtctttgttcattctcttcagaagcactcagacaatgatgagttgcacccagagataggattagattgcaagcatgttttgttttatttttaaggatgttgaccatttctggttataagataaactgaaggtttggggaacatttttatttatagtacaaataatgtctagttgaactgcttcagtgttcttggctggcttgttttatgaagattagattatctgcttaccctttcccgattctacattctttcagcatattctatgtggtaagcataagctcagcgccagggctgccatgacctggacaagggtgagtcctcactcacacttgcagggaatggggagacaggattatgcacataaagccatgcagggaaatgttagcatggctatgattgaagaccacacagcatttggtgggcaggggagggaggaggcacaggaagggggaagtatccatgcatcctgagtgaggtgaagaaagacctcatgccctgcaggtcctctccaggctggctcagcactactgcattatgtcttcagatggaattcttccacattggttttaggtaattgacaaccttctgaatttgcttataaaatactccaccaaaggggaggaaaaacaactagaggtgggagaagataggtgaaaaaagattgacaaatatttgaaaatatttgaagctggatgatggaaccatgaagattcattgtactacttcacttgttgtgtatgtttgaacatttccatagaaggttaaaaccccaccttctctctgtattagtttttatttattttttgttttattttatttttacatttagtggtccctagaaagctcttagacaaccgttcttcttctaacctttttgaagtataacagacaaataaagattgtgtatatttacattatgatgttttgatatacatatgcattgtgaaatgattactacaatcaagttaattaacatatccatcacctcacatagttacctcttctgtgtatatgtgtgtgtgtgtatgtgtggtaagaacatttaagatctatcttctttgcaaatttcaagtatacaatatagtgttattaataatcaaccccatgctgtatattagatctccagaacttactcctcctgaatacctgaaactttgaaccctttaaccaatacctccccatactgatgagatgacacagtagtggtgaagagtacagactctggagatacattgcctgggctcacatcccacctctgcagtttgctagctttgtgactttgggcaagttgcttaatttttctctgtttcctcattgtaaaataataataatattaataatgattaaaataagttaaaccatcaatagggtcgatgggagcatcagatggaattaatatctgcaaagtacttagaaaggagatttgcccaataataatgatgtttctgtgggcatttccatccattggccatgtgtgtaaggattcagaaactcagttaaaagatgaccatgatggattaatgtatctgtgatggagtaaagaaagtgcttctgctgacatctgagtcaggcagacgacatatattctagttttgaatttttataacaacctcacacatatatggtgaataaccttctgagtgagtgttaagctaaaaacatatcgtttttgagacatgaaagtggaggttgatcatttgattttcatggcaatctctttcttttgagttgtaaacttgtggtggtttggacatttacaaaatacagacaaggaaaatcatgatttctttatttaaaaaggctatggcg

SEQ ID NO: 72625 - DNA, 1050 bp, Homo sapiens
tcaggattatttcgcattataaataccagaaaatgtgagtgcatatacattaaatgtcaataacatgattttgaaaatcttacggaaggtgaattatacacctcaatgaaaagggaaataaagaactggcaatctttacatgagcaaggatgaaaaatataatttcccaaagtcaacagtgaatatttatgaatggtggcatttggggtaattttagtttttttctttatcttctaatcattatttaaaatttttgatgctagccatgtgtcactcatgttgttaattcaaacataaaaaaaatgccaggttgccttcaactgtattcctcactctgtgcctactttcagttttgatccatgtctgggtgttttgatcaatgcctgggtgtttcatatatataaaactgaacaaagtctaaatgtattcggtgattacataaaaaataagataatgaggaaaaccttcatctttgatgcctttatattgtgcatcaaaggatgaccctagtttaaaaggaaattgtaaatgataaaacaaaggtttagttcaaaccattgccctaaatgtcgggccttgtagaacatttctttagatttctctaaatgtggtggcaagtgcatttctgtggaattgcggacactctgtgcactttctctggtttataaatatttagtactatgattactcatatattcaggtattggaatggaactgttttcccctggcagtcttttttttttttttttttccccatccggaatgacattccagattcagaaaggactggctgtcatttagctctgttatttgagagaactgtaattctgtatttctgtcattgggccagagtccagattctgtatgctggtctttttttcataattgcatttataaaacgaacatttgggctcatgatggcaacctttcccgaaggttggattccctgtgcaaaagactggagggtgatctttccacttagaatatgtttcccaagcaaatctaccttgtcttcttcatatcattgttgtttaaacaaagaggttcagc

SEQ ID NO: 72626 - DNA, 1050 bp, Homo sapiens
agtatctaatagatcatgcaaagtcctgattccccaagagaactggattattttcttcctacaaatccatcatattcagagctttactcattttgtttcaagcagtatgtacagggatttctcattgatcatttacaacatgcctgtttattatgtggggatagagaggtactaggaagaaacaagaaagataaaaagctatttcaaaatgtcaggaattcacctaatctcaaggttcatgttattttccatgggggaagaatgtgattagttagtaataataaccaactcatttatttacaaatatttactgagtgggcaatgcttgtgaagtgtattgtctaatggggaatatggacaggtgagaaggcattcaacccatagtgtagtaaagctgtggccccagagctttagaacagcaggctgaggagtgaaggatgtgttggagtagagggaggaggctgctgcagagctctccctacaggaggcatggcactggtgtgaattacgaagttgcagtgactgtggaaaaaaaaagtggactagatttaagacagacaacaagatgtatatttcaaaagatttggcattttattgagcataaagaagtgagagagggaggagatgaaggcaagatcattatttatggcttgggcaaaaaagcacatttaccaagttagggaagctaaaaatgaaaagaggttttgttaggtgacagtgagttcaattttggacatatggagtgtgatgtgcatgggagatatccgaagagaaacattcatctataggttggagattatatagagagataagatgtataataagatatatgtctacatgtatatgtgtatacacatatatggaacacaaatattaggagttccataaaaacaacagagaaatcagaggagaggtaattatgaagcaacatatcaagaaaatttcccagaactgcagaatgagagtttacagattaaaaggccccctaagtgtccagcataatggatacaaaaagatccagagcaagacacatcagcatgaaattttaca

SEQ ID NO: 72627 - DNA, 1037 bp, Homo sapiens
ttttgactggtaatgtgttctggcctccagatgaggccccagggctgtaacaataactgtatgtgagacagtcttgcagatggaaattggagctcattgcacagctgatgagtggcagcaccaggactggaaggtggctgactgtcaccctgtgctccttgtccctctgttccacactgcttctcacaccaagaaggaataacgagggtggtccagtcactcagttctcaaggcacccctgctccatggcaggcaggtagagacaccttccattggggaacactggctcagaacagccaacactgacccttatgccagacagccgtgaatctcagtgacattacagaatagtttcagactgtaaactcccttgtgctactgtgaattttgttatttgaagcaacatatgtaaacacttgcttcatctttaaagacaaatagtttgaagtggggagttcccaagaagaagaggattcctctgccctactcatttctctgggggtttgacttggcataaccagtgagtcgtgatgtgttgattgtctcactaacttccattcctaatagattgaattgttcagctagaagaaggaacacacgagaggagatgggttcatgggtcagtccctttatcagtgaagataaaagacatcagctggccgggcgcggtggctcacgcctgtaatcccagcactttgggaggccgaggcgggtggatcatgaggtcaggagatcgagaccatcctggctaacaaggtgaaaccccgtctctactaaaaatacaaaaaattagccgggcgcggtggcgggcacctgtagtcccagctactcgggaggctgaggcaggagaatggcgtgaacccgggaagtggagcttgcagtgagccgagattgcgccactgcagtccgcagtctggcctgggcgacagagcgagactccgtctcaaaaaaaaaaaaaaaaaaaaaaaaaagacatcagctttggctgctgactctcatgctggagggcagctgtgactgtcagcttgtgcatgccc

SEQ ID NO: 72628 - DNA, 1056 bp, Homo sapiens
ggagcccagtgaaacagccagccagggggcaccagctcctggactggcatctgtctctaaaatggtagaattaggatatgaacagtactcatgtagtggtgtggaagattaggagcatgatacacaaaaggaagaagtagttttaacagatatggtgatgatgatgatgcccttgtttcctgtatgtgacaaagaccctgcactttctccctgagacccccccaaaattgtcctgagcacaggcctgtctttgagcgtgcccaaggcgagaagaaccatgagggggtcctgcaggggccggagccatggaacggggaagaaaacagcccgcggacggggtcggcttgtccagggcacgcctgctcggcacacgtgttgccaacgtgaaggcagacatggtccctggccctaggatgagtccacgctgggcttccgggcctcaggtgcatctccagccaacctccaagggtcttgctccttctggggacgtacacagtaaatccacatggaaacaccaccatttctctttgctttagtggctctgcatgatactgtgatattgagttgggcattccattagagtagatcttgccacattgactaaatacacaagtatttattctagtagcaggcacaacctgcaaacacaaattcagttacagcttagctgtccgaattaggaaccgcttacatagccgcacctgctaaatgcagttacacagcaatactgacttccgtgtgatgctagaacgtggtacagtgtattaggctgctgtggtcagagttgtagcatcgttagcactaagtaattcctcattaggtggacttcggtgagagctttgccctaacctgccctgaccttgggtacttgagctaatttccacgtggccctggcttcgtggtttgtttgttttttttcttttgttacggacacccatcatgtatggctcctcatctgagccatcaccgctcccgaaacacatggggcggcagctgctgtgcctccttctcaattcttccacccccccacaccatcagaattcggatttctctcca

SEQ ID NO: 72629 - DNA, 1947 bp, Homo sapiens
tcagaaaggtcgctaaatgtatactgttgtcagaattgctgagatctccccccacttttggtttttgcagcagtaaaaactctttccactgtgacttattttctctctcaggcagccagccacctggtcccttgtgctgactctagcacagtggccaggatccaatacgagtccaggggtgaccgcaggatggtgggggcagcgggcttctccacctaccccagccaccaaggccctgacgcactgcctcctgcaccttcagcacatccctgtgcacagctggaagggtgcatggcccgctcacctttgttcagatgggtggaaacgctgatgataccagctcctccctgccgtgcccctgccacggagcaggcattgtgaactggctggtgtttgcagtcccacgtggcatggcctccagcccaacccacagtggagactggagacagggcaatgagtctggtggggggcacgtggacatgccccataggggccccacccagacttaacaggcaaggtcctgggcattgcgcgacgcaggactcaatgctaaagcaagcctgcctggctctgtgccagggcccctcttctgattcacacatcccatttttacacagacccttccttcttaataaaggctgacagttctgttggcagccaagaacccacaccatgaagacagggagtgaggggcctttgtgcccaactccagcacagctgcgttctggggtgtgtgagaggcatgttcgtgtctgtgcgctggtggtctcgtgagacagttccgaggacggggaaattgcagggtggtgggggcgtgaggcttatatgtggaactgatgcagagttcgcctgcagacggatctggatatacactatgtataattgttacgtgtaatttaaaatatatctgtttgccatcgtcatgagaagattatatgtaaggctctgaagggagagggagatgtacattctgccaggctcctggggaccttatccgagtcatgaaattgattactgttgatccagtggtgcaagaagctacactccatgtgtcatcacgcttatgactcctaatgtatttttaaggcaaaaaatgtcagccgactccatcttcacccctcgattcctcgagtccagcctttctgtgccagtgcttcactgagccacaacgctctcgccatcgggacccggctgggcctggagtctcggggcacagttgccatggagccctcctgggtcattctacaaatgtgctgagtgccagctgaaaaccccacaggagatggagtaccttggccaagcttaaagagaagattttctcagggtatttattagtgtgtccagcagggtcaggaagcaggatggaaagatgcactcagactgttaatttattaacaaggcaaatgattttgtgtttcttgatgacagactattaagtttgggacttattttcccatttgagaagttataatatatatttaagatgataagtttcctgcttaagttgtgcctttcagcttcaatgagtttaaggagcactaagggtaatgataccaatgagggttggtttattatcaaacctgaatagctgtggtttctccagtaaatattttcttctactgaacatggagccattattaagagttgtgtgttttttattatgtacatttgtatatttttttgcttgtttgatgttctatttttctaatagttttcttttagtttcttaaagttgtgatactagatttagattctgatgctaactgcaaatcaggttggtctctgctgggtctctcctgcttttattttactttaaggacaagtgtagttgtcgtccaccacctttcaaaaaatgtgaaactgccctgcctcccctttttgctgacaacactgtgtacattgaccacttcctaccatactttatgttgtaaaatcaaactcttttgt

SEQ ID NO: 72630 - DNA, 1199 bp, Homo sapiens
catccggatgcttcggaccccacgcctctgcaagtgggagagacccgagcatcctccccacccccatagctccagtgcacgccacccccgtcttgcctgggtcggggcctgcggccagcaccatttcacacacactccttgtagatgggagccagaggaaacctgaacgtgggtggagcgttccactgagtctacttcaggagacagaaggcccatgctgatgggggaggaggagggatgtgggcattttggacaccaggggaaatggaaatgctgctttcaaaacttagtttcctttccatttcttcctagtctggcctttgacacaaatctggtagaaagaagcctgataaattgagggcacttgtaccctccctgtgcccccagaaggttcttggagagaagtgcaagaatttgtgaacacggcggtggagggcgggtggatggccatgggctgagcctccgtatcaggcctgctcaccttgctgggagctttattctgatctcattttgaatgttccagagggagcatcataagagcccagagctccgatttccaaagagtgatattgacatttatggagattggtgttgtaacatattttgataaatactaacttattttgttggggttttggttgtctcttgtcttaggacctggtagttatttgcttgatttttttttccgttattttctacataggcaaagagaattcgagggatagacagtctccaagaaaagtgaagtggtgggagagaattgcttttttcttttttttcttttctctagtttttctttctggctgagatttccgtgcaagacagcacccaatagactatttagagttgacatttgacattttaatgggcgccatggctcattttgtagattgagaaggtgcgtctcccctgctccaagtctcatcatgacagcgtgctgacagctgggagtctgtggccttcctcacgcagaggccttaaagctggacacagaagcacgcctaggctgggcagggatgggacccatgccccctccttagaggacgggcttcctggttaggaaaggacacgtgggggtgccttgcataatagttcactggtcaccgtgcttttatgagtagtgtttttgtgcacttgccaggggttttctctctgtgtgagaggggagtgatttaagcaatggtgtctggagtaagcct

SEQ ID NO: 72631 - DNA, 1050 bp, Homo sapiens
gggagtgggggtgggcactccctctctcttccccacactcgcccgacggtccctgtcactctcagttgtgctgcctttactagacagttttactgaactattggaaccggcgccactgccatggattgaagccacctcctgtctcttcaggttcccttcctgccagtgctccccatcctgagcatcttcgtgaacgtctatctcatgatgcagctggaccagggcacctgggtccggtttgctgtgtggatgctgataggtatgtgatgctgctgccagcacgtccaagatcctggcttcccctgggggtctcccttgtttcagatttcataacagaatgacgcacatccagtcagcagctttctcgaagataatgctgaatccctggtaggctgtgagtcctctcctccctgttagatactttttgtttccattgcttcttgtccaaactatttattcttttgggcaagaccttgatattaacaggaacaaggtgatgagtctgctgcagataaggtaccagttattttcaccccagacaggaaagtctggcctgtgcctcctggccccctggcctgcccagcaccaaattggtacgggcactaggcccaggcagggtggatgtcatgggctcctctgtgattgcgtcttctctgtggagggagagtgctttggagcctatgggagatgccactagggtggggagcttccacatgagatagatcaccaggggtgggtgcagcctgtagtcccacgcctctgggcatctcaccccaggggctggaggggaggatctcatttccttcccctcagcatctgagtcatagtgctgatagccaggaaagtggccctggccattgcccctcaggaccatgtccctacagcctcgcagccctgagtttgcatgctacgggcagatggctgctgcctcatctcccagggccctcgaggggtgcttttcctccaggaaatactttgcggcccactgtctgctggcagccgggtgggtcctcattccctgcaaagtccagcctgttagacagacgtctc

SEQ ID NO: 72632 - DNA, 1811 bp, Homo sapiens
aaacacacctatttttaaattatgaaacattttcttatgtgattctatgctcttgagagtgaccacagtggtcagattgagaggcactatacatcagaatgtgaccagtatatttacaggattaaggacttggaaatagtcattgttttctcaggctttacgtggaatttgatcatattaaagactggccttaatttccttcccctgctgatagagggagatcaaatcatgctctttgaagtgactgtaaagtacatgccattcacaaaatccaggatttacccttttcatttggtgggagtggtaaataagtatttggttttctaaaatcacctcacatggaagaaattagtctcaagtttcccgtgagtaggaacatcggcatttgtggcatgcacagttgggcgctgttctgattatccaaaaggccctccctcattgctctttaattttgtgttttattctccatttaaatttgttttagttgcagtgatctagaggggcttgagagatatttgtggaaaaataatggctttgtgtttatattttagcttgtgttgattgcatgtgttttgaaaatatcccaaagcagatgtagccaagttgttttttaatgagtacttgacatacacacccatgtgaatagacacgtatactctcacaacgctcacaaaagatgttcaaataagggtgcaggttttaattcattttaaaggcaagggacacagtgaaggggctgatactatattgtttgagaacaactcttcagatttcttccacgtgaagtgacttcacatgtgaagaactctgctctcctgcccgcctgcctgggttaggacctcctgtgagtcctcccagagcaccagacttgcccttctttatcacccagcactgttgtccactaatgcctgtgtcttggtggggtacactcaggaaggctggggactgtggtctgccctgttcaatagtgagtacctagaacccaatgatgggcacactctgaccggagctggatggatggaagatgggtagatggatagatgctgaatggatggatgggtggatcggatggatgaatggatggatggatagatagatggatgagatggatgggagatgggcagatggatgagatggattgatggatggatggtgagtggatgaatggaagataggtggacagatggattgatggagaatggatggaccgataggatggatgatggatggatgcacatgagtctgtgaatcagcatggtctagaggaagacacacaggactcagagtcataagaacccagttcacatccttataccctatgcttgtgaactgtgtgaccttagatgagtctcctaacctttgtgaatgtttatatctataatgtagggatggcttacaaagttgccattaaaatcacaagaatgaagggattctctatacaaatgttaatgatgattactgtctgttgaggactgtgtctgtgatttaatcacaagcttaaagggaagcttgacttccctttaagctgtgtctttccatgggaaggccagggagggggtgggagtaaaagcagcccccttcgctgccctggatggtgggcggcagtggtggtcctggttgtcattgcatgcagatggccctccacagatcctggtgtctgtctcttcccagctgtgatggccttcctctttgacctgaaggacttggtggacctcatgtccattggcactctcctggcttactcgttggtggctgcctgtgtgttggtcttacggtatgtatggcttttgggggtctcatgacagaaatgc

SEQ ID NO: 72633 - DNA, 2246 bp, Homo sapiens
ccttagtttctctggaattgtttgttttgagattgagttactggtaaatatgggacccggggtaggactggctggcggctctgcatccttcctccgaggggccctggggagaagggtgtgggactggccgcgtggctggtttctcccccatttcctgttggacccctgcctcatagtccccacgtctccctaccctagtcattgtttagaagatgcttctggaaggggcgatactctgcacccttgtgaccctgggccacgaacagcagggaggcctgcacacacggagttagcatgcagtggctggactcagcgtctgaagcccagggcctggcagcggtaacagggagggctgactgccaggttccgctcatatcaggagatgagcacagctccttacgccagactgcgcagcgagtgacgtgacatttgtttgcggctcttttttctagtgacacaaaagaagggaagcccggtgttggtggattcatgcccttcgggttctctggtgtcctgtcgggggcagcgacttgcttctatgccttcgtgggctttgactgcatcgccaccacaggtatgtccgccagccactgcggtcccgggtcctcctgcaccctgggcaaacaagccaatgcttgccatttccctccttgctggcacggtccagtcgccgctctttcacacatgagcaacatgtagatttgtagcttcctgccaagccctcccacccccaaaccattatcacatccccaactgtcaacacctgatgaaagctggatcttgaataaggctaaggttccgctgttagaatgggatcatagctgtgtggctgtggcctgatttcatatctgagcgtcttccgggaggagtgaggctattcacaacattgtcatcctggcggactgaataggccaggcttcagtgagcctcccagattttctctgccaaaggaaacaagtctcttccttggctgcatcaccacattcaggccgagaacactgttgcagggccatgggctgtctgatgtgtcttcctgagcaccacccctctgctcccggaagcacaggaggccccagtgcccacagggctgagtgctggagggaggtttctcgtagggtcacgtgggttccggggcactgagaggccttgggtgtcatgtgggcagatacactgcctcttgctgtgtgccctcctccgctgaccccttgtgcttctaggtgaagaggtgaagaacccacagaaggccatccccgtggggatcgtggcgtccctcttgatctgcttcatcgcctactttggggtgtcggctgccctcacgctcatgatgccctacttctgcctggacaataacagccccctgcccgacgcctttaagcacgtgggctgggaaggtgccaagtacgcagtggccgtgggctccctctgcgctctttccgccaggtgagaggcctttctgtggtggctgctcctaggggtggaaccaccagcaggggttaggctatagcaggccaggtacagccatgcgagacacacatcggctgccagcattctttacccttgaaatagacccagtacccaacccagctttgatcatgtggcttttcccttgttggccagtattcatcatcccaagagttgtgttattgagaagaacctgaggctggcttttcagcatcatctgcttagcaagggactggttctctgtccctaaatctggccactggaacaggcccgctgtttgaacaccatattttggccctcagtttagctgtcatgcagaagctactttgatgaagggaataagtgccttttaatgagaaacattttcaccaatcgtatttcctcttagcctgtataaacagagctatttggtaaatattgatttaccacagggaaatcttcatgaatgcagtgatgcttgtattttctgtttgattcagctagaaataattgcaggaataaatacagttttccatctgtaaagactgtactgggtctcatgctagtgtatgttagatagatgttccctattctttaccttaatccttattcacagtgtgtgctctttctgggattgatttattaaatgccaagtcttttagccacaggcctcacccagcgtggagggacggcagctcttggtgagctcagactccctctcctccgtggtaaaccgagcatggctggatgtggtgcctttatcccttatgagccaggttcactcacgcggtttgcctctccccatc

SEQ ID NO: 72634 - DNA, 1029 bp, Homo sapiens
ggtcagagctggctgtaggcacgagcatgacccagctcttccagaagggaaaagagagcgtagaggagagtgctcaggtctgttcaggacagaccagaagacacacagacattccattggcaagagtccactgggggccacatagagctgcaagggaggctgagaagcactatctcacattgggaatcttagcagtcacgtatgcccagttggtcactggttcagggccaggtgccagccatgtcgcccagtattgttaccagtgggcaggcattgatgtgtgactacttgaatggaaacaggaaactatggcattcggtgcacgaaacttcactaacactaatattttgtggttagcagttctaataaaactgctttcctaaactctgttatggagaactgaggcctttgaatatgtcatcccgagcatttcagagtcatatttatgccaaatttatgggtgtccattaatctagggtggagtgaagccaattccaaatatgtgttgaagtaacgtgtagcctttgaaaactcagagcatattcgaccggttgctagttataggtcaggaatgaaatatatagggcacctcttgttaactggttgccaatcgagatttaattttattatttttatgaagagattgtgccagccaatggtatttactttcactggtcatcctcatgctggtaccctagtaatgatgagctagctgtaccggcccccagacaaagcagcatttgttgccccaatccctgatcataggtggggcccccttagctacatctgacggcctcactgccagggcccagccccctgaccacagggacggcaggggatcggccatgttaggaggtggagttctgcaggactggagcctccttggcatgctctattatgttgttaaaatatctaagcaactttctttcttttttttttccagccgtagctttgtgtttctgacaacagccatgtagtcttgcatgacattgctggttcctctgaaatagtagggcactgcccaaccaa

SEQ ID NO: 72635 - DNA, 1109 bp, Homo sapiens
ctcccaggaaactatgcaaagtctttcttcctggaattgttcctagaggttgtttcccagcaacgcatccttttagtgagagggagcggcttggtgtgcgggtccaggctttcccctccctatgagaggggctcatgctccagatctctgcagttctcgggtgccccttgggtgggcttctcagttcccaagggtatctggaggtcacctaggagggcctgggaagcacccacaaccttggtgatttaaacccctgatccccgcccccagaaagataattaatccaccccattcccagaggctcacagaggtctgcagaggctcgatgcacttggattctttttcagtcgccttcttatccccatccaggaaggaccttcccagtttgtggttaacactcagacaaagttttgtgtctatgcactttttcaggacttttaactcttggtgtgaaagagtcggccatggtcaacaaaatattcacttgtattaacgtcctggtcctgggcttcataatggtgtcaggatttgtgaaaggatcggttaaaaactggcagctcacggaggaggattttgggaacacatcaggccgtctctgtttgaacaagtgagttgctgcttctgaccatttttcttagttgacatttaatgacatagattgtatgggggatataactggctaggatggcatgtgcttttaagaaaacattatttgaggatattttgttaattgttttgtgtttttgcagtgaagtagctgagggtattttgtatgtatcaagtttgtgtgaaggtttattcccctgaaatggaaagactattgtatgacaagaaagactgaggaaaagaaaatcatcaccctaattccaaattgtgtatcattcaggattcttgtcagactcattaaatgatccctctttccccagattctgtttgatggccaactttggaattttgtgttcagaaaagatttttctctgcagtgccgtggtgacctcacttcacctttaaataccttcctattagattaataatgtagagggaagagaaataggtgaaactatttttgaaggttttcagaatgactgaagtgtcagaatgtgagcaca

SEQ ID NO: 72636 - DNA, 1046 bp, Homo sapiens
cattcaccctgtcacttgtatcagaaatctttaaaatagaacataagagagtctttatctcaaattctgactcattgggtcattttactcctggtgttatgtagtggttactagaatagaatgcagagttagaattcctgtgggaaacgtgcttttctgaggatacccctcaggtaagtgttctttgataataaatgacagggagcaagagggatccgagacccttgggcttgcaagatttccatcaaaccctcaaataaaaggaggcatcaactgttgtataaattcctccccacctaatttccaggtgatgctctcaaagtattctggcaactttctgtgtaaaccccaacagcaggaagtctctaccaacctgactttgcttgctggggttggaatggttagctaagtctgtgcggagtagcttcgtgcagcctcactgttggttgaacaaccagctttggagtcctggcatgaatgtaagagctggtataatgtgtacaaaatgctgacagataaaaccacttggagaacaggtttttgcattacttccaaggagacaggatatttcttaaaataaacccaggacagagtaagtgtctcattttctcctaccctgggaagtaggaatgaacacctagcctgagacatttacattctccagattatcagccctgggcttctcagcagcagttggctgcatctttgttccagtgtcttccaaaggaattcagtttgccctctccctagatagcaagcaatacttaagaagtaaccaaggtaaaagtaatctcctgtaggggtcccagttgtccccaccccaccccactgagacccaagcacttccctccagcacttccctgggcttggtgtgggggaaacaggccaagaactatacccggataaaacgggccgctgcgtacctattcaggggaaatgagcgcagctgtgcacaggtgtctcaccagaaagtcccttttcacattatgttagaaaaccgttatctgtatctaagcttacagtaatttaataacctgccccttcat

SEQ ID NO: 72637 - DNA, 1074 bp, Homo sapiens
ggcggaggctacagtgagccgagatggtgcccctgcactccagcctgggctacagagcaagactccatctcagaaaacaaacaaacaatagatgtaacctgtgctctccttttctcctgattctgtgaaaatgtagagtctgactgtcacaaagccataaccaaaaaaggaacaattttgattatgcccggtttggaatatttgagttgaatgttggcatattgaggggctggctctggggtcaatttggggtggcactccagagtgacagtgtgtggtcatggtattggtctggtgccttcgatgaaagcaatgcaggtggcactgcctgtgacagatgataaaatatggaccacgtggtgtgctgaaagggccactccacccttcaccccctctggcactctcatgcggtgggaaggaatggcactggtcccgcatcctgggctgccttgttcttcgctggcttcctcctggtccacgggtacggttttctcctggtctttgatcattcaggtgagcatgcgggcaattggccatttgtttccagatacctgaaaggaatttcaggtaaattgaattgcattctcctctctgatagaggctattctcttagtgcccactagcacgtccgctccacgtaaagaggaggcctcctcattagaaaagtacaaccagtacttgttgaagactgaagacaggcaaggtggtcagccaggccaagaggctgtgacattcctttcagattagaagtcagattaaaagtgtgttccttctggagtgagtgtctgaaattctggtcaccagtgaaaaagtgtggttgtgagtagggcaggaagacctaccataaaatgtggcgtttcctggtgggaattacttatgcatgacatgaactgcgtagataatccccatggtaactacgggtgtgtgttttacgtgtgtgtcagggctctttgagaataaaacagggaccggggaacaaatagatcaatatgaaaggtcacagcatttgcttacgcaaaggtgttatattagttggattaaaatattgtgctgtaaggcaagcatattgatttc

SEQ ID NO: 72638 - DNA, 1271 bp, Homo sapiens
aatacaaaaaaattagccagtcatggtggcgcgcacctgtagtcccagctacttgggaggctgaggcaggggaatggcgtgaacccaggaggcggagcttgcagtgagccgagatcgcaccactgcactcaagcctggtgacagagcaagactccgtctcaaaaaaaaaaaaaaaaaaaagcattagctgctccagtgagtgctacgaaatgttaaggtttaccctagaccttggctttccatttttatgtaagatttcaaatttcaaaacaggctctttgagaagacagcctccattcatgtattcatgtgttccacaggtattgggtgagctcctacaggtgctggcactgactttcccaggttcttgcccttatgggccataactcccacagatgagttcgtgttcttgttcacgtgagcactaggcaacattaagcgtcagtgatatttggtgaaaattaataaaaaatgtactttcagctctgaatggggagctctgtaggcctttctggaagttgcaaggcatctcccacagctagagtgataacacaggcagttggtcaagaaccctgttttttaatgattaagtgaatgaaagagaatgtcacactcttaccatctatcttcatccctttgtaaactaagctcctactattctactaaaactgctcacaatttcaatttcctctctcttgaattagacaatatcctgattttgtctcagtcctcaccccctgtggtgtctctgaaacatttaatacgattggccattcctttctacagattctctaattttctgggtctgttgaaggaggctttctttgttttcagcatgtgagagagcttgtcaaagaatggagtcattgcttgttagtagctgggtacgcagaaatgcctgtggaagtcagggttcatggtctgcggctagaaaggtgctgggcaaaggggaggtgttcaggcctgaggcctgagctgtcagtaccaaaccagggttaccaggtttagcaataaaaatactggatgcccagttaaatttgaattataaataagcaatggatactttttttagtataacttttttatactaaaagattatttgttggcaatatttgggacatcattgtgatatatttggggcatacttacattaaccaattattggtcattcacatgaaatttagatttaactgggcagtcctgtatttgatctgacagctctttgctaagttaccatccagtcacattgtcttttgtggctcctggtgcac

SEQ ID NO: 72639 - DNA, 2105 bp, Homo sapiens
ggtgtgtgcctgtagtaccagctactcgggaggctgaggcaagagaatcgcttgaactcaggaggcggaggttgcagtgaaccaagattgcaacactgcattccagtctgggcaacagagtgagactccatctcaaaaaaaaaaaaaaattgctagtggatgcttatccattcatgacaggggcagccgtttcctggtgtcagatccctggccgtggtgtcctgttgtgcggggcgcctcaggtggagtttggaatgtcgggataggccatgagaagtttcagttccatactatctcaccagggaggaagcctgagagaagttatttttcaaaaggattagtgagccatacacatcaaaatatatacaggcttcatcaaaggaaagagacccagcttgaattgaggatgaagcatttccacagcagagtctggccgaagctctgtgttgagatatctagagagagctgtctgctgcctgaaaggtttcttgtagaaaacccttcatggtggcaccacttgtatctgtttctcttctgccctcctgagggacatacttttccccagcggaatgaagaaaaaggcaatattgaaagatgtgtgagagcgagagttcttgcctgctgccaggccccgcctgcggagagaagggcagggctgtggaaagaggccttgggtctgagaacaagaggactcattaaagtctgtggcttttgacaggctgtgacagggagccggggtattgagggatcacttttccagcattggtggatccttagtgggtttggagctctcagagtacccagtgaaaaggcaccgggcaagagctacccggggtgcccggttgaaccagtagcttgccgtgtcctctccagggagaaatagttcaggacagattgtgccagatttgcattcctctctgcagcccttccagggcttttgaaccacggctgggctctgggcagactcagctggggacagacggtggacactcggcacctttcttgggcctcacaacgtttgcccaaggtcctttaggtttgccttagcagatgtgatcctgccgatgacagggtattcttatctacacttgcagatgtgtgtgtattaaaataacacgcccttggattgaacagagcacactcagctgtgccactgagttcacgtaaggtttgcagtaggacaaaggatggcaaagagttcgatttgcaaaaaacaaaaaaaaaacttcagttgtgcagcccaagttcagatgtcttaaatatctgctctccggacagaaatctgataagggttgtgctacaggagaggggaaatctcatttgccagcccctaagaaggcttggcttttgtttggggatggcaaggacttcctaagagggttgactgaaagatcccgaaaatgagagtaagaaatgccctcagagtctcaaatgccacaggccacagcaaggagaaccacggacttagtgaccagctctagaagtcagcacgtgttccttctcagaacttgcaaatgttttagaacaaatgaaaagcaaacaggactttccacagctggtgacaaactgacccaagcagagggagtggaggaggagagggtctcgagctccagaagaacgtggttctccttggttgcccagcacgcgggggctagcggtgcttggggtgatcacaaatcttttgcaaatgctgtcatggggcatgccagcccacaaagcctgctttgtgagctcctccaaagacaggacactcggccagagacgactaaggttgaccaagatattatttcttgtgatcttggccgtccaagtacaggctatgtggcatttcagtgaggagcaggacaacttggtggccaagaggcccgtcagagctgcctggcttgcattctgcacgtcattgcaaagcaagttgcagccccagcgtggacacaactctcttggagacaaatttcagatttccctgttctctccagtgtgtgttttccacctgtccccctttacttgggacttcccagagccacacgcccagaagacactgccactcttcagttagtgtcacttctcctacactgggcatccagcttcctccacagcctcaccaa

SEQ ID NO: 72640 - DNA, 2504 bp, Homo sapiens
tacacacacagaggcacacatattgatatatagataaaatgaaaatttttatgaaacagtactcatttttactatctgtgatacgctgagataatttttattcttttctatttcattacaagaaaaattcctcgtggcaacttggagtttgcaaaacacactaggtttagacatatgagccacacctcacctgcaactccaccacattgtcctgaatttcatgttcactgctggcactaggggatgggagtcaattctccatccagaccagttagggcaaagaaagttgaagagtcaaggtttctttttgtggtgatttaggagtttctgactgaaggggacattattctctgtgatgatgcccaagaaagtgagtaggttttcagggcagacctgtgtgaattccccagtgtggtttgcttttgcatactggggtatctgtccttcgttaacctgacacagtggtgtcccaaaggtggcctggtcaggctgtatgtgagtttttagaaatgggccatacatttgttaatttcagtgctctgattttctttgagtttattttattcagcgtgatgcgacgaagaacctgtctgaaagagttaaggattttggggaagaagagtgagaaaagatactcatagaaatgttattttttgactaaatcttatgggttaatatcgaacggtattgaaactatattaacaatagcagccataccattaaatagttcttcttgaaaaggttggatggacttttgcttaagaaatgcttgaatgttttttctttttttttcttagaaaataaatgtctttaagtctgtgtatataattcacaaaacaattgtaaatcaagggaattgactctgcctaacaaaggtacaatgacataacagaactagaacaagataaatggcctcatttattgaaacaatgtgcaaatgtctgtccttgttcttgggaagtttcttttatttactatgcttctcaataaaaataaatttgttgtgagaactcagagtgcttactttacagtactcttaaaaattcatatagaagttacaaatattggccaggtgtggtggctcatacctgtaatcccagcactttgggaggccgaggcaggcagatcacctgaggtcaggagtttgagaccagcctggccaacatggtgaaaccccgtctctactaaaaatacaaaaaattagctgggcatggtggcgcagtacagctcccgagtagctgtagtcctagcagagggctgggtcccagctactagggagattgaggcaggagaatcacttaagcccaggaggtggaggttgcagtgagacgagatcgtgccattgcactccagcctgggcaacagagtgagactccgtctcaaaaaaaaaaaagaaaaaaaaagttacaaatattaccatcaccattgttggtatttgagaagaaacctcatgaacttgatctgatgctgttatatatgttaacgtttgaaataaatgatgactctgttattgcaagtgtaccacacttcccccacaaatctataacctcacagtttcagcagctaggttttttgtttgtttgtttgtttttttaacttttgttggaagacatttcttttttcagattgctttctttccagagggcaatcttgggagaaattaagcaagagcactcattagttctgtgagtaattttattgaactgggaagaatgtctgtcttgctggtctcagagtttgatacaattagaattttagaaaattatcagatctaatttgtgctgggattcaggcctaattactgaaagactctgtggtctgatgagtcaaggtgagggcattgccgtctcatgtttcttgggtgatttggagtagggcagtggccaggggaggtgaaagctctctgcacaaatccaagtcactttcctgcggctcctggttgcccatgagtggtcctgtgtggagcatctgcaagggaggtcttgctgagtcaccctgcatagagtttgagttgctggaagagttgaagtctactaagagctgctggccttgacccacagaggtcccagcaagagtctctttccagcaaagtgtcctgctgtgtgaaggaagaaagcacgattccaccctggggaggtacttgggagcagggacagagggaaagcatgggtttctcaacacggatgctttgtgggagcaagcaatactgccccatatccaaatgagcagtgactcaaacatttgagttctgggaattgcccttgttcctagacttccttgaaggaacagaactgtgggggcacacttttactgtgcatgcgggcacgggtgtgggctcctttacagttctggggtggggcctgaaggccacatcgctgccaggtctagacctaatgagggacctgcacctaaagatgcaagctgtgtaaaataaaaagttgaaaagttaaacctggggataagactaactggagcgtattgtttctggaaatgtagcacacaaa

SEQ ID NO: 72641 - DNA, 1567 bp, Homo sapiens
ggagctgacggtctttcatgctcctgcccaccccttgggcaggtgcccaccgagcaggcagacttaaccagccttggtggtgcctttgtggtgcatatcctccaggtggggaagggtggagatcgttaataaatatccagaacttgtttgagacttgaaaagaaatgttgcaggcccactcttgtctggtctataccccttgcttcctggacttggcagaggttaaggatggggcctggagcgtgattgagggaaacagcactggccccatatcagtgagctcttgggtgcttcatgtggttgttagacttgccttttaatgagcctcttggcccctaccagtgggctacggaagaaataaaatgtgaaattttaccatgtgaagtttgctgtttgccaatgactgtgcttctcaaaagttcctagggaaaggttttaaaactggtgcaggtagtgaagtttggatctcgcttccctgctttgtccgcttaggtggtccattcgccataacagctggaactgagagtggctctcccctttcctggcccagaacgggtctttgctaagcgagtctggtttctggaaggattttgttcttagaagctactacgtcattgtcctcagctccccatcatttgtacctcagtttccctgagctgtaagtctatgttatgtgtgaaaatgggcctctgaaggtcatgatcaaaagccttgagtatttttccatgtgtttgttttttctactccggccccagaccctctccttgaaggagctggccttgagagtgacttcggtgggcagccgcccagactccacacaccctgctgagtccacgtaacgcccaacctggacgggccagagctgaagggctactcttcaaagaaaccctttgaagtgcaaacatttcctttcctgaaaagaagggaaattgaaatgaaaacgtattgttctgtgcagacaatgttctcttcgatcaaagagggagtggggcttataaagggagatgcacaaattagagcttgatgtggccagtggtgtggatgtgaatattcatccctgtggaggaaaatagtggggtctctgagatttgtaagattgtattttccttttttttcttctttttccttaaggctctgaatctaggtctaacgttctatttaatgatgtctctcctttgtgtttttatcttgtggtaagcatttgggagtgtctttcagtaaatcatgataccatttccatgttagaatactatgtagccagtaagaatggcgttttcaaagaacatttgattttgtgggagaaactttaatgttaaaagtgaaaccatctgggtgcaatttcccatgttccgtgttagcttaatgagatatatgtatttgcacagaaagaaaagactggaaaaattggactttgtttttctcactgcagtgtttgtggcacctaaaatagtgctcaagaaatatttattgaatgactattcttataattagtaaaactgtatttaaaggaggaatgtctttgagctaatgttttggcaggtggatgggacaatatattattttaagt

SEQ ID NO: 72642 - DNA, 1102 bp, Homo sapiens
tcattgcaagcacttatttagtgctcaccatgtactctgcgctttatctatgtttcatttgaatcttcctaaccacccagtgggatcggcccttctggtgtgactgatggggagaggggaaggcaggtggcccacgggcacacaggtaggcagtcagtggcagagtgaagattggaacccagatgtctgcctgtacctggactccagcctgtctcgggataggcctggcctggcctgccctgtgtacactgagtgggaggcagacagatctgaagcccatctgcctgcgtccctctgtttctggctgagtccaggtggtgctggcaccggtcacccgccccaacgctggagggcaccctgcctcccctctctttgccctgatttccctctgctgtctctgaaagtgggtcttccccctcccaagtccaggcacctggcacagctggagccctggggtccttggggcagctgcgctgggacgtggccagtgtcaggagccggtgtgtgtgacggaggctgggctgcattctttctgggtcagtagtttggcatttacatcaccagcctttggctggatgcaatgcctcctgcccagaccacaatggagccttgtttgatttatcaccatccagccacgcccacactccacctccatctccacctggggagacccctttgcagggggtcttgtggaaatcagagactgttcgtaggggaaagtcagcttccttttctgtgttccatccttcttaaggccagtggccgctgtcatcctgcccttggcttggctttgctgatttctacaatatcttgcggaggtgccccctttccttagaggatgcatctttaacactctcagagaggctggggcaggagctgtccacaccagggcctgcagcaagggcccgtcttccccaaagtgacttgggagagtcttcctggcccgcagcttttccacagtgtcagggacacctcctgccctcccttgggatgaggcctggtctaggagctgggggcgttagggtgcagtttctgggacccagtgaaggcccctgggaaagactggcagttagagttaggagaactcttccctcatcccttt

SEQ ID NO: 72643 - DNA, 1063 bp, Homo sapiens
cgccgcgggaaccccaggttggggcgctgggcgcgcgaagactcagccgccccgcccaccaagggcgcgtcggtccccggccgcagcctctgggctggcagccgccgccgcgccgcgctcccattggtgcccggcggtgacgcggccgagcgggccggggctgcctggtccgggggcgggcgtggggcgcggggcgcggagcgcgaggggcgggggccgggcgcactgctgatgaaacctggcgccggaacccgccagccctcggcgcccattcagtccgcgcaggcaggtgtgagcagcgggtcaactacctggcaggcgcgcacgcggccgcgggctcccgctaaccgcagcctccactcctctccccgcgcgccgcgcccccgccccgccccgccccgcccggtctcgccggccgagcgtccgttggtccttgagcgcgtccgacagtctgtctgttcgcgatcctgccggagccccgccgccgccggcttggtgagtgcccggccccgccaacgcagggggcagctccttgggcccgggtcatcacggagggggccctggcgccgcgtggggccgcggcagggcggcgcgggagtggcgagggcccccgcgccgggaacgctgccatcctctgggaagggccaggaccagggccgggcgggccccggagtgggcgagcggggctggtgcccatgcgactgtcgcctccacggagtccattttggctccctgaaaccgcggcgtggtgcatgatgcaacaccgagtgagtaagcgtgggcgatctggcgatgcccgctccgcgcgcctgtccggggacccgcgcgccgctacgcacggggtggtcggggtgcgtaggcgggcggcgggcacgggggccagactgggaggcacacggagcccgccggcggcgaggagaccttcccttacatggcgcggtgcagagcaccccgccccgccacgaggtccggggatgtgtcatcagccgtgggtggggactctgcccggccgcccggagggtggtcccgcggcaggtggccggcccagggactctgctgccat

SEQ ID NO: 72644 - DNA, 1093 bp, Homo sapiens
gtactaattttgtttctttatatagtttgcgtttgatattagtgcttgcaattgtattaaagtcaaaagctgatttttatggcatacacaagaatgccactttttcttttatttcataccaataatttaaagattgatatgctaaaaacaatttgcacagcactaaagcatgagctactttcatctaaacctgtaaaaatatgaaagatttttatattttttcactgggaagaaattcttcctggatgaaattacaaatatgtgtagaatatatttaataaaagacttataaaatacctaactacaggacttaaaatatagattggcgcgtagtatacagaacaatattccatataaataagtttagcctttataaaaatgaagttgcaggctgacattacattctgtactaagtgtcaacagcccttacaaacattaaatgtaaatggtttcaaatggtcagcgttgtttaaatgtaatcatgttattttattcattgttaatgctttgatgaaaaggctttatatgcagtagatctacgaaaatattgttcatactgatcagaattaaatttgtatagagcagagttttaaaatgaatgtaaatagcactaaacgttttctttctgcaacctgtacttacagattcttcctgtaaactaaataaaaaaaaaatgatagtgcattttggtggtaattttaaaggtcttgattaggtcaataattgtttaagcaccgtctcattcatgttttctactttcatttcttaagcttttaaaattcatttaattaatattctgttgttgttttggggagtattcccaatgtatctttgatatttaacctggttaatttgtggacagtcacaacaatggatagaattatgtagtctccgttatcactaaaatgttatcttcaagagatgttaaatatttatatgctttgttgactagctgaaatgtgaattctgttagtgttgactaaagaatctggtagttgcttaattgggcaattaaacaatttatggctctattttgtaaaacaaactactggtaattatttttaatacctattttcattctgattactctttt

SEQ ID NO: 72645 - DNA, 1294 bp, Homo sapiens
ccaaactctcaaggtaagccatgcactggaaaagtatctcagttgaggcacaaagacaggcattcaaaaatgctaggtttttcttggatatgctgagggaagggaagtttgcatagtttatgaatagagattgtcaagcaaataaccagacatttttgaaacatgctaaaattaaaagaacatttattacagcttcttaattttgaaaaatgcaaacatttttaaaaactcaaaactactacttcctacacttgattgcctagcccattttcccctccagttctagaatttttataaacgaggctcttcttcgttttccctaggtcagaggaatcgtgagaagactggagagagtaattgttgtgtaatcctgtaaacactgtctgcctagtgtgatgtgatatagtctttgtctttcatgctgctgggacagaaaagacccgacattgcttcagaaaccgttcagaacagtctgcctgtaaacacatggaactgaattaccacatgaacactgtcatcttttctcatgaaagtaaaaagaaccaagaacatttttcactctgattttttatttcttgtattttttgttgagctgttttaacacatattggtttttgaatgcagtcaatctccaggggaaaagttaacaagttatctttcgtagcagaaaccattttgctgccacaaaattttcatcatcagaactaataaatcaagtgttccaaatacaatttgcattaaaaagattggcattattttcctcatcagcagaatttataacagtgtgtggtatctagaaatacttatatatacaattccacactggaagacactcagcaattaatgaagttaattactgggccaacttgagaggaaaaaatggaaaagaaactaaaatgttgggtgaattctaccaaagtcagccgtggtggctgcactggcacagaatactaaactgagtgtgactattttcactgcaacaaatgaaaaaacaaaatgtgcctgtttaaagcactcagtagagggctgatgaaactaattttttttcctttaagacatgcactcttgagtcctacagtaactgagtgtttgtttagacagcacaagaaggggtgagagtgcgtctcctagccttaatgtgggagggtagtttcagtcactcatcggctttcattattgtgcagaaatattagaaaacctcattgatcaattttatgtatttgaatatcagcaaattgaaattttccataattatcattaatttgtaaccacatccagtgtcatgcttactcct

SEQ ID NO: 72646 - DNA, 1028 bp, Homo sapiens
accagcctgtgcaacatagcaagatgtcatcactgctaaaaatttaaaaattagccaggcatggtagcacatgcctgtagtcccagctacttgggaggctgaggcaggaggatcacttgaggccaggaatttgaggctgccatgagcaattatcacaccactacattcctgcctgagcaacagagcaagaccctgtctcaaaaaaaaaaaaaaaaaaagaaagaaaagaaaaaaaagaaaaaaaaacacaaaatagtgaatatacacacaccttcatatcagtaaacctatttttaccaaaacacaaagaggaaagaacaactatttttaacagataatacattctctgtggtcttctctagatagcctatttaaaattaagtttgaaacaaagttaacttctaattcatgtcagttcttatgttctctgaactactataaggtcaagataattaatgtctgtctgtgctttccattttcaagccagtaaccataacaatcttggaaaatgtgtttggtatttcttattttctttgattttttttttatataataagaccgtcagctgggcgtggtggctcacgtctataatcccaggtctttgggaggctgagacaggcagatcacttgaggtcaaggagttcaagaccaacctggccaacatggtgaaaccccgtctctactaaaaatacaaaatttagctgggcatggtggtgcacccctgtaatccaagctactcaggaggctgaggcaggagaatctcttgaacccgagaggcagagcttgcagtgagctgacattatgcgtctgtactcccgcctgggtgacagagcaagactctgtctcaaaaaaaaaattgcctccctcaagtgaattgttggtttattttcttcctttgaacttccccagtgtcatcttgatccttatgtcatgtatcatagtgatatgatttttttcagctgatttcacttaattttattagcagtagcaatttgaacttttaaaggacaagacttattttgacaaag

SEQ ID NO: 72647 - DNA, 1041 bp, Homo sapiens
taggttttaataattttcataggaaaaaaacttgtatatagtttattttcttttaattatattttttaagaagtagaatatcaactaaattttttttctgtttagtgacgagacctgcagtgtcaacatttttattaatttttgggtaaaaatgtatattctataataatagtgataacttgcaaaagttcaattctgaacattgttggagtgattaaatttaaaagtgtaatgaattttggttttcctttgttcatttattatggcaaatatgtctgacacacacacacaccctttaaataataggaaataaaatcaaatatcaaattcccattctttttaaaaaagttttatagaatttaaataaaaaccacaatatggcattggtaataatttaggatgtgattgaaatgaaaagcctttgagtcttcttttttacttaaaaaatttttagatttatgttaaaagaatcattgtcttctttcagataaatttgcgcctcattttggtaagcggaaaaacaaaagagttcctgttttctcctaacgattctgcttctgacattgcaaagcatgtatatgacaattggccaatgggtgagtgatatttttctcttgagtatgaataatgttgattcttatgccctaccttgtctcacaaacattttgaaactgttatataacatttaaaagaacaaccgaaaattgagagtataaggctcagatttagaggatcattgtacccttccttatcttgctcttcagcagtctcattcccaaatggtaaaggagcccagaatgcaatggctctgcttctgtcttagaactgttttaacgtaagtgaaaaaaattttttttttttttttttttttttttttttttgagatggagtctcgctatgtcgccaggctggagtgcagtggcgtgatcttagctcaccgcaacctctgcctcccgggctcaagtgattcccctacctcagcctcccgagtagctgggacttcaggcacgtgccaccacacccagctaatttttgtatttt

SEQ ID NO: 72648 - DNA, 1078 bp, Homo sapiens
tcctgaagcagttttgctataagacttgataaatttttagacttatgtatttacacagttactgttgcagttgtcattttctcccccttccccacccagaagggtgattaggtttcctctgagtagaagattttaaaatcttaacctgctttttgttctcattttatacttccaaactactttcaaactctactgtgagttaacaaactcaaatgttttctggaactaggcagtttcctgagtgtctgaagcaggccagggggagtaaggagggagtagtagggtctgtgtcaaaccgaagattcatacccacctataaacattaaaataatattttttaaatttggttcaaacatatttagaggctatgagtttccaacattctgaacatctagataaatatgaactctttagaccattgatttttgaaatatgaaagtgtaatatcagtttattggcaactgtgatgtgtgttagttttaaattaggaaatgctgagaattttgtggcaggaacccagttaaatttatggagtacagtatgtgtgtcttgttttgtcttgttttggtttggtttggttttcctctcacaagcttttaagcttgtgagtggaaaaaaagagattgggaatgttcaaagataattgaacattatctagaacatctagaacaaggacatctagaacagaaggtcttaggttcaatgaatagtcttcaaaggatccatgaatatcttataactttatttttaaatgttgtatttctatatttctgtgcttaatgttttctataaaaagtaggctttgttgatttatgtttattttatttttttttttagagatggggtctcattctgtcacccaggctggagtgcaatggcatgatcattgcactgtatccccacagcctcgaactctgggtgcaagtaatcctcctgcctcagcctccagagtagctagtactataggcatgtgccaccacacctggctttttttttttttttttttttttaattttttgtagagacagggtcgcaatttgttgcctaggctggtctcaaactcctggcctcaagctgt

SEQ ID NO: 72649 - DNA, 1227 bp, Homo sapiens
gtattataggttaaaatctgttttcacagatggcttaaattacttcttcgcaaatatgattgctgccccatttcggtgggggagagaaatcctttcttgacttctccagttctattttgaaattctttttctactctttttttcaaaaaatgggtcattatttcatccaggatgattagatggccaaaggattttttaatgccattccctctcagacatctataagctagaatgtgtgaatcggggtagagggtgaggagtgcaaagcattctaggcagaaggaaaaacctgtgtaaaggccttggggcaagtaagaaattaacagttttgactgaaagacccctgtggttggagcctagtgaggggaagagtggtggagatgatgctggagaataagcaggtccatatagggaccatggtacagagttgctgagtcagttggtctttagtagagtgatatggtagctaggtgctgtgggctcagatgcacctgggctcaaatcacagcttatctgcttactagagtctctaaactctgtcccacaactctagaatgggagagtaatacctttttcagagatgggctaggtagaataaccaagtgcagtacctgaaatatactacaccactcaataaatggcaagctattatttttactttttataactcactgttccacaccctactcaggaatctcagacccactgctgcttcctttttattatttttaaaattcgtccagcaaatatttatcaagcacttacaattacatatcctaactatccctccctcctgtagttatctgtttgtatgtctctcatagcttcaaggttatgagatcctcaaggagtttcatattaaccttttgcaatccaggtaccaagcagtgtctgttttagaaaatgtttgaataaatgaataaaagaaagtttatgaaatacgtaattaccatattttagcgctgcaattgtttgaataatttttattttaaatcagtcttacataggaaaatgaatatatcgcttcctcattctttgtttcttttacagtacagttagcaaaaattcaaaatatgccctttataaattcataactctagaaaatgtttattttaaaatttacatattaaaataagtcactgataggtttatatcttctagatcaagtagctgttttaatatgatgttattttttaaaaactattcattttcaaatgtcaataagaa

SEQ ID NO: 72650 - DNA, 2076 bp, Homo sapiens
aaataaataaatagaacattgctaagtaaatagttcacgtcaaagggttgccatacctataccaatttatttggaattctatcttgtcttttataaccttagataattctttaaaaactctgagcctgtttctaaatttgcaaaaaatatgtgatattttctagctcagtgccagggatccattagttcttgaattgtgtctctaacaatgatgcattctggtcttttcatgtccatggctttggataattgtctaatctgcatataccaatctttcctatttatgaatattatttctgctgtctgttagtcgttgacttttccccaggagtttatctgttcttttccttagctgtttctttttaaaatttttcctttcaattttaatttgcgctttactattctatagttctcttctttatttcccctctttgaagccatctgctgccatttgttttgctttctgtattgtaatacgaagtgttttgatgctgctagatttatattctctaacaatgagtttatgagcattctgctttttaaaacaaacatagtgtgatgcctttacctctaataaatagcacttaatgattatgttaattagcattcttagcttagaaagtatgcacagatgcagaattttgtgctgtattttatattatgtagtgacagggatgtatttgtcacttttgcttgtcgtttttcctgcttgttatgcaaagctgccctgctgaataatttgtcataccaattctaagtaaattgataaattatgtattagcattttaaaatttaattaataactattaataaaacaccattgtattcaagtaagaattcatgagtattccagagacatctatgtataaataagaacttcaatattaagagcacgtgagatcatggctttctggggcaccactaagtgacagtgtcactagtcacaggttgatgcaaattgtctgagctgaataggactgcaaagcagaggcagtgtgaaacaatcgttttcttcatagacagacagactgtattcttttaaacaggagagcttgctatcacttttgaataataagttaactgacaacatactgtaaagaataggatgatttatttatttatttatttttatttttttccctctttagagaaattggtttttattatcactgtggtctgttccagagcttgtattccaaaatagttgtgggaaatagtctgttatcactcaactgtgtataacggtaaaaaatattagaaaacattttttcttggtaattattggtagatccacttggtggttatacacgaagtgtccagttacatgtatatctttgaaatattttagtaatgttggctatagtttggcacacatactctagtacattattcattcatcctttcaaagtattaaatacctacttttttcaagcactgtgactgaggttgactatatgaattaacttgaattatttttccttttttgatttaaaagcaggatttaatcgagaaacaaaacacaaccaatggaacctcatgtccacaattgttctgtagccacatacgcataataaatgtgcctggtgtaagagaaataagaccagtttaagttttcagattgattttctaccttcaaggaccatgatttaattgggggagttggtaggatatggacataaatggtttcttgctacaataacagatgtgatatatgtaggatgaccttataatttattgtctaaattgaggtacttttgagagtgaaagggggcatagtaatagtgagacagcaaacatgagtcagaattgtcctaggcaagcatggaccctatggtgacagtgattggatatgccagtgattggatggaaactctgaggaaggaaggagtagtgtaggtttgagtggtcacttaggcttcaaaggtgacctcagaaccgaacaagaacaatcagaaagtcattctggtgattcttgccaggataggatttataatgaatatattgctttggctgaaataggaatttggatagggaattagcagtagttggactgaagagtttggattgtaaatattt

SEQ ID NO: 72651 - DNA, 1443 bp, Homo sapiens
atacaaaaaattagctgagcatggggatgggtgcctgtaatctagctactccggaggctgaggcaggagaatcgcttgaactcaagaggcagaggttgcagcgagccaagatcgtgtcactgcactctagcctgggcacaacagagcaagactcagtctccaaaaaaaaaatatatatttaatatgccatcaaaaaaaaaaactacattgtgaaaaactgggtaatggtggaaaagaaaaagtagaaggaagcaaagacagaggaatagagggcatcatgattcatgattcctccccttgaagagtttatagtctagttgacatgatatttaagtaatcctcatggatttacagacctaaatgtttggcagatttcatgtattaatagaaggaaggaagtattaataactgagcaatgttaggaaaaggacaaaccagggacagccattttccttaattgaatcttattaacccttacatttaagcataagactaacaacagttttaagacttagaacttacatgatcatatttattttatttgatctttgcagtagtcataaaaggtaaatcaacacttacgtaatgtgcctcccaaatgcatgtaggtaatgtatgtaatgtcaaattagagatttgaaaatgaattggtaaaaatgtaatggcaaaaaaaatgtattggggaatgtcagtgcagaatttgaagggttctttctccagcactatcttggccggtgtaaatgattgtatttcgagaccttaaagaggattagggggattcaccagagaaccacatcctggtgaaaatattgtatagagacattaaattcctataattctaagattctgtctgtaccttcaaatcacattttagtcactaactaagcctgcttctttgaccatgaacatcatatctctttcacaaggaagcaaagtacctagcatttaattttctttctctttttccttttctgacctgaagaaatgtacagtttcattggggagacaaagaccaaccagccaacagaaaactgatactaaaatatgaagaataagaaaaatacattaagaatttttttctttagagcctgtttgataatgttttcaataaataacttctactaatttataaataattaatttataaatacgttaactgcttattccatgccagtataattgaaaagtcagtggttaaagagacatttagactatgttctctttatatgacccacgcttcctgcctttaagttttttcctaaaatcttcctgttatttttctaaatctagaatatgaagcccttgaggaatagcagctgagtttaaacagtacctagtgaaaggctgaaagaatcctcaaaccttctagaagaatgaccttaactgttgtgatcagaatggagaccaagtcatggtagagatccaagatgaaatcattttatc

SEQ ID NO: 72652 - DNA, 1051 bp, Homo sapiens
tttttgttacagactcataattttatagtcttagtgtatgggagcaaagaaaataatatgtgatcatgtaatttattgcatttaggtaccttttagacatttttacttaaccatataacatcttcagttagtcttattttcaaatgattttaaatatcctatttgctgagtagtttaaaatgtgtgaagttgttgtattgctctagatttctccaagaatgtgctcttgatggtttatcacagtaaaggtatgaattaagtaatacattacttagccgtgattctcaaccaaggcaattttgccccctaggagacatttggcaatgtctgcatacttttttttattgccacaactttgccgggggcagggggaaggggaaggtggcaagggtggaatgccactgatatctagtggatagaagcaagagatgatattatacctcctacaatgcacaaaacagctccccccactacccaaatgaagaatttatctggtctaaaatatcagttgtgctgaggttgagaaaccctatcttagcctaagatcttgggttcagaaacagagctgtattcagtttcccacttacctttggcaagatatttaacctcattcaagcttcagtttccttatctggaaaataaagagaataatatctaccttatataaatatcgttagcacaatttctgagaccgtggtaagcaggcaacacatactgttctcattgttatcactaccaataatatcaagcatgtgaaaaattactaaaattataacgtttgatgagtacttaaacgcatctatagttttttggggtttctcttaattttgctcatttaagaagaattcacatatcctttgtgaaatagctgtgctgttgcaagtatgactacttagaagtttttgttttccacatattttctaattacacttgattcagactactctattcatacttgtattatcaaaataataaggcttaaatgctgtgaaaaatttgtagaatgattgcacatatttagaggactcagtctttagaataaggactgtta

SEQ ID NO: 72653 - DNA, 1074 bp, Homo sapiens
gccaagaaatataatttgaaaaagctccctaggtgattttgaatctaccttgccctcaaggactgctgaaatctaggaactttaagaatttagattctaaaattgagtttgttttccagacagaattcccaagagagaattactgtggaaagctgctgtagaccatttaatccatccattgtgataaaatggcagacattcttagtttgatataggtgtatgttttacataaatcttagtatttcaaatattttaaatacctcttaattattgagtagtctctttagagagttgttttttatttaaatcattggctttgcttaattaaatggtcccaaatttctgaatcagatggctattttgatatttaataatctggctctttcaagttagtactgttacctgagatacagaattatatgtaaccaagttgtatatatatgtgcatgtgtatttcaggccacatgcacatgtgttgtgtatgttcagatcattagaaggtaggaatgatcgaatgcattataagctgtttctgtaatctctgttgtttatagctataaatcatgttcattgtggaaatttggaaaaatgtgaaaagtttaaagtagaaatctgaaataactcattatgctatcacctggaaataacatctgttctgttattcagtttcttcctggttcgatctttggaggttctgtttccaggagtttatccatttgttctaggtttttttagactgtgtgcatagaagtattaatagtagtctcccaggattttttttgtattactgtggggtcagtggtgatgctccctttgtcatttcttatttggatcttctcccttttttctagctagtagtctaatttaatcttcaaataaccaactcctggatttgttgatcttttgtatggtttttcacatctcagtttccttcatttcagctctaattttggctatttcttgtcttcggctagttttgggcttaatttgctcttatttctctaattcttctaggtgtaatgttaggttgttaatttgagatctttcagactttttgatatggttatttagtgg

SEQ ID NO: 72654 - DNA, 1524 bp, Homo sapiens
cttattcaatcctcctaccttgtcctcccaaagtgctgggattacaggcatgagccaatgtacctggctcatttacttttattttagacacatttgctattattttaggtaaacagtttaaaactgattacttcagcacatagcaagagatttgttttagatagtcaaaacagtcagcttatatggtaaaaattccttattgttacttggttctaaaagtaaattccctaaactctgtggttatattccataatttagtcagtttcttcaataccatattgctttaattgaggagaagggactctagacaaagtaatgtaataatattaatattattcaataataaaattgtaatatgtttacagagtgctttttgcttttcagttaaaatactttcattcatattgtcttatttaaaaatagattatttcttcttagtcagatcctggtgacagtggggaaaaaaatcctacaaagctaacagaattcgtagcatagcattctgaagtttagtggaaaatagccctgagcacctacctaatatgtcctaaaagcatcattgtgtgataaatgatatttatgatgactccatgcagaaactggttatttgatagatattgaaaggtgttaaacttacctacatcagaaatgtatagattattcagctgttctcaagttgaggtagctcccaaagataaagctaagatagacctgtatgagttcagttccttcattgcagtaggtaagttatccagacatctttcattgagtgcttttctatttgaattggcatcttgtttaatcactttgtgaatgacatggaaacccactcatctggtaacttttagatagatttttaggcaattcagaaagcacactgagaatttccctaaaatgtcagtaacattgcctgaagttttattttatggttctgggttggaaagacagtacatatttgggaataaagtggcattcagaagagcaacaataaaatggggttttgtttgtttagtttagctgtgggttatacatattccttggcttctagacctcacaaatttatttgttcaggaagttattaacacatttctaacttggataaaatacttttaatatctttgatctatggtaggtgggtaattcatggtcatttcccaaagtatgtatttatcatttttggtatccagactagaggatctcagaagtttgaagctgatttattatatgagatatttctcccccccacacacccatttcccactcatctaactcgttctatttgaaatctcagctgagtctttagaattctctgggatgctgtttcagacccttgtaaatctgtattggtgctcactctttgtgccccagtgacacaggatttctgttgtagtacacactggattgacatttcaattgctactgtgttttgcgcagagttaggacaattcataggggatgggaactaatagttggtgaactaacacagtaataataatcttaaatatttgcccaacatatatttaa

SEQ ID NO: 72655 - DNA, 1031 bp, Homo sapiens
gtattatgtgaagtcagaactttaaaaataaggaaacaaacacttttttgaaaggctggaaaaacttccttaacatttaaaaatagttcttaaacagagaaaaatttgtcaggtgattgattggccttaatttgagaaattattagttttcatcttccttttttattggaaggaaaaggaagaaaatagttatttgtgtacttctgatcaagtgacctaaacagttttctttttcctttgctctgtaaaagattagtagtcgtttaaataattgatgttaagtgtctctgaattcctgtgttttgaaggctttgcacatattaactttctcttcctgactgaaaaggatgtgtgtgatagtatctttttacttagttagtctaaatttagatttcttgatcatgaattagaaagcctgtgagtatatgtgaatgttagagtatgactgttttcttatttttagctacttttgctgctgaacttccttttttcactgcttggtgcagttaagggtaaatgcagagctgattctggtgtaatgcagcttctaggacagaacatttgcatataatatgttctataccaggaatttgaaatggggactaaatgcaatttgtgaatgaagcaccttaatttgctaaactaggagctatgtcagattttaaaaaataaagttttgctgtcagttcaggctagtataagttattttctgtaactcaaatgataaaagcaaaagtttaaaacattctctggatcaaatctaattttgaattcctggcttacagagaaagcacttgtttatgtctggttgccatttacccagctccctgctctcccatctgtcagaatgctgacccagtttgggattagaatagggatttaccacacgcacaagtttatacatgcatgcacacatgtacatgtgaatttgtacgtatttcacttaacaaattggattttagcattgatcttctgctaaatggaattttaaaaaaattatctatgattactttgcttttagagttggatta

SEQ ID NO: 72656 - DNA, 1046 bp, Homo sapiens
aaaaaaaaaaaaaaaaaaaaggaactctgagggcctctcagtgggattctaatttctgatacatctttcttttcagggtcactcgcatactactattaggacttcattagagaagcttctttccagaaaagaaagaaaaagccatatgttggaataagttaagaaacattgttaggcttatgggaacaccataaatcatcctataaagcttatttgtagaaccttttacgtttttgaaatggttgacattttatctttgcagttgtctatagaaaagttttgggggtagggattggggaaaaaggattattgtccttgaattatctcctgtgatagaggtctcaggtcttgaaatcagccctttgacgttaatgaatctttatcattaattcttgggggtgggggcggtggtgtggtccttggattctttctaaatcatttctctccaacttggaaatatggttctcttctaacttttaccttttttaaaaaaagtgatgtcttttctggtagaagaaattttatttttgaaaaatgctcataaaaagaaagctacatactttgcagtatcctagtattttaattcattatcataagtaagcagtaattatataggttctattacagaaagtataactgctttattgtattaaatcttctagtcctgtgattggtaggttaatttttttccagctttgtagaagtaccattgtaacaatctccttagtttatggacttggccaaatgttgtattcacaggtaactgtttcttttgaactctgagcatctttctttatcccaggatttctgatatggatagccttgatgtggttaagggtaaatgcaacaaaatcaccttacttggcctttgcctttcgttttacgcttcatagttctccttttctgtcccaaagctaaacatggggtttaactctctcagattatatttagagagtcacttaggtgggattttctaagcacttttattttaactttcatgaaaaatttcaaacatacagaagtagagagaatattataataaaact

SEQ ID NO: 72657 - DNA, 1076 bp, Homo sapiens
gtactgaatgagagcaagtttctggatcttctaattcaggtaatttaatttaacaaagagctttaggactagttgtaatcacctagcaattactcataaaattgtttttaatttcatctatgttccttgagagccactgtgttgatgattctgttttggggatttatgtgcagtcagataattcatattttgtatttctgtacgaaatcaatggaacaagacaaaagtaaacttacagaaaattagtaaaaaattttcatatggtctcgtactagagaatataaagcaaataaaagatttttattggctaaaaactaaactttgctacctgtggagtacgtatgtaatgaataaatgatacacatacaaagtgttagaaagctcaaccaaagaagttagcatgttcttttggaaatgagaatgtcttcatgttccagtgacatttagtatctggaatgcagtagtagcccgatcttactttagaggttttaaagttagatttaccaataaatgtctgcaaaaggtattacatctggcttcctgagcaatttgactagttacccaagagttgtgattactatgacatgacgcagtacagctgtaaaaaataaagacaaatttaagtttagtcctggtatgtatacacagctttgctatattacaagaagggtattttctttgtgatgagtttagtgtaataaatcaaacacatatataacctataagtaataggttaaaaaagtataaatatattgaaacactgctcagatttcatagtcttttttttaacaaagcttttttggtacttagtaagcttcttctttgtgttattttttaatagtgaaataccagttgctggcatctattgagtgcccaggtgggcactgttttatgcttcacacatgtttactcagtaaaatttccctacaatgctattaggtaggtattattattatccccattttacagataaggaagctgaaacatggagattttaaagcagttttctggtaactggtggagccaggattcaaaccctggcattctgtttccagagcctatcatgtgacagtctg

SEQ ID NO: 72658 - DNA, 1644 bp, Homo sapiens
cctgttggccccttgtatgtaccctgtgtttgagttgtaatgaacccctgcttgtccataatctttcttttaactcctgtgcttctctctcatcctttgcagagccttcactttctgcttaaagtggaccttgacttctctttatcttgctccatttgcacctgaaacttgtcctcaactgcagtgctaattccttggtaatgttttataactttgtcaggcagctagacactgtaagtatagaacatgctgggaaatccaaattaaaaatgacagttggcacaaagctgacttctgggagggaccaaggaaaagtagccagagtggcaggatagctgcttccatcacggattgccagcaatgtaaagcgtagactccagaggaacagtgctaacttaaattaactatgcaggcatcagtacttctggttctgatggcccggggatttctaagtagtagtgagtctcagcattatttgttatacagtctactgctagatgaacaaggctaagtctacagagaaggtaaattatagaaattaggccccgtctctactaaaaatacaaaaaattagccgggcgcggtggtggggtcctgtagtcccagctactcgggaggctgacgcaggagaatggcgtgaacccgggaggcggagcttgcagtgagccgagatagcgccactgcagtctggcctgggcgaaagagcgagactccgtcttaaaaaaaaaaaaaaaaagaaattaggtaaaaggattggaatcttagctaattggtctgaaattcagagctaggccacagaattagttgctctttcataaatttcattacctgtactctagcaattgtaagtgtttttatgtgtttctcccactaaacagactatgtacttactctgagggcagagaggcctcatctttctaaactgctgtgtctagcacagtgcctactaaataaggaaaactcaatgaatgttgaattagcactgcaggtgtctgatagaacttagcacaatcatggaaatgttctttattgtgtcgtctagtaaggtagccacgtgctgggctacttgtgtctattgggcactttcttcatggctagtgtttgaggaagcgaatttttacttatgtttaattttaatgaaaatatctatgtgtatctagtggctactattattggacagtgcacttgtatggtttatataatactttcagtggactaaaaagatctttgactttttttgtttttttgtttgtttgtttttgacttgtattccaagtggtcccagactgctaagctttttgttttactttttgtgattttttagtttttttcttctcttaatgtcagcgttctttttttttctatcattaagtaagctgtcatcagcctttcttttaacttttctgattttagtcaactatcatatagaaagacatataatcaagcttgtagaattatctttttttttttttttttcttttgagacggagttttgctcttgttgcccaggctggagtacaatgacgcgatcttggctcaccgcaacctccgtctccctggttcaagcgattctcctgcctcagcctcccgaatagctgggattacaggcatgcactaccaccccggctaattttgtatttttag

SEQ ID NO: 72659 - DNA, 1050 bp, Homo sapiens
aatctacataaagcttgtagagtatcttgaggtcctgagtcaatctttggcttactatcttttgtcatttgggaattagctaaaattattattattattattattattattattgagacagagtcttgctggtgtgcagtggtgcaatttcagttccctgcaacctccgcctcctgggttcaagtgattctagtgcctcagcctccctagtagctgggattacaggcgcatatcaccacgcccggctaatttttgtatttttcatagagacgtggttttgccgtattggccaggctgttctcaaactcctggcctcaagtgatccgcctgcctcagcctcccaaaatgttgggattacaagcatgattacaaagtgttgggattacaggcatgattacaggcatgattacaaagtgttgggattataggcacctggcccgggaattagctaatattctttaagtattatttctattcaattgtcttctttccttatgggactacaattacgtgtatgttaggtcatgtcactgtttccattcttttttccccttctcgtaagcctagagattttctagcaacctatcttcatgttcacttgtattttcactgtccagtatccagttatttctaattattgagtttttaattttagtttttgtattttttatcctaaaatttacatagattcaaattcttatgttttcatctgttttcttgagtatattaactactgttgcaaaattcctgtctgatgaccgtcatacctagattgtctgtgagcctgtttctgttgttttgtttttgattatttgatcctttttccttgggtgcctggcaatgttttattaacattgtgatgaaaaattatagagaatctgaattatggttatgtttctccgtataggatttaatatcctctggtgagtagttagaaaaacattgattactttgattcgtaagtgactgataagacatgagcctgaattcagggcagtcaggaaattctgatagcctcactattggtggactactggtgtatagccctta

SEQ ID NO: 72660 - DNA, 1190 bp, Homo sapiens
aaaagaaaattttaataacattgacatcaggtagctgactttgaataaaaatgtttgcgtatttggtgatagaatgaaaaagtaatatgatttagtaagttagtaagtgacatgttcttctatatagatctcatctttgtaagataagtttttcaggtatgacttatgacagctcttaaaaccaagtgcaaaatacattgaacttcacaaaagaagaaactaagatttaaaaaaatggagatatatttaataataatgctcacctaatatgttaatagtaatagcatttttagtgattgaaagattaaaacaagttaatatttaaaatagttgatagttaaaatagtaaagtaaaaacaaaattttaatcttttaatttctgtttttagtatatgttttatactatgtgtatgtttataaatgaaaacacatatactataggtatgtgcctcaagtattttatatttgggatcttcagtcaaaaaaatgtaggagccactgcactagatgactaaagatttctgagcattttaacttcttgtgtttgatagttagaagttttctgtctcctgccttgttgagcagctgttttttcctgtgatcagtgtgcctacttattcctaaccatttacagttgctggttttaatttgctatgggtgtggaaaccatatttccaaagtttattaaaaataatatgtgtttaaaatgagcaaatggtgtctgagtaggattttaggagttacctcacagtaaagtgagtatcttttgtttcatggacttgatcatatctgttttggttgcttagaattctctttttaggagggctaattttctggctgttagttatgttttgcagagatgcagtttcttgatagtgaagaactgcttaggtgataaaaaaattacacataactttactttgagctcgtagaggagagagaactaatatttgttgtgtactttctagtaccaggcagatgcttggcattttacattatagcatttaatttaatccttacagtcaccctggataaatatggttggtatatagataaagaaactcttaatacccaccaggtgaagaccaccaggaatgcatctgtggtgaaacaagttaggttgactgttttgcagctaggaagagcgtatgccagatcctgccaagtgtcagtaaaagagaatgggaggg

SEQ ID NO: 72661 - DNA, 1012 bp, Homo sapiens
gatggtgctaatagttttcacaatatagaacattaaatatgttttaggagactgaagcatatacttagtaaatgtgctctttgattttctaagtcatcttattctgggagggaaaaatgaagagtgactgtagaattcatggtaacctggaaaccttgggtaataagtcattccgaaccagtaaattttctgaatacttggaggttgagtgttaagatagcccaatctaacaatgttggattaccattgcatttgcttaaatgaaatatactatgcataatttaacttatttttgatgacttagagctatgatttgaataatattgcttgcattcaatcagtgtttattgggtacctgtctgtgtaatatggtagtagtattaacaggcataagctacaactataataccctcggcacctaatatagattgtgaagctttatgccccttcactagatcagtaatttacaaaatgaggtgaagcaagtcaattttgagaagtaaatatgagaacttctgtttgtttattttgtcccccaaaagggaaaagaattgagcttttctattcatactatgtgaattggctgtgaggttctcctaggtccacctgcattcaggtggtcactgagagtgtggtttgctgagggaagatgtgtgaattctagaatgtagatgccagcaacagcaccatgagtttctcagagtttttccagtttttctgttatatagtccctttaaaaatactttttaaaagaagaatctatgatacttcttattgagatggggaacagaggtttgctgtcaaagcatttaagagttgtagaactcaaagattaatcacacatttttattacaaaagatgagtattctatatgctgttcttatccgtgatgacaagaggctaccaaaaataaaaatctagcggatgtgtttgggaaaaaatccccaagttgtcacttcaaggcaaaatcgacattttaaacagtaagtgagaaagtacctgcttttcaaaa

SEQ ID NO: 72662 - DNA, 1064 bp, Homo sapiens
gctcttgtttaatttcccattgaatgcaaaggaaacacagtgttctgtctctgggggtggccacataacagctttacagtctccttcctgagtcctaaaactcgtgcgttgtccttttagttttcgcttctcttctggtgtgcacacatgaaatagcctcctgcctggttaagtacggctggacaagctttcctccatactgctcttgaagttgccgggagcggtctctagacagagctgggaaatgctatttcccttgtttgatgagtgatctgtgggttcatcgcctcgagcaaagatttgctctctcgaaagcctccattttatatcatcaagcacagtgcaaaataggttaaccttaagtaccgtctattctctcacagacgttggaatgaaatagatgtgttattaaaacagtgccgctacttcctttaggtccagtgaagaaaagctggaatgtgcgtggcatcagtcacagattgagatgatttgggaaatactgtttccaagtcagagagagggtttggaggctgatgttaggatcagaggactgggaagtaggagcagggttttattaatatctgcaattataaaatataacagtttatctgtttgagactggatgttaaggccttgattctgtggtgctttgagatcctttgattaaaggtgatatgcaagggcaaagcaatattatgtaataaatatataatgccctgatgatgctatttcagagtgggtactaacgtacagcacaggtttgattgttctgagtatttttttatgtcttgttttctactgttcaactggttagaggttaagattttctctttgtgaaagtcttttaaacgttcgtttattacttaactttgcatttttgcttaagaagtctatcatttgctatgtgcctagaattctcaactttttgaaatataacatgacaaatactggttagaagttgtcgattaaatgcttcatgattattaaactcttaataccatgaattgacaattgattttagtttacattcatgacaacaatttaccgctccaaaccttgaagag

SEQ ID NO: 72663 - DNA, 2379 bp, Homo sapiens
gtaattaaaatgaatgattctgcttggaggtacagcatattttagctctgtgtgcatatcgtgcataagggaatttctctatgcagaattattttctcccaacaattctcatgatcacagcactcctggtagcaggtatcacttaactcctgggcagcagcttgtccaaagcaagggaaagggagctttcctttcctcgcaactgttgctatggggggcgtggcttcggagctgggtgaggaggcgttcggcggctccctcccccccccaccctcgtagactacacttcccgtgatgctcgagggaatggtctccgtggtgacgcacttggtgtccgcggagggaggacgaggacgggggcggcggctgctgcgagggggggcccgtgctctccccgtttcccttagtcgcactcaggcagccgccgccgccgccgctgccgccatgttggtttgagaggcgatgacaggaggcggccgcggcgtgtgggactgaaaagtgaaggaggaggaggagaaacaaagctctgagaggaaaccattcccgggctgaggagaaggaggacccggcctcttccggggaccagccgaagtcggcgtcgcccggagctcgcgaggccggggaggggaggggaagggaaggcggagaccggggaggcggcggcggggaaggcggaggcagaagaggagtggcgaggagccggagacgatgcgccccgaccccagctgctgtccggaggcgcccgcggcctgagcccagaggggctgtggagtgtcccggccggccccgagcacccccgcgctgtcggtcccccgctccggtctttcgctttggcttccaactagttaaatgcccttgagcgcgggtttccgcggcccggctcttcgcccccgcggcgcgagttgagccgtttccccgcgctgtccgcgcgggcgctccgacagcggctctgcagggtccgcggccagcgtccggccaccgctcggccgccactcaaggctcacgcgtcgatgtgtagctacatagttatctgtgtacatccacgctggggcatttttctcctgcttaatgaggacttgactcgggagcaagtgtgaatcattgccggggctgggaaaggaggaaggcgcatttaaccccctcccacccctctccatgtccgtgtgtcactcggctcggtccacctggcgcggccggtcctggggctgctgctgctgttgacgacgacgacgacgacgggggctgcctctgctgtcccgggagtttcctcctgctccggccacacagctcctggggattgttcctcttcgaaccagaacctcggcctgaccggcactttggctccaaaataactttatttttgggggagaaagcacatcacgaaccagtcaaaatcgtggtttatttctgtaacgtgaagacttctgctcttttttctttgtttgtttttttcgtaaacatctgggtgtatatcaaacggcaagatgtccagtaatgtcccggcggatatggtaagtgacggataagttatgacactgatttaattgtggtttccaatcttatttaatcggaaagacggcaggcgtggggcgaagatttgctggggactgtcgaaaagccactgtgctgagcgatttggagaagttggagcttctggtttcccccttttaggaagtactgcttttaatatgggttctctcatttggtcgtgttttctaaagcattgaagatagtggagaagtagggaaatgtatcatggtagcttgaggggacaaaacatctccctcttcgctagaagcctccgaacactagtattttaacgtttctgaaaacgtcagggacagtgggcagagctgaggacgggtgtccctacgagagaataggtagggaaacgggaatcttgctttatgacacagacgagatcgtcattgcagtagggacgaacttgatatttttcaagaacagggatgcacatctcttcaagaaaaagtatgttagaatttgctgtgaggtttttgaaatgtctgaatacggatggcaacagaaatataaagatattttgggattttcagaaacgtaggctgaccctgtattggtacttacaatgaatattccagggctttttaatgccagatatttattaatagtagattccatattagacataaagctaaggaaacatagtattgagcctcgatcactgagtgttgagaacttgaaacaaaaagtactgttgtttattgacgcctttctttgttttgtttataaagggtaaggttgtgagtcggttgactaacagtaaccgtgtaaccttacagtgctggggctgggcttgtgtgagtgtgaagttacattttgcagtcctaaggacaaacataa

SEQ ID NO: 72664 - DNA, 1038 bp, Homo sapiens
gttctacgctgccgccctggcctggccacctcccctccactgtgtggctggcttttctctgccttctgctgcctgatgggatctcccactcacctccacgaggatctgagaggaaagggtgctgaggagaggagcgtggagtgggcaggctcttgatgccaagccaagaatctgcatggctcatttgaaacttcgcagtgccctttatctcttgttctcttttatgtataagctcgtctttctcccatacagttgtaaaccccaaagggtagggactgtattcggttccttatttatatcctgtaagacagtgactctcaaactcatcagaatcacctggggagttttaaaaacttgattcctccagaaaccataaagaccaaagatttaaaaatatcaccatattaaaacagaatgaagcaaaatccttctgtaaagctaaacaaacaaacaaactcatgaatcagtcagaagaaattataaacaaggggaaaacagtatttggaatatagatggaagacacactaatttctttaatttgcaacaaatgtctataaataagaaatatacaaacaactcaataaatgctgggccaggaatctgaactggcagaacatggaaaagaaataccagtgaccaagaaacatatgaagagctgctcatccttcctcagaaataaagagacgcaaatcagaacaatgccagaccacttttcatgaatctgattagcaaaaattataaagtttcatgatgcccattgctgatgagagtatggaagcagatgccagtgaatgcaaacttggtggattttggcacctgtgtgacaaggtggggcggtggttctcacacctgcatgagcttctgaatcacatgatgaacttttaaaaacatagattctctgcgcccccatcccatactgccataaggcacccgcgtgtaactaagggcacaatttgtgaagttcgaaatggtaatagagaccagactagtaaatttcaactaaaggaattttgtcaacatacatcaacatttttaaaa

SEQ ID NO: 72665 - DNA, 1131 bp, Homo sapiens
ctacatattctcactcataagtgggagttgaacaatgagaagacatggatacagggaggggaacatcacacactggggcctgttggggggtgggggactaggggaaggataacatgaggagaaatacctaatgtagatgatgggttgatgggtgcagcaaatgaccatggcacgtgtatacctatggaacaaacctgcacgttctgcacatgtatcctagaacttaaagtataatttaaaaaaaagaaaaataatgagatttccaagaaattttgcactttccttgggccattgaaatcaggcaacagatgaataaattaggcaagtgagaggcagtggctttacaggaaaaagatcagctataattaagcttagacatccgtgtgactatgacccagtgatttttattactaattggccagtaatttccgatgcgtggtagcttactacctaatgagttgattcgtctgttggacagaatctattgttagaaaattctttcttttgctgatctgaaatctatctcttttgttactggcccttgctttttttttttttttttttttttttggcttaatacctagtaggcctgttggttgtattgccccattagaatttacttcttcagcttaaatgtctctagtttccttggtcttcctccatatgacatgggttttgaaccctttatcatcttgattattcttccctgggtgtaatttatcagtatttctcttaaaatgcaagacccagagctagtaactgatcatgttttacttaatctgccagtgtgagaggttgcatagtaaaatgtaagaaacatttgcattttagggcaaactatatcattaattggctctgtaatatttggttagtcactttgagcctaattttcctcaaatagaagattatccaacactaatgaaagatgagtaacaaagctttcttgatatgggaaattttgatgttagtaaaaagaagctaaaatattttgctttcatgagaaaaaaagtatatcaaccttcatgctaaaaatcaaattcttgctaatgttgaccttagtcaactcatatgaaaatctaaggaaagaattctaagatcatttcagtgacattgcagttagtagtatttatg

SEQ ID NO: 72666 - DNA, 1867 bp, Homo sapiens
gcctggctaattttttctattttttagtagagatggggtttcaccgtgttagccaggatggtctcgatctcctgacctcgtgatccgcctgcctcggcctcccaaagtgctgggattacaagcatgagccaccacgccaggcctctttctttctttctttcttttttttttttttaaagagacagggttttgctctgtcacccaggctagagtgcagtggtgccatcacagctcactgcagcctcaaactcctgggctcaagcgatcttcccatctcagcttcccaagtagctagggggacaggttcacaccaccatgtccagcaaatttttaaattttttgtaaggactgagtcttgctatgttgcccagggtggtctcaaactcctggcttccagtgatcctcctgccttggcctctcaaagcactggtattacatgtgtgagccactgtgctggacctgaaataaagtattcatacttgcccttttccctttcatatttacatgttgttttgacccattttgcaaaactcttttgaaagactccttaaaaatacaaatgagtcagtaatctaataaaaaacattactatatttgctgtcttttgactatataatttgattatttaataagacagttaaaaacttgaattttaatttgcctacttaccgttttttaaatttaatgttttaattgatcagtaccttttagcatagttcttgctttgctgttctaattccaaattaattgtaacttttaaaaaagaattttttttttttttacaaataatacttataagcaatatatctttaaggaaataaaagcatcttcaatgatgtttaaacaaaattggcttttgttttataaggacttattatttaagctcgtgtttttcacctgttatactaaaacaacgtaacatcctttttagaaaacgttaagtaaaaaaaatacagaacactccaggagtttgtgtgcatctcgtgcagggaacatgctggtcttctctgtgttattccaattttagtgtatgtgctgccaatgcagacactccccacttagtgttaaaatttaaaatcttctaaaaattaaaagtacaaagtcaagtgtttctttgaagtttccattttatgtactaatgcctttcaagtgtttcttctaatttttccattagtcagaaattgatgttttcctaagttttgagggtaaatttgacttattttccaacttaaatgttaccaagttatattgattgagaacaatatacttgctccaactcaggctcaaatttttagttgttttcttctatccttcctattagccacaggcagggtattttattaatctattatggaaatgttttttatatattctgaattgtgtgtgttaaatagtgaccatttctactcagacatttctactatgtttctttccactgggttctgaaattacatttcttccactatagcatattctgtaattgcatgtattagctgttgaattttacctagctttttctttggatctgtaactccttcatatgttccttttaatatatcattcaatataaagatgagggaaaatttcttatactctgctttacagtgtgacgtgctttctggttaaaaaaaaaagaattgttaaaatgaatttataattgtaattttcttttcttttctttttttttttttttgacatggattcttgctctgttgcccaggctggagtgcaggagcgtgattgtagcctcgaactcctgggctcaagtgatccttctgcctcagcctcctgagtagctaggactatagactcgcactaggactacagactcatgctgtcatgcctggactaatttttttgtttcccc

SEQ ID NO: 72667 - DNA, 1017 bp, Homo sapiens
ttactacataatcctagttgataaagcagcagcagggtttggagaggattgactccaattgtgaaagaattgctactgtgggtaaaatgctatcaaacagtataattgcatgctatggagaaatttttcacaaaaggaagagtcaatacgtccaccaaactttgttgttattttaagaattgccctgggccaggcacattgggtcatgccagtaatcccaacactttgggaggccaaggcaggagtatcacttgaggctagaagttcaagaccagcctgggcaacatagcaagatgccaattctaaaaaaaaaaaaaaaaaaattttaattagtcacatgggcactgagaacgcgggtccacgcacgtgatcgtccgtgcatctagcctttgcccacacagcttgttcagtcatggcctcaggtaatgcgtgcatgggaaagcctgcccctaacttcaaggccacatccatggtggatggcgccttcaaagaggtgaagctgtcagactacaaagggaagtacgtggtcctctttttctaccctctggacttcacttttgtgtgccccacggagatcactgcagtcagcagccatgccgaggacttccgcaagctgggctgcgaagtgctgggcatcttggtggactctcagttcacccacctggcttggattaacatcccccggaaggagggaggcttgggccccctgaacatccccctgcttgctaatgtggcaatctgaggattacggtgagctgaaaacagatgagtgcattgcctactggggcctctttatcattgatggcaagggtgtcctttgccagatcactgttaatgatttgcctgtgggacgctcattggatgaggctctgcagctggtccagaccatccagtacacggacgagcacagggaagtttgtcctgctggctggaagcttggcagtgacacaattaagctcaacgtggatgacggcgaggaatatttctccaaacaaaattaggctggccaatggatag

SEQ ID NO: 72668 - DNA, 1057 bp, Homo sapiens
gacatatgcttcaacatggatgaatctttaagacattatgttaagtgaaataagtcagtcacataaggacaaatactatgtgactctagttatatgagtgtctagagacaacagcagaatggtggttaccagcgggtaggggaatggaaaatggagagttaatgtttaattggtcctaggcttagtacctgcatgacgaaataatctgtacaacaaacccctgtgacatgagtttgccggtgtaacaaacctgcacatgtacccctgaacctaaaataaaagttaaaaaaaaaaaaaaaagaaagaaagaaaagtgccctttgcggttccacacagaggcgccagccttgggctgagagaactcactggtttgatggttattggatcgctcattagagataaccaaagctattgttcctccctgatcttgcctctgtagttgagtcatcacccttagaggcagaagaaagcaaattatagcagggcttcttcagcattggggtggggaaagtattaaaacatgcatggtaaagatgtcaccttcttggtcgtggaaaagccctcctggggtaaatctgcatatatttgcatatatatatgcacgcatacatcctaacctgaagggaacatccagctcttctcacctacaaaaagatgaatccttctgatgtctcttttacagggtatgtggacaataaaaatttaactattaatgttgtagaaatctaagggaaaaaaatcgcaaaatgaacgtgccatttaaattttaaatttaaaaacgtcatttttagtgtaaattctttataggtagataagagcatatcttgaagactttttaggaagggagaaggggaaatagtaaaaggtaacgtcaatcctaaatctttatttgaaaaggagactggatctgtttttttctctaacatcaatcctaaatctttatttgaaaaggagactggatctgtttttttctctaacatcaatcctaaatctttatttgaaaaggagactggatctgtttttttctctaacatcaatcctaaatctttatttgaaa

SEQ ID NO: 72669 - DNA, 1024 bp, Homo sapiens
atattaaattttttgttgacattagtctcagtgaagactatgaaaatgctggctatagatgtcttttcccatttatctaaatatggactgctcaggaaacgagactttccattacaagtatttttaattaattgggccagcttttcaaacaaagatgccacattcaaaatagggtatattttcctatattacggtttgcccctttataaatccaagtagataggaagaaagaagacaaactttgcatctcagtatgaattattcaatttatttgaatgatttttctttacaaaacaaactcattcattagtcatgtttatctgcttaggagtttagggaacaatttggcaattttgtggttttcgagattatcgttttcttaaagtgccagtattttaaaatagcgttcttgtaattttacacgcttttgtgatggagtgctgttttgttatataatttagacttggattctttccatttgcatttgtttatgtaatttcaggaggaatactgaacatctgagtcctggatgatactaataaactaataattgcagaggttttaaatactagttaaatggctttcacttaagaacttaagattttgttacatatttttaaatcttgtttctaataatacctcttagcagtaccttttaaataagtataagggatggcaaagtttttccctttaaaaatactcactttatgcttataaataggttaatgggctgataaaaggttttgtcaaacattgcaagtattcggtgctatatataaaggaggaaaaactagttttactttcagaatgatttaaacaagatttttaaaaacaagatacatgcaagcgaacagcagggttagtgataggctgcaattgtgtcgaacatcagattttttgttaagaggagcaaatgactcaatctgatttagatggaagtttctactgtatagaaatcaccattaatcaccaacattaataattctgatccatttaaaatgaattctggctcaaggagaatttg

SEQ ID NO: 72670 - DNA, 1144 bp, Homo sapiens
caggctagacaaagtaatataggctatatttttcttagtcatatcctgaaacatttatgttcttttcctttagatactcaaaaaaccacagcatcactaagttaaattacaagtctgctgctctgtccagtaaattaataagattaaggaaatctataactcttatagttcagtaaattgaaatattaaatacttaattttcagctttagtcattctgaaaagtgtttatttctagatgtttcttaacctaattgcatgtttattgacaaattaccttttttttttaagaccacatttcctactaaggattaaggtctgacagtgtaaacctgtagagtgcttttttgcattcagaaggtggcagtgtctaccctttaatcaaagtctctacattctggttttaatagagttaggatgtggtacataattgcacctcaatgaggcataactttgcaaatattagactatgccatttcatgagttatagattgttataatgatcttgtatttttatgttcatttattgaagttctagttatttctggagttgctgtggatctacagatacgtgatattttggtataactagaatcttgatttctttcataaagttctgccatgttctatttctttccttaatgtttttttcttccctactgttttatcctccctttgctttggaaggatattgctgcatatcgagctaaaggaaagcctgatgcagcaaaaaagggagttgtcaaggctgaaaaaagcaagaaaaagaaggaagaggaggaagatgaggaagatgaagaggatgaggaggaggaggaagatgaagaagatgaagatgaagaagaagatgatgatgatgaataagttggttctagcgcagttttttttttcttgtctataaagcatttaacccccctgtacacaactcactccttttaaagaaaaaaattgaaatgtaaggctgtgtaagatttgtttttaaactgtacagtgtctttttttgtatagttaacacactaccgaatgtgtctttagatagccctgtcctggtggtattttcaatagccactaaccttgcctggtacagtatgggggttgtaaattggcatggaaatttaaagcaggttcttgttggtgcacagcaca

SEQ ID NO: 72671 - DNA, 2326 bp, Homo sapiens
gagccagcccccatttcgagcggggcttctccctgcgccgagcctgacaaaatgggggcggcggcggcgcgggcctgcagggcctgccgggcgcacgtggcggcctcgggcctgggagccgggccgcgtcctctctcctcggccgcgcggccaccggcgaagttctaggggcggggggctcgccccgcgcaggagtcaccccaactttcacggctccaaaaaatacttcccgagttgggggagggggccaccgagccacgagcaggagtggcttttgtccctcatccttgtttactcggagaaacttcagaccggacgtgtttagtcagaacagaaatacatctcagggccaaaccgataggaaacgaggctgcctcgcggtggcaccgccaccccccaaccgggttccgagcaccggagctggctgctgctccctctttggagcaaagttttatgcaaagagggtgttttttgaaactttcggtgcacggtgattttttttttttaaggtcccataattaggaagagtcgactcgcttaggcccttgtttattccctatctagtgcaaagccacgaattggcagcatgttttctgacctttggtttggttggtttaaaatggtgttctagattttaaaatcgtttaagtgaccagttagatactcattcagagcagactcgggcggatagatagggaatactgtatgggtatatctttgtgtctagactttttgagatcgccctgaaggactgtttttgttttgttttgtttgcttggcatagccccttcaaggaatttaatctctcggccatattcttgtctgattttacggaggttgatgtcgctactgtgttaaataaccagtactttggttttcattcccttactaagtactttaaggtcttatatgtcataattttattgctaacatcaaatatttattttattttttagaaaaataactaaacatgggcaaaggagatcctaagaagccgagaggcaaaatgtcatcatatgcattttttgtgcaaacttgtcgggaggagcataagaagaagcacccagatgcttcagtcaacttctcagagttttctaagaagtgctcagagaggtggaaggtaagagggcttaaaacatgctaacaaggtaattaaaagacagtttccaattgaggatgcaaaaaaaagcctagttggcattctcgtagtgggacgctattacatagcaaaagacattggttttgaggataatttacttaaatgttacaacttaaacttacaaataattattttgtagaccatgtctgctaaagagaaaggaaaatttgaagatatggcaaaagcggacaaggcccgttatgaaagagaaatgaaaacctatatccctcccaaaggggagacaaaaaagaagttcaaggatcccaatgcacccaagaggcctccgtgagtatcttgcctgtttttacttcccagacacgttttacagtagaatctgagagaaatttagcaagctactttgtcagtttagagtgtaaatgtacaatcaaagtttcttagctaatacttgttcatattggttatatttaaatagtataaaattcctgttgggtgggagtgttcccagagcatttgaattagacatttggtctcctttgcccagtgtatctccttttgatctttttatttcttgaaaaatactatccctttgaaatagtgtaattgtagaatgttcatctagggttctagctagtataaattaaatagttgtaaattaagctttggttgtgaaggatatttagtatattatagtatttgcaccctgtccaatgcatcacagaaattcacaggcagctttaaatagcaatgcagtgtacacttgatagtatttgtttttgtgatctgttaacttaaaatcctaaaattaattttttttttagttcggccttcttcctcttctgctctgagtatcgcccaaaaatcaaaggagaacatcctggcctgtccattggtgatgttgcgaagaaactgggagagatgtggaataacactgctgcagatgacaagcagccttatgaaaagaaggctgcgaagctgaaggaaaaatatgaaaaggtaagaagtgtgggtttgcttggtaaaatgatgacaagtacgccagatgtatgattgtacttagtttgaggtgtaataagtttttagggtaacagctacattaagtatggtgttgatataagtcctcatccttcaaagaatgcagaggaccaaataaattagggtttttttgactaaaatgtaatcagactcagacaaaggctgtgtacattt

SEQ ID NO: 72672 - DNA, 1886 bp, Homo sapiens
gtcagcgtaatccctccgcagaaagccgcgcactagttttaatcacgccccaccccctggccgctggcgccacctccgccactcgggcgctttccagcagcttccagaaacgtcgcctccccaaacccagccactcacacatggcgggctcagcagccaccggccccgcccctcctcgtcgccgcagtcgcaactgcgtctgcggccacagggcggacagccacgcctctgcggagggcgaccggaagtgctcacgtcttcaccttccccgccacgccaccgtcctttcaggcccagcgtgcagcaggaaggaggactcttttgccgcggactcaagccggaagccgccttcctagtggagacgcgagtgggggaggagcagtccgaggggaacgtgggttgaacgttgcaactagggtggagatcaagctggaacaggagttccgatcgacccggtaccaagaaggggagtgcccgcggcaggtaagggagaagagggaggggtttctttccgctctcgaaattgggaaaagagacagagctgggatgacctatggggtagtcggcgcgctgaaaggatgggctgggctgggacggggttcaagtgggaaaggttgatgattaaggtatagagttggacttacagatccgtttgggcgcagagaggtgaacgctgaagagaaaccagagtttgttttcgttttccaaggagcgtggagatgggcagggttaacggaccctgcgcctccttcggcttcttagtttgggtgttgaaactcacctcctttggtcctgttcgtctctgattcaagacagttgggtttggtacctgacagggctgggtgcagaaagctgaccctgttcctcggcttccaggtcggttgtggcctcgcttttgacagttcacgtgccgagcctactcgctctcggagggcgagctcaaatgggtgggtttaaggccccctcttcgaacagctgtttccctgggtttctccattttgcacacaggagtgtgaattaagtttaattgaatactttttgcgattcccagggccaccttgacacgttcattgtgctatctaactgggttcatgctgggctaataattcacattaaggcttctggagtataagtggttcacagaagtatgaaaaggggatgttagaagaaagatgctgggggtgaagtagagttgaggaagacagaactggaaagctaggttggtttcacagtacaatgagctttaggtcataatactacctttaggttatattgggctgtttggacggagtttgctgtaatcaggctagagtaaatagagaattttaaactaagcattgacaggctcagacttgtagaggcatcattttgacagtgatatggaagggaaagaggtagagatttgagacctttccaaagaactgtccacagaatttggtgacttactgtgcgaagagggaaataaagaatagggaacaactcaagactttctagtctgtgtgtttggaaggatggagacgcccacatttaagtgagatatgggaaggaggagcagattgtttttgaagggaggaagagcagttacttagggtcaaattaagttgtaaaatcccccccgggattttgtatgtaagtcaaagtgaattgtatttggaagaagaactggggagcccacctctggtattttttttatgtccctcatatggacaaataaacctctggtattaaatgaattttcttttgggggattctatatattcgggatttcaaccaccaacctatctggtttttcccgctgaaatgttgggtgatggaatcaggagagcagatttggagactctttatattttataattgagagagacaaagagaaaaccgtttgattt

SEQ ID NO: 72673 - DNA, 2453 bp, Homo sapiens
ggatctagagggtaaaggtcagtgacgctgctaaacatcgtcagtgcatagaacagccttcacaaacaattatttggtcaaagatatttgtagtgctgcagttgagaaatttctgtcttatggttatttcttcaggaataggaaattaagattcgccgatactttctttaaaaagcagttttatttttgaaattattccttggcttgaaaggtttgtgaagtttatatagccgaaccagaatagcgtaattagattttaaagtgaattgtgagccatcgattcccaggagatgggtgtcatagaatcatggattcttggatttgggaaagacttatgcctagaattattttacaacatttctgctaagtggtaattctcctctgccctaaaggtctcctgtatttgattttcctatcattgtgaacccacaattaaaatgctcttaattattttttgcttacactgagctccggtctcttgtaatttttactctgttaaatgtggttctgcaccataggactgcactcaaaacaagcttgccacatatgtaatttgtactaggacagtgtttatatttttgttcagataacaaaataagttaaatgtggtgtaaattagatcatttacaaataataatttgttagcagcttttaataagtagtatttttcccaactggtgaagtattaatgttggtagttgaaaacaataggaatgtatggaatatatggttcactggttcttttgttcctgtcaaatagtggcacaatggatctggggtttttctcagtataatgctggcatatttgtttcaaattgtacatagactctaaaaagttaggctttcaaattctggtcaatatagtttgctttaaatagtagctgcctctactacaagttttatttaatttgttgacaaatgagtctgctatgaaaaccggtcctgttgccagtcactaccctctgttcacaaatttgctgggtttataaatataggtatcattttcacttcaagattataattttagaatatgtttattctaggacatatagccctcaaaatctgcttactatatacgtcttataaaatagcatggttcttttttatagtaaatagaatttttatttaattgtctattgactttttttttccagggttcattgaaaaaatccttagtgatattgacatgtctcaagtgacataaattagccaatgactcggaatgatggattctccgaagattggaaatggtttgccagtgattggaccagggactgatatagggatatcttcactccacatggtggggtatttgggaaaagttagtgaacttattttttgcctgagtgcaaagttttttttttttctctatttttgagacttaaattcaattttgatgttaccagttaacttctaaaaaattgtgtcttccacggaaatcttacagtaatggcgaaagattgttttaatgtgtttacctttctgtgttttattgatacatgaaagtggaaataaaacatagaccttatgatttactgttctttgaaaatatggtacataaattctcccgggtaattgatgttacttttttccttgcaaataaaattgatactattcttaacacataaaatttaatatttaaaactataacataattctttttggaataatagctgtatttaaaggcttatatgcatttcttttgtttgccatgtttaaaataccttgtcaggatacttgtaattgaaaattataattttttctggttacctttccatttaacttttaatattttgatatattctaggaatgtctatattttaatttgctttatttctcttttagaattttgattcagctaaagttccatcagatgagtattgccctgcttgtagagagaagggaaagttaaaagccttaaagacttaccgaattagttttcaagaatctatctttttgtgtgaggatctgcaggtaaagtattaatcttatatagtatatataagatttttcttttttcttttgcttttttattaattgttttaaaagtttactcattttttgttttttagactagatttttaatatgtaatctcagtttgtaagtctgtctggtatacaatgttatttttccacctacctttacttggttgcgtaaagatgttcgtttttattgccatttgatttgcgagaggagaaaatacatttcaaggtttttttctttttttttaaccttttggaggtccttgttagctattagcatatagtagttactctctcatctctttggtttatctttgcaactgatgggaaaagttatgaatttctaatgtacctggaagagtattttggaaattggttagtccaaaaccagtatatatactctgaactaaagagagtatagaatcttgtaaattctaaaagatccttttagaagctctaaatcgctttta

SEQ ID NO: 72674 - DNA, 1562 bp, Homo sapiens
acagaaattactctgtgcacttttaatttgaaaatacttttaaaatgtgtagtataatgtagtgtctgtcccaaaagagtaacattcattatagtgtttctttacgttgttgaaaattttaaattcacttaacattagatttttattaaagcaaaaatatgttttccttattagcttacccttttgtaactcagattaaacccttgattgttcaaattaacctgaaaaaaattattcttttggaggccaaacttttgattaagtagttgtttgtctctaattttttcaaatttatgtgtataaatataacctgtcatcaaatcaatgctaacattctatacatgtttttcatgatatgaaaactataaaacatgaagttatttgaatttgtgtagtttttatcattttatttttactttccagtgcatctatcctttgggctctaaatcacttaataacctaatttctcctgatttggaagaatgtcacactccacataagcctcagaaaaggaagagcttagaaagcagctataaggattcacttcttttagcaaattccaaaaagactagaaattatattgctattgacggtggaaaagttttgaacagcaaacataatggagaagtatatgacgaaacctcgtcaaacttacctgatagtagtggtcaacagaatccaattaggacagctgattccttggagcggaatgagattttggaagctgatactgttgacatggctactacaaaagatcctgctacagttgatgtctctggaactggcagaccttcccctcaaaatgaaggatgtacatctaaactggaaatgccactggagagcaaatgtacatcatttccccaggctttatgtgtccagtggaaaaatgcttatgctctctgttggttagactgtatcctgtcagctttggtgcactcggaagagttaaagaacaccgtgactggactgtgctcgaaggaggaatctatattctggcggttgcttacaaaatataatcaagcaaatacacttctatataccagtcaattgagtggtgttaaaggttggtactaatattttatttttatttacttatttattcatctggagtcagggtctcattctgtcacccaggctggagtgcagtggcatgatcatgtctccttgcagccttgacttccctggctcaggtgggcctcccacctcagtctcccaagtagctggaactacagtcgtgcaccaccatagccagctaagatagtgagatggtggccccactgtcttgcccaggctggactcgatttcctgggtgcaagcacccttcccgcctcagcctcccaaagtgctgggattacaggcatgagtcaccattccagcctacttgtctttaattcttaaaaatattaatgttgagttttgtctcccagcatgtgggaaagatgtcatccattgcttctgtttcctggaggcctgggagcaaggagcccaggaacagtatcacgaagcttgagataataccagttacattatcctgactgcccaaaaggcagtttttttgtttt

SEQ ID NO: 72675 - DNA, 1018 bp, Homo sapiens
ttccgcttaatattttcagaccacggttgagttcaggtaactgaaaccataggaagcaaaacacggatgaagagggaccacttcgtattgcctaatttagtttgttttgatcttctgggacctttttttcttgttgtaaaaatttatggggctgtttatagttgtggctcattgatttttcattgctacataatacttccattttgtaaatataacagaatattcatctacctgtcagtggacagtggggtttttttgccattataaatgctgctgctgtgaccatttggggggcaagtctcctggggcacagtatgagtttcccttctgtataacaaaggaatggaaaattatagactttcgtgtccaaatttacaagataatgacaattgttttccaaagtggttgtaccaagcaattctcccattaatagtgtatataagaggtcttcctgatccatatattcttcttggtttattttcacacttttgagatttttgctatttgagtggtataaaatggtctgtgatcttgatttgccgtttccacattttgaagaggttgtcggctctatgtgtatatattgctcatatttgttccctcttctgtgaaatgccttttgtatcttatccctatttgttctgttctgttgattgtcacgttttaattgatttgtatgagtttgttccttgtatcattgttgctagagttacatcagatgtgttgctgaatctgctcccagtttgcagcttgtgtttttactttttaaaaactgtcttgatttatagggaagtctttatcttttcatttggagctagtaatgtttgtggctttttaaagaaattattactattcccaaggtcagaaaatcattcacctatattttaactgaaaagttataaagttttgcttttgacattgaaatttctcattcagttggaattcatattgatgtgtggtatgaggtaaggatccatttttttcccatttgcatagccagtttttgtagctccacttt

SEQ ID NO: 72676 - DNA, 1052 bp, Homo sapiens
ttgtgaattaacaccaggacaaatatccatatatcttttgaattaattactgactagtttcctaggaaagatattagaatatgaatattaaaggtcttgctgaatacagttttcagaatggttgtaccaatatataattccattttcattatgtagaaaaaatacctcagtgttttctaaccacctttggttagaacattcaagacgttatggttttgttaggtaagaaatattttgtttcagtgtaggttttctttgagactgaacttttttgtgtgtgtcagtcatttacagttttttgcaatttttaaaattcagtttctcacaagcattttgcctttgacttttcttctatttctgctttctctaattacagaaaccccagtgttaagtaggtgacagttcagttgtttgctgcagaagagcagcagttcaatattggaattaactttaattttatgtttttaatctgttactaattttttacagaataattgtagtttttataatctggttaattatatgtttgagctgcattactttgcaatgtaagtttttttttttggcatggtcaaataacaaaaattctggttaatgcttatttcatattacaggagaatccagatatttcattagggaaacatataagcagagtgtgatcaggctgtatgaattatttataagagatgtgagtgaaaagatctatttgtagcttaagagtaagtagagtcagatgcatgtagagtcttttattcaaaataattttcttattaatcttggatagtttcttgtcacagtaattccattttgaagataataaatattaccataaagaagtgatcaaaaacatagatatgtgtgcccaaaggtatttatcacaatagtatttataatagtgaaaaaagaaacaactaaaatgtctggcaataggagaatgattaataaagcgatgtttcagctgaatatagtggcatgcgcctgtaagcccagctactcaggaggttgaggctgcaagatggcttgagcccaggagttaatgaccagcccaggca

SEQ ID NO: 72677 - DNA, 1608 bp, Homo sapiens
ccaggctagggggagaactggaccatggaagtgaggctctgtccagggtaggggaagggatggaaggtgactgttcctggccatgttccaggcaactgtagttccaggctagggggagaactggaccatggaagtgaggctctgtgcagggtaggggaagggatggaaggactcagtctcttgggccaaatcggtaaggcagcatctaagctcctctgagaataggaaggagagcaaccaattggaaaaagaatgggaaacatgtagattctcctgcttaccttactttccagtctcaaagctggaagccagcattcactgttcagttattttcaatgacaacaagattcaaatcttcagttgtaaagttgttaaaggaaaggattagactgaaaagttaagaagaacggtagatgaagagtccaaagagttgaggctggtcatttaaccattgtgtggccacgccctctccacaggtggaacaagatgatcagaatagaaatggccaattctgatgtgtttctacagtgtttcactgattacattttttaacatctgtagcaaaccatttccataatttttttttttttttttagagacgaggtctcgctctgtcacccaggctggtatgcagcggcatgatcatagctcactgcagcctcaaattcctgggctcaaatgagcctcctgccttagcctcctaagtagcttggactacaggtgtgtagcaccactctcagctaatttatttcattttattttttgtagagataatgcctcgctatattggccaggatggtctcaaacgttcatagaaactggttttaggttcctagaggctggcagcaattctcagaggtaacgcaagcagtcttcctgccttggcctcccagtgtgctgggattacaaggtgtgagccaccacacctcatcaatttttgttttaatatactctaaggcttatcatagttccgagatctttttttttttcctgagaaatctagaaagatggaagacagtatgggtcttttgtggattttttgtcctaagaaattttcataaatgtctgccaaggaaaaggaaagagatcaaagtggtaattaaatctttaggatggacatttttagaaaaatgctttataaacttcccctctcccaactctgagtgacttattgtgtcatactgtattaacacatattcatgctgtaaatatagtaagaaaagacaatagttcacaattttggtttagtttttgccattattgattatgagcagtaattcttccttttctttttgaaggtgatatggaaagccctgtgtttgcatttcccctgctcttaaaactagaaacccacattgaaaagctcttcctatattctttttcttgggactttgaatgttcgcagtgtggacaccaatatcaaaacaggttagtttcttttgttttttaaaatgggttcttctagtttctccaccactaaggttaagagaacaatttgagcaccagacactacagtttgcttgcttctttaaactggaagggtcaaaacctcatcgtttgatagactgctagtaggatatttcctaaggagttcttcagtgggaaata

SEQ ID NO: 72678 - DNA, 1052 bp, Homo sapiens
taatagtccccaaaactcccactagaacagggtgagaattaacgttttattcatacctaggacttaaataatttagtgtaagcaagtgagtatgagaacacatctgtttccagtcttctatcattgctttatataaattctctggttttctcctcacagtaactcagtgaggaagatcctagtgtcctcatttggcacgtatggatatgacagcttgaaaggggttagattgattcccaagatgacacactgtaagtggcagagtcaggagacacacttaggctcttctggcctctaagactttcttgctcactgtggtatactccttaatcactacctgggttttaaataatataaataaccttgctgattaaaatcagcttaattgtagcttctctggaatccatatcttagttgtttgacagttttcggttgagtgtcttctgtgtgttaggaactcaggcactggaaatagtgtatctttgccaaatttactaattaggtagagagataatacacgaacacataatagaggtccagtgacttcgtaattaatctgatctttgggctgcttaacgttagctttgaatgcaagatgttaaatgcgttttagagatatatagcacaaactgtgagagctcaagggagggaagccactagccgcttttgtttgcttttttgttttttaaaaataatcttactttgttctaaaaataaaagtagttatagagggaaagctaaaatgaagtgacgttttcttaaatatgttttaatatgtcataacttaaaacttatttccacttaatctgaaggagaactgtccagcaaattcctttgtttttgtgaagctgtttttagtgccagcataagggctttttactcaacttggaaagtgtaacccagagtcagttaaaaacatagtcttcagaggcagatctcaggtctgttatttatcactgtactctatgtgtcactttccccatctgtaaaatggggataagaatagcacctgcctctgagagttgtttggaagatgagtgtccagtgccatg

SEQ ID NO: 72679 - DNA, 1111 bp, Homo sapiens
attttttcccccttgggacatttggcaacatctacagacaactggatgccgttactggcatctggtgaggagaggccagggatgatgcttaacatcctacagtgcacaggacagtgcttcacagcaaagactctctggtgaaaaatgcagtgataccattgaggaaccctgtctttttttcttgcttcatctcatagttgaaagatatgggaaattaacatggagcatcttcacagagcttctttactagaggtagggaggaacattgccatattaacatgatttggggaaataagaaagtatgaatcacgaaaaaggggaggaatacttttagacattggtttaaattaatgtaaatgcatttaacgttaatgaatttgttatgtcatttttttataggcatatgaagagtctggtcacctttacaaatgtcatccctgagtggcacccacttaatgctgcccattttggtccatgtaacaattgcaacagtaaatcacaaataagaaaaatggtattagaaaagtgagttaaaattgtcttataatttttagtacaaaatgaaggtggatttacatttttcttaatgtgtaggattgaaaatggtgacaacaacttacctttctgaaatttgagttaacatatatttctgggttgccagctgcctcgctctatctggccagtgagcccactgtcacggtgaagccactgaaaagccaacttaggctgactctctggccccactctcctagtgtctttccttctttttgccttttttctccctttaaggatatcaagcttcagtttttctctcctctgccaagtgtatggagtttctagaattctgggatttccttaatcagatttcaagaactaagatgattcaaagataagccacaggctcatctctctgaatttccatcttctcctagatctcagcatgctaattcctcatcatcttgaaagctatctagtggccttgagcagatatattttcattgtattttgccagcttttctgtttgtcctcagttggggaggttggtcagcattaccttttccagtattaccagagaaccatctgtttaaactcacaggtcagttccatctca

SEQ ID NO: 72680 - DNA, 1009 bp, Homo sapiens
taactcagtactcggtgtttgcattgttattaatatacatgtgttattccctcttcagccaagcagtatatatagttaggtttcacttttacaattcttatttttccgggaattgttatttgccttgttttcatttgttttattatgtactgtgagtttttgccaaatactttaaagacttattaataaattttcaatactcagatgcttcacagttttttactctgttcctctcccctttttttcctggaactctttcctgccacctttcactctttgctgcagtctgcgctggttcctctctgggcctgcagcatagggtgctctttattatgtacacacttccagtcactatcgtagtttttagcccaaggcctcatccccacattctatcacatctgttgcccataaatatccagtcctttaggggttctctgggaaaaataagctcttctttgtcatcaacatatgcactccgtagtactcatgtcttcactttgcccgttctgctgggtaaggtgccacttctctgtttgctttctgtcctctaaatatttgacttcttatttgcttattttcctttctttgtccttttggactcatatcttttttgcccctcactattatttgatagcatttgtgtaggagggcgaagtgggaaggaagaggaggtgtctgtatctgtctgaagattacagaagtctgtaatctgtcttggctgccaggtgtcagttttgagatgtaaatgttgatgatgaggtgaggagaagagcagcagagcatggggtctgccatcctgccttggaccatggcctgctttaggctgcttggtgtatatgatttcatctagctgttcatacctgctttttcctgtgccccagcactgaacatagactcgtaccattgttttgtgtaatctgttaattggttgcactgcagcatatatattttttaactatacaaataagttgcttcccttaaagattcatgctctgatctggaaatggat

SEQ ID NO: 72681 - DNA, 1046 bp, Homo sapiens
gtaggtacttaaattttgaggacttaattattctctaataaagtgattgacaaggattaatgtataaattataccttgtcagtctgaacaatctgcagtttggacattgattcaaattcatttaggctgaataaattttgataaactaagtaagttttgacagctatttaaatattgggaaaggggatattcaacatttttcttacatcctgagagctttgttaaatttagttatttgagacccattgggttctattttctggttcagcatgttgctgtaatggtaaaatacaattttgaaattatagttgtcttgaagttaataataaattgaccaatatgttgtatttttttctctacttagttacaaattgaacttttcctaagtagaacttttaatttgacaggccccctttgcttcctgaggtaactgaaataggccaaattaatgcttttttgaatatcttaggtttgttgctttctttcacatgttacctaccccacttaacaaaagcaattaatctcagcacttgatgccaaagaaaattctaaaaggtctggattttttccttggattttacaaagtagctacaatgggacttttaagacaaagctgcattgctgcttacagagcaatttttgtttaatggtctgtgttagagtcatactgcatgatgacttccaactgtctgggataccattctgaaaagggtttagtgttacatacttcttagagagagttctccatttctaattaaggcacacatctggaggtgctcaagaaaaattagtgcagttagccttggaagtgttatgtgtgactagttcacttcagacatcttttgtataatcagacacatggcattaaatttatttaacttctcttgcttttctctcccacagagtatctcccatattcatgttgcactttgtagaaggcttaccacagaatgacttgcagcactatgcatttcattttgaaggctgtctttatcagataacttctgtaattcagtatcgagcaaataatcattttataacatgga

SEQ ID NO: 72682 - DNA, 1017 bp, Homo sapiens
agacttggtggaaggtcagattcataaacttcgtctaaaacttcgtaaaaagctaaaggcagaaaagaagaaattagctgctcttatgtcttccccgcaaagcagaacagttcgaagtgaaaatctagaacaggtgccccaggatgggtctccaaatgattgtgaatcaatagaggacttgttaaatgagctaccatatccaattgatattgccagtgagtctgcatgcaccactgttcctggtgtttccctgtacagtagtcaaactcatgaagaaattttagcggaattattgtctcctacacctgtttcaacagagctgtcagaaaatggggaaggtgactttaggtatttgggaatgggagatagtcatatcccaccaccagtaccaagtgaattcaatgatgtttcccagaacacacatctgagacaggaccataattattgtagccccaccaagaaaaatccatgtgaagttcagccagactctctgacaaataatgcctgcgttagaacattaaacttggagagtccgatgaagactgatattttcgatgagtttttttcctcctcagcattaaatgctttagcaaatgacacattagacctacctcatttcgatgaatatctgtttgagaattattgaattaatgcttgttaacttttttcatataatatttattattattagaagaacttacaatgtgttcaggtagtgtttatacactggacttgtgtaattacttgtgtaataaccatgaacaaaatgcaaggtttaacctttggttctgcccatgaagcatgtaatctttcttacacattaaaatcactgaatgtgttctcctttttggtttcattttgttcttgtgagagtatgaggatttcaaaatgttaaagatgaaaagtggcgtctagtttctgacagtttgtacagttggatgcattacatttttagatttgaagttttggttatgttagtgttatgagtgatctttgtggtggttttcttcccctgga

SEQ ID NO: 72683 - DNA, 1050 bp, Homo sapiens
atgagccctcagatgccgaagcacctttcagattccaccggttttatcggctcatttaaacttcacttctaacacagtcctgcattacacacgtgtctgtcgttatgggcagctgcagagagggtcttaatggtcctaatgctcagtgaggatgcccaatggtcaacagaacctgccatcttcaggccatcaaggagctctggagttaaggaaatcatgagagcacagaggggcgggtacagcagagccctcgtggtaatgggttttgaggtctaggctctcttcacttgggtttgaaataagttcaatgactagtaatagctgagacacttctacccttcaaatgaagtaaatgggaaaatggagcattgttgagtccagggagctataatttaaaccccatatatctaaaaggggtaacatttttgtgtgtgtgaaattggtgtcattcgcactgcatctacagttttctttttccttctcttccagcacccctggctacatatttgggaaacgcatcatactcttcctgttcctcatgtccgttgctggcatattcaactattacctcatcttctttttcggaagtgactttgaaaactacataaagacgatctccaccaccatctcccctctacttctcattccctaactctctgctgaatatggggttggtgttctcatctaatcaatacctacaagtcatcataattcagctcttgagagcattctgctcttctttagatggctgtaaatctattggccatctgggcttcacagcttgagttaaccttgcttttccgggaacaaaatgatgtcatgtcagctccgccccttgaacatgaccgtggccccaaatttgctattcccatgcattttgtttgtttcttcacttatcctgttctctgaagatgttttgtgaccaggtttgtgttttcttaaaataaaatgcagagacatgttttaagctgatagttgaggggttttgttaatggcttttgggggatttatctctatacccacaaacgactagtttgttttcctcaaact

SEQ ID NO: 72684 - DNA, 1048 bp, Homo sapiens
tctcttgctccctctttcaccatgtgacatgcctgctccccctttgccttctgctatgattgcaagcttcctgaggcctcaccagaagcagatgccagcaccacacttctcatacaggctgcagaactgtgagccaaataaacctcttttctctataaattacccagtctcaggtatttctttatagcaacacagagtgagctaacacagcatggcaagcaccagtgtctgcctgcacagtcttctggtgttcctcctatctctccagctgctcccctgtcaacccctttgcttagtcctcctctgcctctcctctaaatatcctcctgggccctcttctctatgagtgctctctgcttagaaaatctcacccgggctctagtcctgtggttttaaatggcatccacatgctggcaaccctccaaattgatagcctcagctctgacctctcctctgagctccatatctggacacctaactgtccatttgacatctcaacgttcatgtctcagaagcatctcaaacatgatatattccaaacagaaatttttatatttcccaaatcagcaactccccaagtgtttccagcttagaaaatggcatctccatctgcccagttgttcaggacagatgcccaggagtcagtcttgactcttaccttccctaatgacacaactccaccactttttttctgttcaatctgttatctagcatggtgctccaagggcccagccaacatcaggtgctcaataaatatttgttgaaaattgattgaatgtacttgtataatatgaaccttgacggaagggtggaaatgtggaagttagaaggagcatgaggttggcattctggtaaaggtgttcattctaagattaattgaaggcagtgtttacaatgcattctgggaggtataatgccattattcctcctcgattcaaatgtaatcccacccatatttgaacaagactttcatgggcactaaagcagtggtggagacagagtcttataatttacttggagcttctcagatgcactggcctccagaatg

SEQ ID NO: 72685 - DNA, 1929 bp, Homo sapiens
tcatgtaccagtccttgttctcaggattaaacaagtgtgcaaagtgtagtctctgcccttatggaactcatcttgtaatgggagggagaccaacagtaaacaagcctgtgtcatctatcagagatgttaagtgctatagggaaacaaagtaaggaaaaaggggttaggaaattctaggtcttgttgtatgtgaggctggaaggaaactgggaaaagtgttcttctggagtaatgttcaaacacagtgaaggtcaaggaaaagtgacccttttaagcactgtcagtttcaagctgtaaacttgaattctagctctttcctcactagttttcctgatcttgaagttacttaacctctttgaaccattgtcttccatgaagtggagattataatttctgtcttttaacactgttgtgaggattgaaggaatatatgtaagtacatagtcctaacacatcctggaagaatattaatactctattttggtcagaatgtaaactgtggtttggggcaagtgtaatgagaaaatgtaattattttatgtgtaattggagttggtagaaaaatagtgggttgagtatgtggagaagcagttgaaaatgaactggatggatctgagttaatctgataactagtttttgttttctttaggaattgaacaacacatgtgaacccgttgtaacacaaccgaaaccaaaaattgaatcacccaaactggaaagaactccaaatggcccaaatattgataaaaaggaagaagatttagaagacaaaaacaattttggtgctgaacctccacatcagaatggtgaatgttaccctaatgagaaaaattctgttaatatggacttggactagataaccttaaattggcctattccttcaattaataaaatatttttgccatagtatgtgactctacataacatactgaaactatttatattttcttttttaaggatatttagaaattttgtgtattatatggaaaaagaaaaaaagcttaagtctgtagtctttatgatcctaaaagggaaaattgccttggtaactttcagattcctgtggaattgtgaattcatactaagctttctgtgcagtctcaccatttgcatcactgaggatgaaactgacttttgtcttttggagaaaaaaaactgtactgcttgttcaagagggctgtgattaaaatctttaagcatttgttcctgccaaggtagttttcttgcattttgctctccattcagcatgtgtgtgggtgtggatgtttataaacaagactaagtctgacttcataagggctttctaaaaccatttctgtccaagagaaaatgactttttgctttgatattaaaaattcaatgagtaaaacaaaagctagtcaaatgtgttagcagcatgcagaacaaaaactttaaactttctctctcactatacagtatattgtcatgtgaaagtgtggaatggaagaaatgtcgatcctgttgtaactgattgtgaacacttttatgagctttaaaataaagttcatcttatggtgtcatttctaaactgttgattttgtcactaatttaaaaaatgagatgagggagaatatgaattattctagcagaaatgaagttagtgtccagtttttcttttttactgcttatgttctctcttttctaagtgaaaatgtttttctcctgacagaaaaatagcatatgtttattacattaaagcattttaaaaatactataaagtgaataaaacttaaaatcttgccacccagaagaaaacattgttaacacttcgttatacatccttggagccttttacccctaatgatgggggtatatttgtgtgagtgtctatgttatagtgctgtaggctgtttttaaaaactctgtgccagggaaattagtaaatacagtcaagtgttgtaactgcat

SEQ ID NO: 72686 - DNA, 1053 bp, Homo sapiens
agacctggttttattttttggagagcaggaagatactcttctagaaaccacatttcattgtacagattgggcttctaagataaaatattttaagtcaatgagagccattttcaaggtctctgtgtaacaaggcagagaagccaaatcagagtgccttcctagataagattagctacctagtgtgagaatacctctttgttttgttgtgaaaaattctgaagtacgagtgccactaatattgtcatattttgtgttaaggatcatcaaaattttttgagactcctcacagaaactgaagactggctgtatgaagaaggagaggaccaagctaaacaagcatatgttgacaagttggaagaattaatggtaggtcgttttctcccccaaaaggtggtacttgtgttttaaactatagactttaaaataaaattatgataactattaatttattacattttattttagaaaattggcactccagttaaagttcggtttcaggaagctgaagaacggccaaaaatgtttgaagaactaggacagaggctgcagcattatgccaagatagcagctgacttcagaaataaggtgagtcagtctttttgtacatagggaggaagttaacctagattttaataagctaacacttaagctgggaatcatcatgaatagtcttaactttgaaattttggtatttgaggttagaggtagatttgaacttgagcttcctggaaagttgagtcaaatgagatactattgttcaataaattctacagaatgaccgtgttatttttgttcaggatgagaaatacaaccatattgatgagtctgaaatgaaaaaagtggagaagtctgttaatgaagtgatggaatggatgaataatgtcatgaatgctcaggctaaaaagagtcttgatcaggatccagttgtacgtgctcaggaaattaaaacaaaaatcaaggtgagtgttactgtctcgtgtttactgctgggttcacttacggactcaagttgcaatcatttgaaccttcaacatagccatttttcctgtaaat

SEQ ID NO: 72687 - DNA, 1264 bp, Homo sapiens
aaaaaaatctttctgcttgatataacatgattggctgagttcttgtgaaaaaattggatggcaataaatcataacagagcacagtacagttggaatttcacggcacactaaatatttctattagaatacattgtatttttttagtagtctgaaattctagaataatatgtgaaataattgagatttggtttttccatactgaggtgggaacatcgtatttaggagtttatttaacaataaactgtagtccatttatttatctttgatttaaaaatgtggcagagtggtgtgactgttatacattggccagtattaatctgaatatggataaccatttgtatacaagaaaacaaaattacatttaagcagtagcttgattttttttttttttttttagcattaaatatgaagtctgtgtaatcggttacaatgttaaaaaaatcaaacttcagcctgagtatttagaaaatggaaatgtctgtttggtttgtaggaagagtttgacaaggtataagttggaactgtgttaacactaaaatttgttttgtatcattttttttaaaccccagagtctacatatttagaatttagcttgagttaactagaagactggaattaacctttcctgtttcctgacagggtaagatgataatgcaagataaattggaaaaagaaaggaatgatgctaaaaatgcagttgaggaatatgtgtatgagttcagagacaagctgtgtggaccatatgaaaaatttatatgtgagcaggtatgtcttagagctctgtttttgttcagatagtctcatatgaagtgtttaatatcaaaattgacagttgaggcttaagcttttactcaattatgtaacttaaactttttagaaacagaaaacaaagttatggagaaaggcttgttgctgatgagcagttttattttgtactagcctacccccaaaactcttcatttttaccatctagaagagagaacctatcaaatatttatgtagagtctatggcattactgtcatagggtctaggataaatacgagaaaaatcttcgcttttaaaaacgtcaaatgcggtgacactgctgccttggtagcgttcctgtcattgtttcatctcataagatgtgttcatccagtaattccagagcttactaagccccgttattccccttatcccttttcttgactcccagttagtatggctgtgagtaaatcccagaagcacaactgtgaaagataggacttggaaaaaaagaaactg

SEQ ID NO: 72688 - DNA, 1054 bp, Homo sapiens
tcaaactcttgggctcaagtgacccaccacggcctcccaaagtgctgggattacagacatgaaccacccacctggcctcctctacagagatttagacttaattctaaataaattgtgattttgtgatttttgttgttgttgttctaggccgctttgtagttcagaatgtttctgcacagaaagatggagaaaaatctagagtaaaagtcaaagtgcgagtcaacacccatggcattttcaccatctctacggcatctatggtggagaaagtcccaactgaggagaatgaaatgtcttctgaagctgacatggagtgtctgaatcagagaccaccagaaaacccagacactgatgtaagtttgtggataaacctttgtgtttgaatagagttgacttagttctaagctataggagaattgggtagggaagggttaaaatgaatgttttccttcatgaataattttgatcagaattttaggtaatgataatagcgcttgccggttagtggtaatacacagcttgaaatttggtgaattgtgactaaattctgtgtaacttaatttgaagtaactagtatatgacagagtagatgatgttttattgagttgggagttttttggttttttgaagacatagaccacacattgagaagtcgaatgttgactgacgtttaagaaacttaaaaaacagactgctacaaaaactgtttgaaatagctaccaaatattaaagttttttaaattgtatggcaaaattggctttgatattttagaacttgtttttatttttacatggttttctgtatggtgggaggaaggaagagaagtgtctgtgtagcgtatagtaagagttgttattcatcattagcatgagtgctagttctgtgtggtcaacagaagaattttaggaagctaaagtattacaataattacagtttatttctagggaataactagaaatagcttaagagggaggcagtgtggtgttttagttaagatgtgagaaagtgcgttatctagtgatcactgttacctttctagaacatctaagcaac

SEQ ID NO: 72689 - DNA, 1046 bp, Homo sapiens
actaactttttctctagattaagtgtaatttgcagtctgttacttctaatttaaaacctgagtcagcgaccattgtgaatctacttctcaagtgtacctttgtgttatcttttctaaagataagttttttttggtacatattttggggggacacttgacaccatccatctacttttacccatagtaactctctttcccagaccataggtgaaatttgccaatattgctaggtcttttcaggacgtacccttgcctcacaccttttcataaataaattgtttgaaggagtccaacctgatcagttgtgttttctttcttactactttaaaggctaaaatgttctgacccagagttgtggtgtattgttaaaaacagttttcatgaatttatttttaggaaaagaaatcattgcatgtagacttgtaagattttgataaattggaatctgtgcattaactcgttactgtgtggaagataaaatcccagctctttggcatggcatctaatttttcatgtttgattgaaactgaaaacgtcgtacatgcttgagccatcttacatcccactttccagagtaaatgctgtttctttagatagatggatcttttggcaaatatttcctgaactactgatttgacaattaatcaaggtgtattccttcatctttcagtgacattgtaattaaatctatagttctgtgtgtttatatagacagcactttaaatactaggcagttaaattccatttagagctttgcacataataggttcaaaatacttatttttgactcagtggtctctggagtaacagtacttacttgtggctataacttacacctagcacttggttctgtagtaagtgctcactgtacttaatcctcagaggtatagaaaggtaacttttgtaacaggtcacacagccaggattcaagcccagacagtctggattaaagtctacacttttaaccattagtaatgttctggaaccccactgtattgtacataataatttcaggctttcatacagattttggctcacctccctta

SEQ ID NO: 72690 - DNA, 1025 bp, Homo sapiens
ctttgtatacttataaaaggaagaatatgtagatactaaatattaataataatccattgtattatccatcctgttctatggggtttttgtttttgcttttttcttcataatggaatatgcctccttaattaactgattccttcaaatgatggaagtttatattttcttcagaagtagagctaattttggcctctcttttgaaggatcctatagtaaatgatgaattgacttttttggtctatttagcttaatcatctatttagttatttttatatgtcctgtctaaatagggaattgtccacctatctgttgggtgttgcctttcccaaatttgaatttaccattgcttgcttcatttacaaaattacttaaaaatatgaacattatggccctttggggggtttctcagacatttggaaagcagtgtagacagaactgttcatgtatgtatgtattatacatattcaaaagtgatacaatttgaaattgctatcagcaaggcatttctagaaagaccaggcttttttcctaatcccctgtgaaacctgttattgattaattgtcgttatcctaagatatattatttgtctttgtacctagtaattggcatagtatttagatggtaaaataaattctttgtttagatgaaatatactggaaacaattctggaatgtgagttgttttttttttttttttttgaaaaccctgtccatccattggaattgagttttatattaaaagatgactgggaagtgttcatgtgctcatgatttttttttttttttttaagtgtgcaatactttccccggcatttaaagttagagaattttccgtcacagatgcagttccttttccaatatctctgatctggaaccatgattcagaagatactgaagggtatgtagcagaaaataacattcagatactataatgtaaagaagaaaaattaacaaatgacttctctagtagagtcattaacaaatgacttctctagtagtcattaatttacctggaatctttgaac

SEQ ID NO: 72691 - DNA, 2067 bp, Homo sapiens
cattcagcttttcaagtgtctgcttgtgcttttaacaagggaaaattgaaggtaaagtcatacattggaactcagtgtccaaaacacgttaagtgttgtgactttaagctactgagcctctttactaggctttttcttcttggtaatgaagagttttattttaggtaaagatgttaacaggaaacggttgctaaggttgagctccataaagatgatgtaattgtcttagcatactcttaagtgttcttgtttaggaaagaaaaggctttttacagttattttctatgtagtcatttaaaagtcaaaaatatcttagagatttattcctgactgatttggatttcatgttataatttaaatatagtcttgagtctcttagtctttcattgtttgagtagtaatatttaagattctagttacaaatgtgattgaaaataaccagactatttgttgtttcaaccaaattaggtactgggaacagcttttgatcctttcttaggaggaaaaaacttcgatgaaaagttagtggaacatttttgtgcagaatttaaaactaagtacaagttggatgcaaaatccaaaatacgagcactcctacgtctgtatcaggaatgtgaaaaactgaaaaagctaatgagctctaacagcacagaccttccactgaatatcgaatgctttatgaatgataaagatgtttccggaaagatgaacaggtgtgtcttgaattctacagattaaatagatggaacttcttttgaaactgtagcccaggtgtcagttctagtgggtgttgtgagtcttggcctacatttcagaattgtgtgttacatgcctgtggctggagatgctgttgtttatcaccactagctctaggggcacttatgtgaagagggcttttaaaaatacctttgctaagtactctcatgggtctaagtactaccctcaagtcttcgtggtattttcactttttagtatttctgggccagtaattgaaaactcgtttcacagagatactgtgcagggactggaaataaccattgaaagtaatggaatcagatcaaaacatttagaagggctgcatggtggtacatgcctatggtcacaacttttcaggaggctgaggtgggaggatcccttgagcccaggaatttgaggctccagtgagctatgattgtgccactgcactcagcaagactctgtgtcagggggaaaaattttagaaggtaaaatggcagtcataagcatgtaaaatgatttgtttgagtaataccaggagaactgtcttccgcatcatctttctgcacctgtttggtgtatttatcaaaaacaaaagagctataaactacaatacagctaaacttggcccatgtgggatccaaggtgtctgagggggaaaataatgaaattcattgggttgtcaaaagtaggacaggatattggtcttaacttttctaaaaacaagtttttatttgctaaggtcacaatttgaagaactctgtgctgaacttctgcaaaagatagaagtacccctttattcactgttggaacaaactcatctcaaagtagaagatgtgagtgcagttgagattgttggaggcgctacacgaattccagctgtgaaggaaagaattgccaaattctttggaaaagatattagcacaacactcaatgcagatgaagcagtagccagaggatgtgcattacaggtactttctcaactctgcttttgcttggtgtacagtctttaaacagtttccactggatgtcgtcatggtgggataataaacagagacctgtgtctaggtagcagaaggacattttaaacaaacccgtaaagctgtagggagataaggctactcaaatctaaaagatccagtaaatttcaattgaaagaactaccaagctggtgtttctcaagctggaaatcaaaaacaggcatgattctgaggatatcacagaaaacacagctgaaacactaattagctgtgtagtagtggcagttgttacttaaaaagcacacagggaattacagtggtaatctgatataataaggaattgatttagggg

SEQ ID NO: 72692 - DNA, 1442 bp, Homo sapiens
tttaaacaaaattataatttggctatagtgctactagatctattcattcattgggtataaaacctcacaagtttagcagggaaaaaaaggaatgaaacagtgataaaattctagtgtgtttgttcagagctttagtgatagttttcactgtctttgagtttatcttgcagattttgaaatctttaaagtctgtcgtcacactattttgcctcttgttccctcttgctgcttactttctggcattttctataggagaaggaaaaagtataaataaaatctgttcatagatgggaaattcagtgaaattggtgggcctcagggcaacttatgtgcactcataggattggtttgagttgtaaagtgaataaataaaattactaaaattactggtaggtggtgaaattaaagaaaaaaattaaaatctcaaacttctttttgcagcaaatcactcatgcaaacaatacggtgtctaacttcaaaagatttcatggccgagcattcaatgaccccttcattcaaaaggagaaggaaaacttgagttacgatttggttccattgaaaaatggtggagttggaataaaggtaatataattgagcaaccttagaaaaataccaacttattaatacttaaaaatacgaacttatttgagttattacttaaatttcttaattacaccaggtggtctttttgttctttttttattcagctccttttaaagtatagtagatagacgctaaattgtctttgaatattattcaaatggtaatatatatgctataacttaatttgtgtttcttctgactttttggcaattgtaaaatttaggtttatttgatgttggaaaaaaaatcgacattgtgttcatgtatcaaacaaaagtctgttctgagacagcccagttgcagttgtttggagagcaatagtgtagtaacaccaggaatctttttttaaacttgcagaggtattcctgtcttgtgatcaacacacaataatatttatcctagtgattcatctcttcagttagagtggaaatttactaccttctttaatgttttgacttagattttgggtggggtatatctgccctagctttcttccgctcctcttcatctttaggtagaagttctttcttcctttttctttttttctcttttcctttctctcccccttccctccttccccttccctttttcctccttttcttccttcttcccaaaacaactacaacaataaaataaagattttgtggaagggaatgtgtgctaatttttggaagttaaatattggcatgtagcttaaagtactacaatgtttaaaacattttttcccttcaatataggtaatgtacatgggtgaagaacatctatttagtgtggagcagataacagccatgttgttgactaagctgaaggaaactgctgaaaacagcctcaagaaacca

SEQ ID NO: 72693 - DNA, 1386 bp, Homo sapiens
ggtatggccctgaaaaatgtgaactgagggcagtattggagttccccttaatatgtttgttaaactataattgtggtggattctattgtatcagctactaattgttatttagtacaattaatttgattctcccctaggaaaatgagtagatccattctgcaagtgtatggttattcagagcttacagtgatgctctgattttgacggtttcttgtctagcttctgcttggacacttctctggcttttaggatgctattttatttaacacttgctcagataatatagtttgaggatgtttctattatagcaaatttaaacttaagggtggtacttaatgccctcagtattttcccgttttgctcatctcgtttaccattactcatacctaagcaggtaggagtaactcacccaaaattagattatatttgaattagtaatccagaattagataactcctctaatccaaaacctaattcacttaccttcttctcacaagactttttaagctagtctctgctctgttattgtgcggttccatttccatggtggctgagaaggttgtttcacagttgtaagtcactttccatctcttcaaaacagatttgatgtaactgattagtcactcctttccctcgacatttatattctgttttgccatggtacttgttgtgcatcatttttttctttctccggcagaatctcccagatgggaacctctttgtgctctttaaacttcagaggtgtaacttgggttcatttgcttgcgtttgcataaaaacttttgattcctaaagaagccggtggtatatcagaacaaaagtcggtatgacaatgacatttagatttgtacagagttggtgactgaaaggtagagtcacatcctattttttgttagtcgtgtgtagggtcaaattaataataccgttaacatatttaaaacattttcaaagttaatgttcggttcataataactggaacctggagaattcctgagccacgagcagaggtttttggggtagtagaactgccacctaggttggatctcagagcagcaattaagtggaagccccctttgagtatctgatgaaagctatagaccttaaaattgtgctatgcttgttccctatcccctaatgggtaggacatttatgttagtatttttctcttatcagtttaaaatatcaacctttatgctttttaattttttggaatatatttttttctaggtcagtcatatcatttggatcaaaaaatagaacaatcggagttgcagccaaaaatcaggtatgttctttaagagaattcggatcactttttaaggggggagtttttaaaaggaaaatctcaagagacatataagagggtaaagtgtgcctaagtttatg

SEQ ID NO: 72694 - DNA, 1008 bp, Homo sapiens
ggaccggctgcccattgggtagaatctttccagaaggctcgagaagaaggaagcggaagtggcacgtggaggggccggtggaggcgccggtgagtaaatgccgcagattctggaaagttctgatcagtgcgatacataaggctgaggaagtgggacctccccttttgggtcggtagttcagcgccggcgccggtgtgcgagccgcggcagagtgaggcaggcaacccgaggtgcggagcgacctgcggaggctgagccccgctttctcccagggtttcttatcagccagccgccgctgtccccgggggagtaggaggctcctgacaggccgcggctgtctgtgtgtccttctgagtgtcagaggaacggccagaccccgcgggccggagcagaacgcggccagggcagaaagcggcggcaggagaagcaggcagggggccggaggacgcagaccgagacccgaggcggaggcggaccgcgagccggccatgtcggtggtggggttggacgtgggctcgcagagctgctacatcgcggtagcccgggccgggggcatcgagaccatcgccaatgagttcagcgaccggtgcaccccgtaagtgggagtctgcgagggtggatgggaggaggttctgggcccttagtgtggggacccaagatcgcgggctggctgtacggatcaccgcggcaaacggaggcgtttgggcagcggcgcacccctccgtggaactagggaccagcgacccggccagaggagggatggggggcttgccatcacaaattggagaagggattgtctcagggattcacgggggtgagaggagtcccagagtcgagactctaagggtcgtcaccttgtgcgggcttcctattgggggttttcaaaacctactgggggtcgggctgcggcaaagcccgcaacttcgctcccttttcttggcaggctgcagcctgcgccttccgcggccgcccccgtatccccacccggcctctctgagctggctgagc

SEQ ID NO: 72695 - DNA, 1040 bp, Homo sapiens
tgctcaggcacactggccccctaccccacatcaaggtgttcctttattcccctgcctagaaaattcttcctcaggctcctggctaggccagttcctcatccttcaaggctctattgaattcttcaccatctgtagagaaggtttctgaatgcccacccagtaagcacattacccttccccaaagtacacccagttcttgtccagttaaggagaagctggtgccagcccgaatgcggagggtggtcactgtttggcttaggccaatcagcacatcctattccccttggccacagtcgttggttccaggatggtcaggtgacctaggcagcccaatcagggtgactttcagggctatggtttagaatgcctgggtatgagggtatttctctgcccctttccatccctttccttccactccctccatcttcttcttcctccaggcgctgttgtgtgaggttatgaggcccagaaccattacaacaaccttactatcatcctgaaaaggaaatgacacatggaagtggatagaactaagaaaattaagttggagcctagggctgaagtcagtcttgagacccaccctacctctagatttaagttatgccagccatacatttcctcaccacttaagccaacttgaattggggtttctgttacttgctacccaaagcaagtaacctcctcaggaaggtctttcatgaccatattacctaaagcacctcctggttcactctctgttgttatccactgatttccttcacaacatgtaccacactctatactacaacatatagctgcagtgatcttggggtgtgtgtgtgtgtgtgtgtgtgtgtgtgtgttaggtacttcccttctttgattgtctgacccagagggcagtgattgtttttcttctttatagtgcattatagatgctcaatcaatatttgttgaatagttgaatgaaaaaacaaacttattgggaaatgcttttctctaatgcagagtttctcagccttggcactgttgacattttgggctggatagtcatcgtgtgg

SEQ ID NO: 72696 - DNA, 2391 bp, Homo sapiens
tatttaagctctctgaataaggattaatttgctgcatttgtgtacttctggcatttctataggcgctcagtaagtgtgggaaaagagcaagattagttggtaattgtttacatgcatgattaattaggcagcagtgtaattaaaaatattagggcacctccggcagagaaggctgtagttggtcttggggagcgactgaatttggctggaatcggcttcagtggaagaagggcattgctgggtggcagccctgggagaaagggaggttggaggtttgggaaagcgactgggtgactcctggctgcatcagttggcttgttgcctggatgttttgcaactaaccaaatgggtgggtggtagctgaaattggtattctatttatagcactgcactttataatgctgtactgggggtataatatttgtatataatatatacaacatatgggctgaaatgcacatttgtattgctgtgtctattttttattacccccaggggaatatttgcactgtccaaatttgataatacactgaaggacattcagaatgcactaagatgtcaacacatttttagagatgtctattagccttgtgaagttgtcagataagcacaataaataagacataaaatgcattaaaaggtccctgtgagacatttggcctttgggaactggctttcatgggttggcacagacgggaggctgtattcttcgaggtctgaagtgaatcatgaataccttttatggagctctgcttcgatttaggggaagggcaccgacacgtataaagatgtccccacttacgatgttcttggaatcttgctgaaacagaatgtgacaggcgttctgtcacatgtgaacaatcttgatagtttataaataccttaaatattcccatataagattggcctgactatatagtttagtttccccacaaactagagcatatttgtttatatttttagagaaaagtcaatatagaaaatttcttttaaacccacatgcatatacagacacggttcactgcaactttggttctaaagtctggcaccagtttcagaatgagaagattgagtcaggcctccaggttaccatttgttagctgtgtggcttttagtggctttgagcttcagttttctcatatgaacagggcgaatggactggatagaatactagcactttgccacctcttacagttttaacatactgatcccgttgtagcagagattgacagccacctgcgaagtaaccctttagcccttgttttcctaacaaaactaatataatctgggttggggggaaggatggtggggtggtggtggcagcggtggcagcagcactgtgagacatttctcagtggcctttgcatataggggcagctagtgctctacagagatatctttagagattgtttggtggggctcctggtaaagctcattcaaggtggctgactcagctgggatgcaggcctttttgctctgtgttatcctccttcccattgcctattaagtggatctgagggatggagccatggtggccatcttgtgaccatgaggtgaccttgaagatggaagccagtagtaaggatggtagaagagaaagatagaagaagcctggatgccagatggatgtggagcatcatgtcagctctgcatttcctgtttgcagacttgtattgcatgagattatatgcagccaaacctaatcctattgccaaacctaatcctaattgatagaagaagcttattcgaaccaatgatattgataaaataataggtattagcttttatttttcacatgcctgtctgtcacttccctgtgtgagccaactttgtatttcttagcacctgccaaaattggggatggtttttcattctgagccaggtcttgcccagattcctttcattgcaatgagtcagaaattttaggacaccaagagtcagacctaattccaggttgttttgtgttttttgattcttaaaaccttctctttatttcttaagcagtatgcagatattactggcacagattttaatcttctggatggattctttgtcatccaggtagtccaggacctccgagttggcatggctccccaggtcatggacttgacccaggggagtttgccagtagccaacagctaagccagtgggagggagggagagcatctgtttcaaatagcagtgtgaattcgaaggaggtgctttgacccctttggtaacttcctgcgggacaaacattgtgggctcggtatttgagcacttccttataattggctcttttggagccaggtttttttggtgtgttttactagactcattatgaagcaagcaagcaagcataatttttaggcataaaggtactacttagagaaaatttgcaaatgttctgtt

SEQ ID NO: 72697 - DNA, 1020 bp, Homo sapiens
acatagtgaaaccctgtctctactaaaaatgcaaaaaaaaaaaaaaaaaaaggtagccgggcatggtggcgggtgcttgtaatcccagctactcgagaggctgaggcaggagaatcggaggttgcagtgagccaagatcatgccattgcactccagcccgggcgacagtgcgagactccatctcagaaaacaaaaaaaaacaaaagatgatcggtggttgttttgccttaaagtaaggagttgttctggagagagcaaagtgtggcattgaggcctactcctcagtcaggtcttttgtgtacttgggaaaggaactggaaacaccagaactaaaactatgaagtctgtctcaggctccaggatcatttggcaaatttttaaatgctgctgaggagaccatagtccgtggagcatgagtatcaaaagttagagccgtgagttgttaaagcaaaggtttttgggcaatatacaaataagtttctaaaggcttagagcgtctcagattgtgtgtaccatggattgagtggtactgaaaggggtacttactttatctgtatgtctgtttatccatctacctacccatctgcacactaagggggtacttttaaagacctacttcttgtaattaataagatgcccaaaagttaatcataaattatatttttataagttaagcctgacagttaactgttccatagtacacttgcaatttaaaggaatcgcgtaaactgctaattttttttttttgtttgaatgtttgctgtgttcctctttgatgtgttctgtagtaggctgtgtgaccagggatttttctgacccttcctatgacttaggctatggaacatgctagtgagggtggggttttaaatctcacccccaagactgttttgagttgcaattttctggtttgcatatcctgagtgacggtttttaaacaagatgcaaatcaaagtatgaaatgatcttttccctcttgaatatatatagttattttctatttttctctttttttttcactat

SEQ ID NO: 72698 - DNA, 1024 bp, Homo sapiens
ttaaatgtgttgcaattaattactcgccagttttcttgcactccggggcttaggctggcctataaatcttagtcccaggttagttgtaaaatcttgatttatctctctgtctagatgtgctaacacatttgttggcttgaattatttaaagttatcatgaaaaaggtctgatttctattgcctgccctgatttgcactttaaatatagttccctgttgcagtttaccagaattcatgttgaaaatggaaaaggggaaattacttttaaacagcagtttggcatgtaaaagcatgatttaccctggaatatttctccaactgcacattaaagcactaaggccaaattttcaacaatattttccctactgaatctggaaattaatatgaagcaaacagcaaacattgagcctcaggtagccactcctgtgtacccctttggttggggccaggttggagggatctttccctcactccttcttttctttgtcagtcaccagcccagactcaaattgcagtatgcactcgttagcattgttgaaggtgacaggcaatttcttacctcccttgctaatttttctcactttgctcatctctttgcaccatctctctttcatttccatgaaaccaggatttttatggataagaattctgtaaatggttagttattttaatattggatttattagtggtatagcatattcagtgccttcacaatatatttggttcctttttatttttatttttatttttttaagaggcagggtctctgtcacccaggctggagtgaagtggcatgatcatagtttactgcagcctggaacttttggatacaaggagtcctcccacctcagcctcccaagtagctgggactacaggtgtgcactagcaagcctggctaagcattaattttttctttttctttttttggagagatggggtcccaccatcttgcccttttgacctcaagcgatcctcctgcctcagcctcccgaagtgctagaattacaggcacgtgccaccacgt

SEQ ID NO: 72699 - DNA, 1064 bp, Homo sapiens
gccacgtttggttccttgatgatttcttttgatttatttagattacacaaatttaaagataaaaccaactggcagccgggcatggtggttcatgcctgtaatctcagcactttgggaggccgaggtgggtggatcacctgaggtcaggagtttgagactagcctggccaacatggcaaaaccccatctctactaaaaatacaaaaattagctgggcatggtggcacgtgcctgtaaccccagctactcggaggctaaggtaggagagaatcgcttgaacctgggaggtggaggttgcgttgagttgagatagtgccactgcactccactctgggcaacagagtgagacctgtctcaaaacaaaacaaaaaacaactggaattttttctaaggattatcttgttttatgatttgctcctacaactgaaagtaactctgatgcattttttatgtcattgttttaaatattataatttgtatctatcatgggaaaaaggtattttaaatttcacagcagagtgataagaaatgacagacttttttggtttgggtttttttttttttaaagggatattttaactctaggtctatatttttggacagagctagaatctagtttaacttagctcagttaagctttgtctggctaaaggaatggtgtgttgattacgacaagcagaatttatggaatttatttgacatattggcaatatctttcctgtatgtaattcctactttaaacagttacatcatcaaatattagctacttactcacaaaaggtgatacattagtaattttcagaaccagtaccaaataaagataccttccctgcactatattctacattctaagggctagggacttttgtgttcacatgcactttgttgtcatatagctgtctggcctcgcaaaaaagtgaggtaaaagcaaacactgttattagatgatgctactggacctgttacattaagaaagttatcttatttgattaaagaggaaattgtaaccccagagatatttgactgtcctgtttgaaatttggaattaattcgggaggggtagat

SEQ ID NO: 72700 - DNA, 1413 bp, Homo sapiens
tgcaagttctcagaatattctattttctggaattctgtggtgctaagatatgttaacatgttgcaacctctctgtatgatattccttaagtaattctgtttttgatatcttcttcagggttttaaatgtgcatattagcttagaggtaaataaaataaagccaaaaaattaagtacccagaagcagaatttaaatgactttgcagtttaatctctcctttcttcttagaacttgaagaaatgattgggctttgtgtgtgtgtgtgtgtgcacgcgtgcgcgtgtgtgtgtatgtgtgtgtaaagtgagaaaatgcattagatcctggtgaaaataaaggtgaggggcactaaacgtctttgttctactgggtaggcgctgcctggtatagagagcaggtggtccttttgtgatgtgactctagggtcccccatagtgaagactttcactcattcatttattaagtaaatatttattgagtttcttctatgtgctagctgtgcttttggtgtggagacaaatggtagataaaactgtattcctggtggggtggtggctcaggcctgtaatcctagcactttggggtgctgagttgggcggcttgcctgagcccaggaatttgaggccagcctgagtaacatgttgaaaccttgtctccacaaaaaacacaaaaattagctgggcatggtggcacatgcctgtagtcccagctactcgggaggctgaggtgggaggatcatgagcccaggaatgaaggttgcagtgagctgagattgtgccattgcagtctagcctgggcaacagagtgagaccccatctcaaaaaacaaaaacaaaacaacacccccccaccccaccccccccccccgccaaaactcactataactgtattcctgcccttgtggagcttataatcagctgacatgtaagataagtgataaacaaatatatatgtcagttggtgataagtgctctggagaagagtaaagcagagtgaggtggataaggagggtgtggaattggggatttattattttacatgaggtggtcttggggaggccttgtataatgtctactgttatctaaattgttcacatagaggttcacatggcttacatttcagtttcaccctgccttttgaaatgtcattctggaaatggaaacgatgaaaccatgttagtcatttgcttcttagtgtgaagatgttttagatttctttcttttgagcaaatgttaatgcaggatttgaggcaatggatgtctgggggtggggatggggagggattagaagggatccaaatggatgaagtcgtctcctgcttctgattaaggtctcctctgccacccagggagcccctctgctgacactccttgtacattattgttccatggtgtcacttctcccacccttttag

SEQ ID NO: 72701 - DNA, 1006 bp, Homo sapiens
cattgccttagtagggttctgttagggtttagtagggttctgtgcttgctggtagcagtatctgcatcacacttctaaccttgcagcccttaggaaaaagcttgctccaaatttagctctgttgcctgccaggctctggcagtgattttgagggtgagaatctgtacttcttcctcctggattctcaggaattcccctttgcttaagaaggcaccagacttaaggtttctaagaaatagtattttgtacacatctattttatagtttatgtctatagacacaaatggcatacacagatttgaatttgtctgatgtactgtttcttttgcttggtagcctaagcgtgttggcttcgtgttgatgaataattttaggtctgagatgaagaaagccagtaatacaagtttgcagcaatgcagctgcttaaaaatgagcaaaatatgtcttgttaaagtatctttttttattataagcaaaactgttggatgtgagaattaacctgaattgctaattctaaggtagaaatatttcttttttttttttttccagcttttggtttggcttctgaagatacaaagaaagaggtcaagcagtctcaggtactaatcccaatgatcaaatcttttcctcccttctaagattcatttgtattttctctgataggaatagtaatcatttcattcttcaattgttatttttattgttacataattcatataatgtggtcaacatggattttgaatccctaatgcaacctataagatagacttgctttttacaaatcctttaatatttaaggctgatccacttggttttaaagttattttgagaaaaaacgtgttttgacatagagttggacattttaatagtcttgcttggataccatagttttccccagtcttaccaaatacctttttttatttcttttttgcgacggagtttcactctgtcgcccaggctggagtgcagtggcacgatctcagatcactgcaacctctgcctcctg

SEQ ID NO: 72702 - DNA, 1050 bp, Homo sapiens
tgtatcttgttagtggatatttttgttgcttcccatttttttcttttacacagtgccactgtaaacacttttgtcatatatccttgtgcacacatctgagtttctcaaggatgattaataagagtggaatttctgggtcattgggaatgtgcatcttctttattaaattaaaaaaaaaattattctctgaggcttatttactccattcttaacaaaaagaaatccttataactcctctttagatgtgtcagtttatattaatgtttcagatgtagtagatccaagataagaattcagttgaaactgaagacacccatttaagtcttacccatgtgtccaacatataaagccgagaagctggtttaaaatagagacaggtatatggaatgttcctatttatataaactcctaaagaaaaggaattaggtcatattcagtaggctgttcagcatttccttttacatattttatttagttttaaccaaagagcattttagattatttttaggatctagatggctcactgtggagctatctgttgtgtgaatatttgagcaagtgaataaatgaatggacctatagaatagagcataagaacaataaaatataatggaataaaattaaaatcaaattaggttctctgagctgaggtgttaaagagaaagattcatggtgggggaaaggtccccacatggctttgctgacaatctggctgaaggctagaatttacgtggcaccttcctctgccgacattcctgtctggtggcagggtgctgacacaatcactgttttatccatttctttgttataggcccagaacctggggaggcctaacgtgtttctctgggaggcagccttgctactgccattggcaagccctctgatggtctttgtgggcaggacatactcgggtttccttcctgttcgccgttgtaaaaagctggctgccttcaggtgcatctctagcaggctggtgaatactgccagcatggggtgttatagatgggctttatgcaggacttcacgctaaagccctgttgctgaggaatt

SEQ ID NO: 72703 - DNA, 1020 bp, Homo sapiens
tttttatttagacgagaataactcctctgactcattttgcttatttaatattgagtatttgttgttgaaaatgtttcggtcagctgggcgtggtggctcacgcctgtaatcccagcactgtgggaggccaaggtgggcggatcccttgacgtcaggcattggagaccagcctggccaacatggcaaaaccccatctctactaaaaatacgaaaattagcagggcctggtgatgcatgcccgtaatcccagctactcaggaggctgaggcagaagaatcgcttgaacccaggaggcagaggttgcagtgagccaagatcacactactgcactccagcctgggtgacagagtgggactcctctgtctcaaaaaaaaaaaaggaaaaaaacgttttggttaattcctaatgcacaaattatcatattctgaatttttttttgtgtgtgtgtatatatatatataaaaatatatataaatttaagagaactatataattgtgtggggcaactgtagatttgtcacgaagtatgataaaagcaagtagaagaaataactttctaaaggcaaggcttaaaatagagataattaatgttcaaaattttggtaacaagttctaaggcaattttcatgttggaataacattttcattaatcttagcgcagtgcttcctctatgagtctcttaatctacttttttaattggatgtcattaatttaacttttgagttgatttataatgtaatattccagaaggattatggagagaaaaatctacgcatataggtacattttaataacatttaaaataggcatgaacagaatataaagctgctctgaataatactggaggtttggagtgagggaggatctaccttgtgctgccctataggtgctttccttctttagctaagtaagtccatcaagacctctgcaccatgttgtgatgtccttcaagaccgaagtgcttgcctgtagataaatgctatccctttgttctcccaggaaagaactctttgacaaga

SEQ ID NO: 72704 - DNA, 1024 bp, Homo sapiens
agtcaggatgcttaaaagggtttcattattgggggcagaggtcggcgggtcagaggttggattacattttctgctttagaccaaatggagctaacctagctgcttagagacctctatactctctccacctgaactatgtagcttttgaagagaactgacacttctaattttgtagccttttgtggtgagactataaaccctttatttaaaacctggcataatctcaactttacaaattattttttttctgctgtttgcagaaagttttggaaatcactatttttcttgaaaagagttaggcccttgcctctttagttttttttttctttttttttttttatattaaaaacacctgattttcatttgttaagccaggagagctagcaaagcctttcatagattagtgtaaagaagcttgagaaagatggcctggcgttttctaatttcagaatttttttttattcacagggagactgtgagttacttcattaaaaggttaactttgagagtcatgagtgtgatttattgcctcagctttttgatgctgtatatcattaaacttttcttttgaagtgaaaggagttggatgcttaatagtttactaaaagttaattttatttttagaaattgataggcattaattgtatttttatttattaaattcgagactttattgcattgctgttgaatgcaaatttatcgacccattcattcaacaaatattgattgaatacttactttgggcagcggcctggataggatgctccaggagaaaatagaattttttttttatacacattctctcacttaaataatactgtcctttttcacatatacaactggcattcttagaaacatcttttatacatgtgtctttatatagaacttcatgcatcacaggaaatagaacattgagattcaaggccaagttgctcaacagtaatgaaatcttcacaccatttggaaggctgtgtcatgaccctttgtctctctttggttgcccagcatttgaacccctttgctt

SEQ ID NO: 72705 - DNA, 1868 bp, Homo sapiens
aatagctgttgatattacattatatatatatcctataactaggaagtataatacttgtttggaagtaaatttttgaggtgcattcattttccttcaatgtttaaaaaacttagctatgttttaattgaaggatttttaaagcatatatctcattgttctatcatcttgacacaaatattttcacttcctggttcttctagtctctgttcatctaggattttgttttattcttggaatcatgtctggtttttttctattaaacataaagacatttccgttgttataaagttttcatcataattttaattgatacataataactcattagctacttttatgtaaaactttaaaaagtatttgctatatttcttttcttgtctagctcacatttgcatttacccataattattccaaagttttatgcaaatagtaacatcattagtttctttacacatgattttctgctcttatgtaatccttcatgaatatatatatttgctggaattttaaaaagacaatgaaaattactgcataattcagaagtaacagtaggaaggccctgaattatttatattgggtaactgctaattcagccttaaggtttgctctttctaacataccacattgtttgtctgatttaacctgtgattactgttttttgcatttcatatttctacatggaagttgaaatgaatattatataaaataaatgagatttacttgaaatttaattccaaagatttacattaaagactattctcttcttaaataataaatatctatgaactttaagacagctgtgaaatccacatcagtgcagtaatgtttcagatacttaggtacttgttcttgaattcttttgtctgtaatggttactaggaatatagttttatggctagtataaaacacaggatataataaagtttgttgggggaggaggtttaagcatatgagatatgaaatttttgacttttggcttttgtaacaacttgaaatatagggaatagtgttttgcttcaaagctaacactcgtagccttaaaaatattaatctctctttatatatgtatacataatttatgtaagcacagttgtgccttatttctgaattttagttcctcctatgcttataaatttgtcaattccattattatgctattcctgttattgcctgagtaattaaggattacatttctcgaccaaaactttttgttatcagggtattttaatgtgtttagagaactttaaaaagtaaagtaatttttgcacatgaggtagatcaaatattgtatcctctagtttagccaaagggttttcattttcacatgttccatatgttgtatataaaataaaaaactgcttctgtgcctctgagttatccctgactacttcccccaggctcttcccttcaagtcaccttcacagatttcaggttggctcggagtcacggaagaccctccttgtaggtcttgagctctatttgggtgtgtgggtggtgcagagtgtagaggttgcatggattcagccaaaatacttcatttccagtagctcctggagaaaatgaggaaaaagaagtggtttgaagagtaccatgtcaggtctctagaaacagctgcattttaagccaagccttttctttttttcttttttcttttcttttcttttctttttttttttttttactttttttcggagtagtcaattcatacttatcttctttgatcattgttttctcaggagctccccagtgtcctcctccttcatcagctggctaaacaagaaggtgcatggaccatacttccgttgttaccgcagtacgtttgtttaactcacctgtgaattactgacattcctacctgaacactttta

SEQ ID NO: 72706 - DNA, 1032 bp, Homo sapiens
gtgactacaggcgtgcaccaccactcccagttatttttttatttttagtatagatgagattttaccatgttggccaggatggccttgatctgttgaccttgtgatccgtctgccttggcctcccaaagtgctgggataacaggcgtgagccaccacaccctgccctatatatgctttttcttaaagaataaaatgcttcaagttgatatttgaaaattatttatcccctgaactagtgttgttatggagagaattaactttacgaactccagctgttttttaaaccattagcatctggcttttctataagctgaagaaaaatatagagaaaaaaattagatatgccattctgtgtacccttcattcacttcctactgatcagttttaaaccttattattaacttattttacagaagtgattactgaaacttgtttcttttggtcagtttttctgtaacatatagcagaaattcatcttggattttcttctgtgaagaagagacaagaatacagattccaaaactcttggaaaccctcagaagatatgacccctctaaggtgaatataacttcaataccagttcttattttgggggacagtgtttcaaaggagatttaattttgattaagaagcttttgaatctaataaaaaaccacttagtttaaaattaaaaagaatgaaacattgttgaatatctgagatatgttaagtaatgctctttgaagtttgtagcttatagagggacagagcttataatgagccattttaaatgaaaaaaatctgttaatatatgtgttagcaatttcagagagttggaaactataacttgaagttcataaactgcttttcttagcaataaacttaagttggctatttctgcttattagacagtgaccatatattattttagatagaaaattttttttgagtgccagctgtatactgagcactgtggatggcggaggctagaacaaaacagacagcgattctgaacatgtgggtggcacagaatagcagggagaacagaccatt

SEQ ID NO: 72707 - DNA, 1074 bp, Homo sapiens
tcttaatttccatttctccactctagggtaagctatgttcctgcctggtgtgtggtagattctcaataaaaatcatttgaatgaatgagtaaataaataaataatcactgattctgaaaggaatttttcaaattattctttgaaaacctcagtagggtataagggcatactattttctttgccctaatagtctttttatatggaatattctataaaatacaacttttatacatttatggtataatgaggactaacattttgttcatcttgatgatcagatcttgaactacttttttgtatacaaagcttatattcattatcatactagtgttaattatatttttgttcacattctctagaaatatttaatctgtgctaataactctttatcacccaaaatatttaattatctgaaaccaatagtaccaccttctattggtcttacatgaaatgattgtttttaaagtgacatgttatatctttatttaacaggaatggtttttgggaaaagcattacatgatgaagaagctacaataattcaccattatgccttttccgagaatcctacagtttttaagtatccagactttgctgcaggctgggccttaagtattccacttgtaaacaagtaagaatttattggaattttttcggggggcgggaggggtgtgcatcaactttaatttcattgagtactgtaactgatggatctcaggatctcaaatgagtttttcagccagaggcagtgtgtggtaagatctggaaaaggagccagatgcttgagggtttctgcttcagcgctgtcatttactagacccttcagacaaatcattcaacctctctgtatttcttctcactcatccaaagataacaagttgtgagactaagggagaacacagaattgctctgagaaccatgcacatgggagcatcattactgttgttaagggatctacttagctataggtgtaactttgatcaccagtaagaaaatgaagcagtaacttgctggggttgagagttgatgactcattaggtgcatgggtatgcatacttaaacactggccagtcagg

SEQ ID NO: 72708 - DNA, 1537 bp, Homo sapiens
aatcaggcagccgtattatggcaggggcttgtaaaaactgaggaacaagccccttgtgtctcagtttctcttctgtttccagtaatgtacagtgttcatgcattcttttctttttttgttgttgtttaaaaattttatttattttataagtcactcaaatttcttctcttaactatttcagtttagtattacacagtatacagagtgggatgtaagaaccataaactgttccataaccacgtttgaatcaaataatcatgatttgtgttccctttggcatctcagtatctccaggctccagcacttgcttagctgttatgactccggcgagcctgtgtttctgggagagcgctacggctacggcctgggcactggtggctacagctacatcacgggaggaggagggtaactatgatcacagctttcttcaactactttaaacataaacttccctttccacacgagaggtaggtctctggcactgggatctatactgtacgtgagtactctgtgaatggtggttgttactataataggaaagtgaacattatatttgctaaatattaaaagaacactcagtaaagaatattttagcccttgaagaaatgatataaaaaagtatgtcatacttgctagaatgtccctaacaatggttgcttctagacagccaactagttttgattgtctatttaaatggaaaaaaaaaattggttatagattttaatctcagagaataagccattagactattaaattatgtaatgcttaataaatcgcctttggagaaagtgtagtatagaagcttacttaggcaattaagtaatatttatgtaggatttataggttttaaataacagttaaaaatcagtgttttaaatgaagcatctgcctaatctcatacgaagaaagattttaacttgatttatatgggtaaatcaattaagcagttttccctattacttctgtagtcttactattggtgcgtgtaggcaaaatcttatcaacggtagtcatttaaattcactcagtagatatttgttgcatgtcttctgtgttccaggcagcattctagtttataatctaatggattatacacttctggagggctaggacctttaattcctactttgcaattccctagattggaacaattcctacaggaacctgcaggatctcaacagtcgtactacaggcatcctgattttgtttagccaatacagtggtgaagataacacggttatggtggtggctcttttgtagtgataaccaaacctgagcatgtgtgctgatctttgttagacgatggcttgcatctacctgaggtcattaacaacaggagggggagtccagggaggcctttgaaaagacactagagtaagcccaaggagtgttgacctccttatcaaaaaaggttcaagctatttgcggccttactgtaatgcatcgggctttctgggtgaagagttagggccaattaaggatcagaacatggcacccattgagccaggatgttccactttgaaagtggccctgttat

SEQ ID NO: 72709 - DNA, 1725 bp, Homo sapiens
cttgttttctttcttcgaatgacatcacctaattacacattagagcagtagagaggccaagggaaatctgagaaatccttgtcccagccccccacaacaaacttacggccagtttccttagaagtacctggaacataacagtttttctgtctttgtgcagaagtgataatagtaacttaaatggcttatcaaagaaagctttttgtatttattactattgtttaggaatctcccagaggcaagactatggaacatagaagcaaaaagcagtgcatttggggtattaaggtaattggagacacaaaagcaaagcacctggagttagaagaaagatatcagaaaatagtttcctttttgcttttagattcctatagccaatgttaggtagtgaagtaaagcagtccactttataaattcaaatgctcttctgcagcaaaattatattcaatcaacaaggaagcctaactctctatttttcctgcaggctcggccggtggattaccctaaggactacctttctcatcaagttcccatatcgttccacaaacactggaacatcgatccagtgaaggtgtatttcacatggttggcacccagtgacgaagacaaagccaggcaggagacacagaaaggttttcgagaggagttataaatcagggtgacctgtgcgcctagcctgcgcagggaatgaactggagactgtggcctcatcccactgtgctgtgctcacaacacttgtgtctgccacatggcattgggtgcttcctgactttagggggagattttatgtatggtattttttgacagaggaagaaaaggggtcacaggagaaacatttttttttctgggaaaaatcacttgcttttgacttatgcagttgttttaacacttagtgatgactgtgtattctccaagctgtgatacagcagtttttttttattgtcacagggaaataaatggtaccagaagtccctttcctgttctgtctcttcattgtaatggaagtttcagttgggcatgagcctggagagatgtgactgtctacagttctatttgtatatataaaaagaagactgaaagtcttttgacatggatattgtgaatggtatgaacttttaaaccatattattgatgatgaaaattatttcctgggaactcagtaggaataataccgtattaaggaataatactgtacataaaacatcatgaaaccctagatatgaaatcccctgaagtctgtaatcatggtggttatgttttgtctattcttttgctgtttgtgcctcataaaaagagaatgaggtcttctgctagagcttcgtattgctttggaagttcatctgtgttttatttctccctgaagccctatctttatggcttacttgtaacatgaaagtagtagatgctgccagaaaatagtgtcctcaatattttaaaacaatgttgacatgttttgttcaagtcagcaagctctatgtgagtctcaggaagtgaattaaatttggaccttatgttttactcttgttttttttttttttttaaatgttacttaatgactctctcctgactcaggagagaaaccccttgtggaaggacagcatggtgatcaggcaatttctctgggttcccaaagaatgacatttgaacacagtattttgaaacagctctagttttcaaattatatctttaatatatagtaatgtaacatattcagtattaatgtat

SEQ ID NO: 72710 - DNA, 1127 bp, Homo sapiens
tctttgcctaagtttttgatttctcaaatattgtgttcattagtctagactgggaatggggaggggaaatggggaaaatgaatgaatgaaatcagaaaaaagtcagcggctcagtaaatacagtttaaagagagaataattacttcagagctacccttttaagagaaaaccatcagaaattgataatgtttatataaagtttataaagccattgtgttttgttatataacaaatcagagatgttattttagaatcgattcccatctaaagaactcaattttgagtctgacatttccaggaccagatattgtcttactcacatttcctttgctttgaaatagggctttccttccaaatggctatttttaggctagggatgttaacatcagggatttgtgtgtggaataactggaatgtcatttttgcttttaagccatttctgatgatatagccaaagcaggttgtctgactatgtaggatttttacatcttgaaactaaatcagaaatccagacatgaaaataacctttctagaatgcctaggagcagaaaacaataatagcatgctaaatcacaaatgatgctatgtatgggtatgtaaatatcagtgctgtctgcatttctgggtttattgaagacctcttgttgtatatatcctcaaaaattaatgtaattgacatcttcaagaatgtttctattgtcttccattcataatcagagatgtaatttgtatggactaaataaaaactttattatgtaatgaaaagttgaacactttcttacaaagaaaactctaggcccagatggtttcatcggtgatattctccaggcatccaaagatgaaatactatgtttatgggacataaactctttcagagcataatgaaaaaggaaacatttcccagctgaatttatgagacccaagtttctctgacaccaaaacttgacaaaagaaaatcacagactaacaactttcatgagcataaaagacagtgatcctaaacaaaatgatcagcaatatgtaaaaagaggatacataaaaaggatagtaactcatgaccaaatgggtttattccagggatgcaaggctactgtaacattcaaaaatcaagtaattcaccacattaa

SEQ ID NO: 72711 - DNA, 1051 bp, Homo sapiens
cctcctctgtgaaggccggtggagtagccactttgaaaacagaacttccaaccaggttaccatgtctaacctatgaccagagagtcacactgatgaagcctcataccatttgccttttggattttatttaatatcagaagagatgaattcttaagatatttttctgaaggttgcccagggcacaaacaaattggacactttcactgctaaaaagtacactttaatattcttaaagtataatttctttagagcagtatccctattgctggcaagttctgctttcataaaatatgcagataagaagtgttaaatgggattcaagaattatggttttatttgggactgtttgcatactcacaatggttttgttctcattgtttttaacaaaaaagcaatgaagtttggggtggttttttgaaaacgaaactgaaaaaaattatatgtgaaaatgagaactgggtaaataaaattatattttgcacttgtccatatattaatttaagcttaacaaagaccatggatggggtttgttgactgttaagcatgtttctcctgataaagaatacagccaggaaacacagcatttcagttcacaagacacatcctatatttttctctcttccccttttgccacagcatgaggcagttacttaatttcttcactgttcacttcattctgagttcctttaatgagataaaatgtaagcagctgactaagaccaccacaatacctcctattacatattaaatggacaccctttatccagtagcatccagaagagaaagaaattcagagtttatgggtctcagccattctggtaatttacttgttattactcactattgactaaaatcataacgtgagttcattcattttgatcaagtaagatatttctcatgtataataaaagattttcattaggattctagaaataatgttcccactcattgactatgctaccctttcctttatggctttaaatttttctccatcttgtttcttcagtatgatgaattgcttcctaacttgttttccaggtttgctgacatt

SEQ ID NO: 72712 - DNA, 1048 bp, Homo sapiens
attagttccagggaatccctgaattctccatgcagggccctaggaacagaaagcaggccttctgcatagtgggaaataccacgtataaggtgcagtctattttcaacactattgaaatacgtgttcaccatataaaactacacctgttgtcttggtgatggatgtagccacacgcctattcctaatttgatactcacttctatgttaaagtagttgttgcttggctgaatggtatcaaaaactgatgtcacaattgtgacagttttgaagctgtgcctaaaaaattattataatctacatccattgttttataatttctcttccctagagttgtgtgtgtgtgtacgtgtgtgtgttctcttccttggtatgatttttaactgtctctgcttctaaaataatttgcagtagtaagctttaaaaaaagttcatttttgagctgtgaccatatgctgcctggaaacgtatccttatagttggcattttactcatgttactctcgtgctaagaatctcaaagtcccatatgcatgctttgagatttcaaatggaccctcctgtctaagtatttcactccattcttggtagcagtagtaaggtttgagtttcgaatacagatccagcacctcacttctaatatctctaaactgccaaaaatcaaagtagcaccaactaaagttgggaaagaacatgaggctttcttatcacactcttacgtcagaatagaaggtgttcccaaaacattgttagaaataagagtgaatagacttttttaagtggctagtgatctgcaaaactatgccaaattattgaaattgtagtttttctaaagttgtgcatttgcaatatcttattaacttaaaactgtccagaatcaacaaacttccactctgtatgctgttctctttctaaaacttcttattaactagcaatccatctttatttctatatttcatcaaattaaaaatgccatcagttgtaagacatagcattattttttctgctgtacacaaagagaaaatattgccaattttattatgacactccac

SEQ ID NO: 72713 - DNA, 1073 bp, Homo sapiens
ttttgttctctactatataccaattgcttaggacagtctgttttacatagtaaacctgctcaataaaatagttagtagaattagtgagtaaatatcctccatggaagccgtggagacacattgagaagctcgctaccctcctgttggttagaatacatattcttaaaattatgacactgacaggaatgccaaacctgaaaaaggcgaagcagtccttgatttaatttacagggtcctattccaaatatgccattacaaagctagtttaggatagaagaaattccattatatcttttattcatcttgatcactgaaggattacgtaacaacttacatcttggttctgttgtatggtctaaaatcaatttcttgaactctatacttagtccaattttacatacttgtcctattgtacatttaacatctaccagaattaacagagaagtgtctgtaggcctttctgaagcagaaactcagtgcttgtgaccttgcttggaaatacatccccaagaatatatatatctacttaggtacattgccctagagtccattttttaacccccaaaatggccgtctttacattttgacatgttatgaaggaaaagagaaagaaaccttgctgggcaacacagatctccatctgccagtgcctctgcttcctcactgctgccgcctgctcaggcagagcgcacttttagaccaaggacaggatgctagatgaagatgccagcagaaggaatggcacagaaactagcttagcaccctctctgaagcagtcccaggatctaaagccaattagcatagcccaaataaccccacactcagtgtaagagctagacctgcaaagacgcacccagcttccaatccagtgaaatgtgggacctctgaacacgtatcttacgaactgaggtcgctagtgggttccagcctgctagcttaggggaagatgatgtgggcagagtgtcattactgcctgtccccaagtacggtgaagcagtgtggcatggtggtgggtgctgtgaagcgacatggtagatagctagagcttgctctttcatatagtagaaaataat

SEQ ID NO: 72714 - DNA, 1041 bp, Homo sapiens
agccaggattgagtgccgaagactgttgattagcaggcagaaagagcaggagcccagaatctgtgccctcctcctgtcttccacccaacaaagtgtcccaggcccactgacccagcaagggagcgacgccagctggaccctggactagaaaacaagaaacacaattcaaagccaacaagagcctggggaaaatgaccacagtaccattgattttatctgggtcctggtttagattcaggacatcagtgatttctcccttgaaatctttgtaaaaaatatgcctattttttttacatgtgtgtgtgcttttttcttttcgtttctctactttcccttcctccctcccatcctccttttctttcttctgaagacagtccgtatctttcatcagattctcaaaggaatccatgagtaacaagtgtttaagaaccacaattctagattttctcctctttagcctctttgctgactatgactcaagttgctcctggaaagatggaaatttcaggcgatgtccccaactccaaagtttagataccatgggaaataaaacattttaaacccaaactttttcatgtccgtagcacccagtgaatcttagaaaccataaaattagagggaggctgctatggtgaggccaaacagcacggacagtgattctgcccactcccagcatggtctgaaggctgtaggatgacaccaaattgcctaacaaatggttgaactgggctgccatctaacttttgtgaacagatctttattattttgtctccagtgggcatatatgcccacaactttggctataattctgaacagccataggtccaaatacaccttctttgttctgaaattctaaaatacacccaacaaacacagtcattcaaaaaatatatgttctttcagatcgtaagtgcagtgagaattgatgacatttattttgtttttcactcagaatataagttcctcaagagcattgatattggtctgtggaaagaatggatgcttgaaggacatagagtatctcctttgtaaaaatgactg

SEQ ID NO: 72715 - DNA, 1041 bp, Homo sapiens
tttaggaaatgatcgactcgactttacccaggaaatgatctcttctcactaatgtttctttccagactcaacagccttgcctatgattctataattagaaatataatattcaaatccaggtactagaaaaaatgtggggcttattttctctacctctatatttgctatatttgtttggcttattgtcttctttcttgctcaatgaagaaaatgtatttaagcgtgagtatcagaaaaataaaattaaatgatttatagagttttctcatttggggaatattctacttttatactagttaattgtgttttgggacataagacacaggaaaggttttcctgtagtgcttatgtagtaactttttagcccacagaaatgtgttatattttctaccaatatgaccagtaaatacttctacccagaatatctgaagggaagatactcagtgtgatttcctgtgcatgatagtgtgtctcaaaatgagaattacaaaacctgatagtgctgtaaagctgtaaaggttttatgtttaggccaacatgctgtcctaaggcatttacaaattaactgctgcaaaaaatactgtttactaaaaatattttactaaaaatattttttaaatcccatagcctgatagtctcttactaataatctttattaatattctcttgaacttgatattacagtattgcaaacagtgctttgtaagactttctaatggatcaaagacaacttttattagttgtttgatgtgtaattctagaagactgtaagtttccttagacctcaaggccctattcttcgaacatgcttccatccaagagtccaattacttctctactagcatatactatgtaggcccagaaatcagctggtcagggtctaggagtcgggtatatactcttgcctaaggggaggcataataaagggtagtaggaaatgacacaagaaaaattcaagacagaataccagcccttgataggctgttgaagacggagggtgaacgtggaaaaaacaatgggcaaagaacactatataaaatt

SEQ ID NO: 72716 - DNA, 1080 bp, Homo sapiens
atcatttgcatgccatgcttccccctccaagaaaaatttcttgcttattgcagcttttcttaactctaaaatgaagaacatgaatgtacctgtagtagctaatttaattgaagcagacatccatatccatatgatttggggggaagatatgattatggaaggataaaatatacatcagtgcatgctcaagagtgctttacctctgcctcctagtttaggaatctagaaaatgttcatcttaacccctctctgagagatctctcaagtgaccagtgggctgcactgtcagagcctgccaggagaaaccagtgcggactaatcacagtatgttaaccttctggaccatttgctataaaatgctgctggtcactttagcatctgcaggaggcttccagacttcacctgctgttcatgaattctttgctgaagcacaccaggaaatgatgctaggaatctgtttcttgcttggcttcaccttttttccttgtccaaagtacttctcagtggggacaataacctaacatactgagttcagtgtaaacaggaaatctggcagcaaaaactggaccagggactaactttgcaaagccaagttttaatgagtaatttgcaaagtaattaatcaagaggtcattgtccctagaaaatggagtaagtgtaccccacactgatgtggtacctcttttggctgcctgaggccacagctgatcttccttataactagtggtgacccactagtaagagagtaacccagcatttccaggatcaaagacagaaaatgtggagtctacctcttcagtcttgaaaaactacagatcatgaaccattaataactcatcagtggttcagaaaatcaatttaatgagtccaggccaactttgttttttatttttttgagacccagtctcgctctgtcacccaggctggagtgcagtggcaccatttcggctcactgcaacctctgtctctcaggttcacatgattctcatggctcagcctcccaagtagctgggattacatgcatccaccaccatgcctggctaatttttgtatttttaatagagatgagttttcaccatc

SEQ ID NO: 72717 - DNA, 1232 bp, Homo sapiens
taaaacccaaagaagcagtttggcaaggatatggagaatttggaacccttgtgtactgctggtgggaatgtaaaatggtacaagctactatggaaatacagttggcagttccttaaaaaattaaagctagaactaccatatgatccagcaattctacttcggggtatgtacccaaaagaagtgaaagcaagagatagttgtacacccatatttatagcagcattagtcatagtaaccaaaaggtggaagcaacccaagtctccactaacagatgaatggataaacaagtgtggactgtacataaaatggaatattatttagccttaaaggaaggaaattctgacgtatgctacaacatggatgaatcttaaaaacattatactaagtgaaaaaaatccactggcaaaagggaaactgctgtataattcttcttttattagatacctccactagtcaaagtcataaagacagaaagtagaatggtggttatcaggggctgggaggagaaggaacagggaattattttttaatgagtacagagtttcagttttgcaagatgaaaagaattctgtggatgagtagtggtgatggtttcataacaatgtgaaagtgtttaatgccactgacttgtatgcttaaaaatcgttaaagtggcaattttatgttatgtgtattttaccacaattaaaaataaatgatgttttttaaaaacccaaaaaggttaaatgatatatccaaggtcacagtattgtagtctggagcttttaaaactatcccaggctattcatagtatgttttgaggtagcataataataaaggaaggacttaacgcttggaacccgtagacccttatcttgacaagtcacgtgatatcttagcccctcagttcccctacacatccagtcctgtcttctggaaccaactgaccagtaaggttaacatgataaaattaaatatgtatgggaaaaatatatatcctagattaatctgggccaaactcattatatgctggggaattaatgtgttattgagattttttttaaaaacattccagtaatgtagcaaatgtgtaagagccttgttgaaccccagcaatatgattccccagttcagttaaaatgatcaactgaatataaaagtttgcctcagccactgagcaaatttgtttcacttttctgttatctatatgatgatgattattttatttcatcgtcttccatgtgtgctgaaat

SEQ ID NO: 72718 - DNA, 1078 bp, Homo sapiens
ttctgagcagactgggacactaaagaacactaggacagtaagggatggggacttgaaggaagagacagtcagtgtaaggtggaccatgatatgtgatttgcctattattaggggaaacatgattcggtctgtctcagctaggtctttacttttctttaggaaatctgagttaaattctacaggtagttttatgcattcccaaattcctattgaggtacaggtgctcagacagggcagatctgatcagaaacatcctggcttttccttgtctgaaggaccattacatatggtgctgtggaaaatacaccaaagaataagaaattgactctatctctatcccccgccccacactcgaacaggaaaagtgaatactttatataaatgacaacaataagatgttaaaaccagtaagccccataaaagaaacatagataaagcactgtgagaatttggaacaagagcaaatgatttctggctggagatggaggcagggagaattttgagggcagaggttttgtaaccaagaaaatgtagtgcgaaagctaaaagcctgggctttggagcaagaagcttggacctgagtctgggctcctccatctattggctctgtgacctcaggcaattcactaaacttctctgaaccttagtttctgcaattggtaagtgcagcctggaacaatgaatcactcaagggttacaagtatccacctcctgaaaggacacagacccatgcacctgataggcatgctcaattagcgttagctgcgattactgttattacagaggaggcatttgtcaagcctagccccagaggccatggatgattttggtttgtgagatgagggcagggctgtgacagacaaagctactacaaagccatgggatgagagggtatgtgatgtcgctgttctctcatctgtcctctccaccctcttgccctgttaaagcaaatgcaatgatctggttggaatgagaagtgctgtgtgtccttacatgacctcatggcagcttgctcctcccgcatgtgtgagcatgtgtgagcaagggagagggggtgaggggtgaagagaaaaggctt

SEQ ID NO: 72719 - DNA, 1100 bp, Homo sapiens
aatacaaactctgttaacatttgggtatatttctttcagagattggtactcatattagagtggagttatttgggtttttgtttttcctttatgcctacttataatttacatgctcttatcctttgttttataatatttacaagttgcagttattattttaatatttcaggttaagttgacttttcaatatggagtcagttttaagtgtgtgcgttttaaaggggcatatttgcatttctgacccacaaagactaacatcacttgtgacaattaattttcactcatctaaattttgcaatgtttttaaaccaaaacaggtttaataatgataggtatccactaaacatccagcttttatcacatcacctgtagcttcccatggaaattttctacgaagcaaacattggctagtattacagatatttccttttcaagccctcatgtttaatcaactccgcttacctgtgtggctttaataagcgtaatgccaactccagctccccagagtgaggtaaacagtatgtatgggcataattagcaaatcatttggttgtaagatgttgtatgattcacatatttggttttctttaatgaggcattcctctccagacacattagtcgtttcccaaaatgctcctttgcaaatagctatagaaacagcaaatgatgaactaaaaaaggtgtgctgcacgtgggacaccagagggcgctagagtaatgttataatgtgcctctgcttttctcttagctttgctattaaaaaattaaagcttttaaaataatacactaccttgtcttgaagacatttatttgaagttatacgatatagctttatgatttgagtcaaacatttattattatttatcattacagtcagcatcttctcaaaagcaggtcttttattcccatgctgaattttagaaaagaaattctaacaatagtcctcctcttagactttttttttttaaggaaaacacattattattcttagattgtgactttgtcctctcccaagagacagtcacgtgtgttaaaatgtttagtagttctagtctgctagaaatgaataatagaggaagtgaattatttctaaactttta

SEQ ID NO: 72720 - DNA, 1081 bp, Homo sapiens
tttccttagagacttctatttaatctcatacatgctcttatgttggccccatggtaacagtgtgattgagaaagacacactcaccaaatagtttgagcttctgctttcctgattgatgaatttctcccagttagcacccaatcttttgtgcctaggattctatcttgctttatatttgaaaattaaacactgttcttgaagtttgggttgtaggaatgtatgttttttcctcctattatatcattatctcaaactttaaaaaatgcttttactttatatttccttactagaaaaaatgtattatcattagggtgagggagattcaggcagtctcatgggcttttagaaatggtttcatacaagtcactcattgttttgaagttcatggtacatttcagcttgacaaagttattctaggtcctgggagggaagtggtgcagatgattctcagaactggtgaaataacttaataatctaatacataaatatgattgctggattataattatagttatgattgctagattataatggtaactctcaattgggcatacttgtaaggaaaaatgcttttctctccagaaaatctgttgtggtttggagacctgttgctgaaagggcataaagagaacaaaacttgtattagtgtggaagtatattctcaagttggtaaacagaaccagctcctaaatatcaacaaatattaaaacgtatttagcatctaggaaaccaaaataaacagtgatttctgaaatgacccctaaatcccttataatgttatgtatctattgattccaggcactgggaagggaaaaggcaaatctcatctcacattgcaaccagacagaacacaaaaggggtgttgtgtgtatgtgacagagagagattgctgatggacatgggcatagcatggccatagaagctatctgccagctggagcacagcatggctggggaagatgaattatagagtgatgatttctgcacagtcagttaaggaagaaagtgcagaacatttccacatacatagagcaagagggaagggagcaaaggacataaaaatgcaaaatccaggagagaga

SEQ ID NO: 72721 - DNA, 1049 bp, Homo sapiens
agtgtgccacattgctgcatgttactcattgctgaatggagtggcacataacatctatttaaatgctgcataatagaactatggtatcgtttaggactttatataaaagttataacatttgaaatgccatgaatttcatcccagtggcaacatttctgtagtcagcttttaaggaatatgattagatgagatgtatactccacttttaaaatattttaattatcagaattatagaattacatgttttttttttaagtcacatagattcttcaagcttggatcttaccaagcctggacatcaatgagctatttcagtttgttgttgttgttgttttaatcaatgatagggcatcttggaaagcctatggcatttcctcaaaagtttccttcttattttccctcctaattattaatcttacataagatgtgccaagattgattcttggggatttactattttttgtttatagatcaagcttcaaaaagtgcatggtggttatgctgttgaagaacttagacaagaaaataactcacttggcagtgagcacagtggagaatcaaagaatcaatgaattgtggatctgaaagaaatagagaacatcaaattcagtgcactcattttacagatgaaaaactgtagacctacaaagacagttgacatggagggtcttctgattcccgtaatgttctatagcatcatccttcatgagatcatcacagaaacctagtttaagaacctctgggtcatttttgtatgcatgaaaagtgagaagaaaatgatacccacaccttcctgtgggtccagaggccagcaatccatgcatcaacctgtgtttattaaatacccacatgccctctgctgtgcaccagatattggtgggcagggctggtgtgtgaattaaaaaatacacgtcagtcagacttggtgagacacttactcacaggtgagccttagcctagtgcacagcatcaagacctcaactggttttattttgcagtccatccttaagagagaaaaagtctttctttgatgaaaatagccattaggt

SEQ ID NO: 72722 - DNA, 1041 bp, Homo sapiens
tttgggttttttttttaactcctgtgcttcagtaataatacacattagacaggttctatataaggagctgtttgcatttttgtttatctctctcaaaccaactgtcccaagcatcttaaaattattatctgattcccagaacattccccttaaattgggcagtgtgcaaggtcactttttgcactctggttggctccaggctattcaataaatttggagtaaagtgataaaaataatttcagtctcctagctctcaagccaatgttttgttatcaactctgagaccttttaagaattctgtgagaatcttctccaaatggctctaatttgacagatttacagccatgtaaatatatatgtgcattcatgatgacagtttaaatgttgtaagtagagtttatgaaaggaaaattgaaaaaggaatttcaaatagcccccttttccccattaaggcactgaccgttttataaaatcatgcttgcataggctaagattcacactgctatcaatactagggaatgtaagttttcgtgcaactgctgtttcatatggactgtatatctaacttaacaaatcataatgtaggttttaaagaatgaaacgagcaattttaaaacctattctagtaacattatttttagaataatcaggataatttaactcttaataaataatgcaagagttatgatctatgcatcaaattttaaaagatcgtaattatgtatgcagatattccattctgataggataaaaatctattggtttataaaatgtgaaagctcagaatttgggataattcaggcctccagccagggagtgatgtgagcagttagtacaagcataccctgggctctttcctctatgtcacaccccaccctcccacaccaccaagaaatggaattttccacagtggtgtatttgatttgttatatgttttgaattattttcaagaagaacagaagctataaaaatttcaagtagaatcatctagtttttttctcctcatccttttgctgtgatacatatcctgagtcttatttc

SEQ ID NO: 72723 - DNA, 1009 bp, Homo sapiens
tatttttaatatatctggcctattattccaccctaccccaaccatttatagaagagatcctggctgttatttgttatttttagtgccctcatccttcactttattcctaaatgtgataaatatgacacctctggctttatcccagtcatcaataaaaatacctaacgggacagaacagtaccattgttgtcctagagctaacagtaatatccattagctacacatagataaagatctagccagcatatataaagtgagactcttattggaaatattaacaagattaatgctgcccactgctaagttttctatttcaccagctgagtcttaaatgttcctctggctgtaccacattgatcacaaaaggcctttcaagttgtctgcctgatgatttttaaaaggtcaaattcatttaaagtatttcactcataatgtggggaaatagaagttgttctcaatctaaccagaaagaacgtcacttacaaaccagaatgcctacgttttgcagggccgaggatccaaggtgatgttcatcagctcctttcacatggatctaacctgcccatgtaggcccactccaatcacctggaaagtgtgagtccaaggccagaacctacccaggccagttctgtgatgccctctttctccttaccttgggcatccttggctttaatggccaattctgtacttgctgccctggctctactggtctcccacatagacagttcccacgtttgtgtttggccatcgaacgcagtgtttgggtaagaggcactccagatctctcagctgccagtccactgagctgattctctttttagttggagtagggagagtttaatcaaatttagagaactggggattggaatcatccagcaggcacatcacccttggtcatcacagggttacccatccagagcagtggagaaaatgaaatgttttcagaggcagtcaaacttgacctttaatttagcatggaccatagcttgtcaaggttcatcagcagagc

SEQ ID NO: 72724 - DNA, 1062 bp, Homo sapiens
ggcttctcagagtgatctcacccctgtggacggtctgcaaagatcattactcttgacctcacttctgcctcctaagctgagccgtgcagttggagtcgctcttcccactagcctgctaagctgctgccttccatcattcagacagtttctgacagccccaccctcctacacaaagccctgcctgtctggtcaaaggagggtggtgatttcccaccctttctaaaaacacgccttgtaagactttctctgtcctctaaaatatacttgctccttcagagtcacattttctactactgtacggttaaacatcgtctgtgggaggaaaggtgatgtatgggtttttctgctccactgttgtcgggcttagaccaccatcttctaaaaggcagaaacctggggtctgtaccagacagctccatgaacagatggtcattttgaagtctttgaaggtgaaatctgtgatgctcagtgaggtatacacttctttttaaagtggtagttccaaatgaagtgatgctgtaacatatccttaattccttagaccactgtccttaatctcagttgtaataacctggcgtgtgactattgtttattcctggtttacaagaattgtctagttatatagtttctattgcttttcctctaagctgaacaaagcactttgatactacttcattaatttcacagtagacagcttgatcgtttttatattgatttatcgctttctaatccccaattattttttggtcctatgtcagcttctcctgccagtagacagtgtgtgttttcatggatactcttgacatgagctttattagaacataaccaagaaggtgaatctgttgccaaaaaattaaataatgtttgccaaagagttacacagaataatttattacccagtgttctgcttttcctatgcaatggttcctcccagtggtatagaaaaccaaagattggcttgccctaagagatgaggcagtttggggatgggaaatagtgttcttcttttagtagataaataacatgtccaaggttataggatcgggatcaaaataaaaagca

SEQ ID NO: 72725 - DNA, 1272 bp, Homo sapiens
tggatgagcacccagcaagcagtaacagtgttttgtcttttgggatctttctatcttttattccaagcaggaactcagcatctaatcttagctctgaagtctctttcctctgtaaccctcacctgttgttttgtttgagtgagttcaacaagctaaattgtaccattgtgttcacagaactctgggcagatatgtccatgaaaagaaaagtgtagagtgaaatgatgttttatttgtataatgatcagccaacttgaggaaacatttcagagagaaattgtttgtttatttttaaatcattcagcactgtcaaggattgctatctgtaaaaatactaactttttcctacatttacctaaatgtcattaatgttacaaggatttaacttacttttataccttctaggcacttttgccaaattggaaggaaaccatgctcaatgaagtctgctgagctaatttaattctttactcacaaggtctttttccacgtggggaatgctgctgttttatatttatttggagacactgatggccttactagaaaaaaaaaatctgaatataaagattttatcttcttgattaaggtgcatgtactcaaatagctgccccaattggacatgcctgaataagcttcaggaagtgcctgagagtcaataaacagtcctccctttcccttcttaccaattattaaatgcttacatgtgtagggtactgtggtacatagagtacacagtgattcagcaggcccagctcctgccttctctgggcttcacaatcaaagacagcctactttgatgaaagggaaggtgtaaggaagttgcaagagaacagaaataggtgctctgcccatgccaggcattgtgctgggacctggggacactgacctaaataatcatttagagaaggaagtgattcatcattttaagagggagggaagaggctgagggatagttccatggagactgtgacatttgaacatgaagactgttacagagaagagggggaaaggcagagggaagaacctgagcaattgcagggagttggggaggtgcctgagggaatgacaactggatcccaagttccctgaaggagtgacagattgtgtatacaaaggcaagttgggtcagatgacagggagcatggaaggatctgccgaaaggtctggtcttattctgaaaacagtgggcaaccccataggtttttttgtttgtttgttttttgggacggagtcttgctctgtcggctggagtgcagtggcacgatctcagct

SEQ ID NO: 72726 - DNA, 1995 bp, Homo sapiens
tgattacatgtctcacatgcagaattacttgttatactatgagccaaaggatttttaatgttagagaatagaaaaaaatgatcattttgcagtgatctctttaaaaatacattttaaagaggtacagtacaagtaggaagagttcacattctttataagcccagataccccaagtgtttggttatttgatttgtgggggggggtcttttgtcattagtcatactgtggtttagaggccaattacatattttgtataatgaaggcctccttgcacaccacacaaaacagaagcagccctaccctcggttcagatgggcatggtcttcctccaggttctctgcaagccacaaaactgagcagtgcccctcctcttttagccaccacctgttcgcttggtgcatattgatgaaaatagccattttctgttgagtttatattttaacactttcattttgtgttcttgtttttactacaggaacgtttagattttgcaatgaaagaaatcattttcgattttctttgtgtgggaaaaccagcaaaagcattcagtctcaacccagaggtatgaatgatccttttatgtacttctaacagagcatgtcttccggagccatacctttgctttgcggctttggagaatgggatgagggatgtcttctcacaaagtcttctatttgtttctgtcaatgtccaaattcagatgatggtggaatttcagaagtaaaattttggatgaatagacttagaatgaaacggttagttgaaaggttgatgtgctaccatattctgttcttgtaaaacaaagtaattcttgcccaaaaagataattcatcactaaaagttaggttgttttattttagaaaagtcagtgcttttacttgtaactgttcaacaaatttagcatcgggaagtgatgaaatagagaagaacaaatatgtgtaataataaaaatagtaaaacaatgaaattaaataaataatgtatgcacatctgtttctgtgacagcatcccaactccagggcaggcagattgtggagatgagtatacagtgggcatcatacacaacatggagcagtggaggctgtgcacatgaacagcacatataattttaaacttttaaaaacactgtcagccaacagaagtatgcctggcacactgcctctttttctatgaggttgtagaaagaacactggaccagaagtcagcagagccaaatttgccacttgccacaggctctgctgcttttcctagctgtgtgacatttacctctatgaactgcagctttttcaccagtaaaaaggacaaaatgcctttctacctcaactcgcagaagaattgtgatattaggaagagtacattacaaactcttaagataaaaaaagggaaggaagaaagagagagagaggagactgcacaccataaaaatcaaatacatagagagttcctgtcatctctatattatcacctggctccttcattctgtcagtgaggaagggggcctggaggctggagactggcagcttgttagtagcagaggggacccaggtccctgttagtcccatgctccttcccaccacaccccatattctcttcttgatactaaggttgccacgtatctgggaacagcacaaaaagtccaaaaatgggagtttctgtctggtgtccagtgacctcacaggcttctggaatggctgcagccagggtctctgggccaatgggagggggcagggccagtgccaaaccagaggctttgggctggaaggaggcccagagctgtacagtgaagagccttctcttgctgggaaggttctcaagacattattcatttcttagcagtcatggctttactgtctttagcagtcatttctcagaattactggattacttgtctaaaaaggacatgttaaaagctactaccatcattatcactgtctataaaatgtattcttggttcttttctcaaactcctcattcagtcagtgcgtaattagttaa

SEQ ID NO: 72727 - DNA, 1024 bp, Homo sapiens
ttgttcataatatataaatgaatggatgaattaatttataaatttatgatatataaatgaatccattcatttatgtattattcacatagaattttcactaagatactctctcgtgccctttccaatttgcatcttgtatcaaatagttacatactatgtagatactacaaagagtgtgtggtcagtctagtttctttgggactaaaattcagtcacagtaaacaatttatcagttattttaacagatcaatgacttaaaataagtagcattttagttagcagtctaacaaagcatattcttgcagaatttctactcctcgaaattaataacatgaacactgtagtgaataatgtatggcactggtagattctcatgtacatgtatgagtctgaaattcaggtatatgtcttttcagtacaatgtgaaattggagctctaattatcttccactaaaacttgaaagatgaagctcagaaacacaggagttttactcactgccttccaccctctgggcactcacttttctgtgagaaaacccttatcactatctcacaagctgttctgcttcatgtatcagacgaaggcggtggggtgggtggggaggattcattttcccatagagagtaatcgcctcccctttgtacaggatgacgacaggccgatgattgatgtcatggatcagctaagttcttccattctagaaagttttattcatgtagcagtttcggattcagtaagtacacatttgattccaattaatggctcttaaaagctctggacctatctaaaatagtcagtgaaaaattatgtggaataatttgggtgtttatgtcagattaataaactgacccaaaggtacttatgaagataagactagtttttcagatgttaatttaagagacattcagataaatttcacacaaaatctggatcttaggaatatagataatatttttaaacaacagttttaagaattgctcaggattcttaaggaaaattactttgcctttttcattgtactta

SEQ ID NO: 72728 - DNA, 1104 bp, Homo sapiens
ttccgagttctcttaaagatgggcagcagtcaaaaaacatttaatatgtaagcagcagctgagtgggaagtgttgcagttttcccaggtattgattagaaaaaaatctctgcaggtcctatttttgatctttctttcccactctgagtcaaggtgctgctggctgcaacgtgaggacaggaagagtgcacacttagaaaagaaaatgtggcttgactttttaagtgcatgtttcattgcctaaagaaaactgtagttaaaaaatgaagtggttcctttcctcaaaatgtaagaaatatatataatagcgatatacagtatgtccagtcttataacctctaagtgtgtttttctccctagttcaccaccgaagatttctcttcccccagcaaagtctgaggcaccaccttttcatcttattcagccagtgggcaggacccttcagcattatgttcactcctctggatcgttacagtgacagaaatcatcagattacaagatatcagtattgtgcattaaaagtaggtgatattgtactcacgaatgactgagtcagatggatggtctctctcgttaaactaataaccatgccttaaaaataagcttaaaataaataatacaatatcatagaataaaatctaagcgcacatacaaaaaaatcacatggacacacacgtacatagcttttctaagctcccattttcttctcatatttctcctgtatgggaaccatatatttttgctcatttacccattatatagctgtcttgtcaattaactttcaacctaaaaaagaaaaaaatagacatcacctcaggttcaaaatctacccagagcgacattccctttttaatctccttctatcctagaagactgccagaaataaatttccccccaactaggactattcaaaatcttcagaagcatgactcctttacagcctaatttccttcagaaaactaactgtatatcagctctgtcatacagaacataagttgctgactctcagattacctttgcctcggtggaactaatttaaactatggccctgatagtcagttggacctgccaattgcaaagttattcaagatctcctcttctccta

SEQ ID NO: 72729 - DNA, 1025 bp, Homo sapiens
ctgcaagagtttgcccttgaactttttagaatctttaaaaggtgttgtgtctttgctattaattgcatatgaacagtaagcatcatgatcacaaacacttttagctttgtgaacaggctcaggtgatgccacctttatttccagttgatgaccctcattcatgtttccataacatttaacagttttctcacgaatacatatttaggcattccaaaaaagtgttgaggagaccaaagttgtcacagaggtagaaagctatttcagaaattgtaataatgatttgttatcccagctctatcatccacagccaaaggatttggaatttctgatgtttaatgttgatttttctctttggagttagtgtatatttaccttttcttttaaggtgcacctactgaagtgtatattgttagcactgttggttaatgttgtgttaacactaagagaaatgttcttgagtatctttaatataatcattgtaaatagaccttttgtttgtttttctgctcattcaatctgctacccaggaacttcaggtaagatgatgctgtttttaattcaaatatgctagtagatgttttgcatctttgcagatttataacaacataattgcttttttcctcccttccagaatatatatgcttatttgcgtgcatatttccatttaggtgtgtgatataagaggtatttttcttggctgctctagtatggaaatgttttctaaaatgtaaatacatttttaaaacctttatatgcctagttctgaaagttgcatgattatatctcagagaagtggagttttcaaatctgatctatggcaatcctatcatttctcatcaagtggttgcacaactggatgggttttattgttaaattcttgtattaaaactgaaatcaccgggtaccatggctcccacctgtaatcccagcattttgggaggctgaggtgccagatcacttgaggccaggagttcaagaccagcctagccaacatggcgaaaccctgtctctactaaaaatataaa

SEQ ID NO: 72730 - DNA, 1078 bp, Homo sapiens
attgctgtggcagaaataggctggaatgtttacctaatgctcttccactaaatacccaaaggattctggaatgtgctacaagcagcatagctcctacttttttctccttctgaaaacagtactaaacaggggccgacctcagggtggtgggagtgggtgacacctcttttgaagttttcatactaatggtctctttgttacagatttttgaaaacacagatcattggtagtgtttaccaaaatcaactttttaaaaaatgtaattattacccaccatgccaaagaaaagtatgtaatcatttctgcctatgacttcacatgagtttacatgaaaatagtgtgcttttactacttttcacattgggtaaacaaaagttttgataccaaagtcgatgagggcctaagagttaataatgacaatatttgttcccaagctatgactaattgaatgtgtgaacatgtgagtgcaagaggattttggcataaaaaaccggctgatggtgtgatttcagggtgagagtatggacaatttcaactggggagtgcgcagacgttctctggacagcctggataagtgtgatatgcagattctggaggagcgccaactgtcaggaagcactcctagcctgaataaaatgcaccatgaggactccgatgaatcatccgaggaggaggacctcacagccagccagatcctggagcactcagacctagtaagtagcggctctcccactctaagaattgggaggcttattttttgtaactaatgcaggaggacagtttccagttgcagctaaggaaactttccacagctgctgaactaaaatcggaactgtcaggtggtgtcatacgggttctagctggcagagtcttctctgtaggttgcagatggaaacaaagactggggtccatgtgattcaccctgaaagccaccagatctgttaaggcctagatttttcccaaataccttttatgattctggaatctttttaaaaattccccagatctctaaagtgtggagatatgacagacattttgatgtgattttctgaaaatacctggattactagctgctatg

SEQ ID NO: 72731 - DNA, 1026 bp, Homo sapiens
ttcccacgtggagcattgtttccttatctgcaaaatgtggaggttggattggaggtcttgatggtcttttccaagtttagcgttcataccctataagcatgggccaagtacgaaaatctactgagagcccctttggggaccattatggaagagattgaaaagaagataaagaatgaacagtacttcagagaattcctgagtccagcctagaaacggactatactgtagctagaaaacaaatgtccccatttctatcaccatcagcatttcagtctctcttatttgttccttagttgaacaggttgtcctgtatgttttcttacacattgggggattcttttgtctttttattcttccaggctgaagctgttcgtgaggaggaggacaccaccgtgcatgaggatgatctttctagttccatcaatgaactcccagcagcttttgaatgcagcgacagctttagcctggacatgactgagggggaagaaaaaggcaatcgggcactggaccagtttaccctggcgaggtaatggagcccttggctgatgtgagtggtgtgaatgtgcatggtacattatatggcattcacactcaagttaagtgtcacagttgcactgctgggacatcctaataaaggactccaaagtgacatatatcatggcaggctctcagctgagttagagtcatccaatcccattatagggcctcgtgtggaacaaagaaagaacacttacatatgaattcataaggccagaaagcaacgtaaaaagcaaaggaagagcctggaaacatggtccagaccttgtaagctttgaagataagcaacacttggcaagccttggaaataagttctttccatttggagttaaaaccctggaacaagaggctctttatataggaaatacctactctttaagtgggtgtcttttggcctggtggctgatatttctgagactagtgagatatagaaacagaaaaaaaaaatgtgaagagaaatagataaacaccagaggttagattaatcca

SEQ ID NO: 72732 - DNA, 1010 bp, Homo sapiens
ttcctcgaatcgtgaaagaatccgtgacctcttgccaggtgcggtggcacacacctgtaatcctgccactttgggaggccgaactgggtggatcacttgaggccaggaattcaagaccagcctggccaacatggtgaaatactgtctctactaaaaatgcaaatatttgctgggcatggtagcacacgcctgtagtcccagttactctggtgactgaggcacgagaattgcttgaacccacgaggcagaggttgcagtgagccgagatcatgccactgcactccagcctgggcgacagagcgagactcaaaacaaacaaacagaccaaaaagaatcacagtgactgctgaatgaaagccaagtccccaaagcaacttcaaaaggaagagtgggtagaatagctacctcattttgctgactctcagggtgagaatttataaaacccagtataggatgagaaggacatcacttcttgacatagtcgttttcattttttccagctttggagaaggtgacaggggagtctctccccctccctcgcccttcttctcagccatccttgccgcctttcagcccgcagcctgtgacgatgccgaggaggcctggcgcagccacatcaaccagcttatgtgtgactcagatggctcctgtgctgtgtatacatttcatgtgttctcctccttgtttaaggtatgtgtgctcactgaaagtgcagaggacttagtttctaaggggagccgggtaactttgaatttaaggagaggttgttcttctgttctggggttatactactgtattttctcctccagacacccctaaatttcctctgactttgaaatttcttctatttacccttaatcttgtcatccttctaaacatggtattgatgatttaggctgccatgaagtacctttcattcctgcatctcttggtgttactgacatcaccagtcctcagcagccatgacatcaggaccattaagggaatcttctgccaggcctatcctccat

SEQ ID NO: 72733 - DNA, 1134 bp, Homo sapiens
acatttgcagggggatcaagagatggagtaattacctgtcaaccaggggactccgaagaaaaggtaataaaagcctgttagaatgggtctcttgtgtgctctaacattgtgtattagttttggtctacccaagaagcctggaacttgagaaaagaagaggcggaatgagtcaccccaaacatttacatgaaaccaacagagtaagacagaatgccttccagcatgactgtgtgttgatgggatttgtggggaggtttcttcgttttggaaaagtagaggtataaaataaccttttttgctggatactgtctaactatactaataatttcctaataaatttattcttaattcagattataaggccaaatttcattaattcttcactgaaccacttagtttctttaatgaaggaagtttctctcaacctttcagcagtcactctaaaacagattttctcatttagaattgctacacacctcagtccagtgtgccgtactataaaggaaattaaaggacagagtaagaatggatgaaaatcattcattctgcagttacatattgagtgcctcctgtatggccccatggaggacacactcatgagcaacagacaaggcctctgctcttgtggagcttctgatcttgtcagcgagacagacattaatgaaacagtcatacagctattaactgcaacaaggaccatcaaggacaggaaagaacagaaagctgagagatcacagagcaaggctgcctgatccgatggggagggcggctctgggaagggttctccatggaagtagcatcttggcagagatctaaaatatgagatgaagaggagtgggcctgtagtctgcgtaagggcccggaggcaggggaaccaggcctttccaagaaccaaggagagcccatgtggctgaaagcaccgaaagccctgtggagaaaaggttgagaagagtctggagaagttggcagaagaagcccatgcagggctttggtgtttaacagcaataataagcaactgaaaaggattaacagtggggatgattagatcaaggctctcccactctgtctactgtggaaacagctcaaagtggcaagagtggttcagggaacttaggaggctgctgccccatctag

SEQ ID NO: 72734 - DNA, 1060 bp, Homo sapiens
taagcattttgtatatattatttccacttaatctttaaaataaacctttaggatggctattatcttcagtctcacagatgagaaaaccgaggcacataaaagtcagttaacttgtccatcttcctacagtacactgcagagccggcatttgaacccagatctactcactcttgagcctgatctcttgtactctttccttctgtatttattccctatttaagtctaacttaaatagaacacattttaaatgaagtcttaaccttttctataaggagagcatctcagcagttgacacatactcaatgcatccaactccacaatcccctacacataccatggagtacaatgtcatctatcctatctgaatttaccaaggtattaagcttatgcttaaccacacccataagatcctttttttttccttttgggatgtaaaattcccccagcacctaaatatagtttaaaaaacatttttttttaaatagctgctgaatatgtccagggaactgagtgacctaaagaaacacctgaaggaagccagtgcagtcattgcagctgaccctctctattcagacggcgcgtggtccgagcccaccttcacgtccactgaagcagccatccagtccatgctggagtgcctgaagaacaacgaactcggcaaagctttgcggcagatcagggagtgcaggtgactctgctatttcttttagaggtggttgcaggaaatgcacacctggttgttactctgtcatggttggagtctagcccactacggaaggctagatattttacagatctcttctcagatctttactgctgccaaaccagaaacactcagctttcagaacactacatattgaaagtgttggtgttggttctggccatttgtcgtccctaaaatgacaaaatgctgaagcacttcaaaatatacctttatataatttttaactaacatttgaatatattctttttggttttgcccctacattctgatattgtattcacattcattgaaaccagaaggctatagcaaataaggtaaatgttttaggagtgtcag

SEQ ID NO: 72735 - DNA, 1058 bp, Homo sapiens
aaactaaatcgtatgaaaatcctcttctctagtcgcactagccacgtttcgagtgcttaatgtggctagtggcaccggtttggacagcacagctgtaaaatgttcccatcctcacagtaagctgttaccgttccaggagatgggactgaattagaattcaaacaaattttccagcgcttctgagttttacctcagtcacataataaggaatgcatccctgtgtaagtgcattttggtcttctgttttgcagacttatttaccaagcattggaggaatatcgtaggtaaaaatgcctattggatccaaagagaggccaacattttttgaaatttttaagacacgctgcaacaaagcaggtattgacaaattttatataactttataaattacaccgagaaagtgttttctaaaaaatgcttgctaaaaacccagtacgtcacagtgttgcttagaaccataaactgttccttatgtgtgtataaatccagttaacaacataatcatcgtttgcaggttaaccacatgataaatatagaacgtctagtggataaagaggaaactggccccttgactagcagtaggaacaattactaacaaatcagaagcattaatgttactttatggcagaagttgtccaactttttggtttcagtactccttatactcttaaaaatgatctaggacccccggagtgcttttgtttatgtagcttaccatattagaaatttaaaactaagaatttaaggctgggcgtggtggctcacgcctgtaatcccagcactttgggaggccgaggtgggcggatcacttgaggccagaagtttgagaccagcctggccaacatggtgaaaccctatctctactaaaaatacaaaaaatgtgctgcgtgtggtggtgcgtgcctgtaatcccagctacacgggaggtggaggcaggagaatcgcttgaaccctggaggcagaggttgcagtgagccaagatcatgccactgcactctagcctgggccacatagcatgactctgtctcaaaacaaacaaacaaacaaaaaactaagaa

SEQ ID NO: 72736 - DNA, 1162 bp, Homo sapiens
atatatacagcttttaataatatagttaaatgccatcttgtaacttttgtgaactcttgttacacctttctatagattcgcaagagaatggattaatgatcttgtttaattaatatgccttaacaaaagtaatccatagtcaagatcttaagcatttttttccttatgatctttaactgttctgggtcacaaatttgtctgtcactggttaaaactaaggtgggattttttttttaaatagatttaggaccaataagtcttaattggtttgaagaactttcttcagaagctccaccctataattctgaacctgcagaagaatctgaacataaaaacaacaattacgaaccaaacctatttaaaactccacaaaggaaaccatcttataatcagctggcttcaactccaataatattcaaagagcaagggctgactctgccgctgtaccaatctcctgtaaaagaattagataaattcaaattagacttaggtaagtaatgcaatatggtagactggggagaactacaaactaggaatttaggcaaacctgtgttaaaatcttagctcattcattaattgtgtcatgctgggcaaatcagtctctctggcctctttttcctcactcgaaaaatggagacgatgaaaataatgtctcataggtttggattaaattaaataatgtaggtacttagtaaatgttctctttcatccctcctttgataaatttgccaactgagatttgctgaattacgtctttcttatgccaaaaaaacctaggacttgttttgatgttaattaaactaaactatatttctgcaagctatcacagaggacagagattattttaccgatatactataagtatcatgatttggaaggagtttccctggcgtaggtgccgcatgtttctaagcaattatgtaataagattatatattcagtcattcaaataattattacctacttgacataagtaatgaactttcccttttcttcagagtgttaatctctagtaaggggaataaagagtacacagataaagtatagtgtaaggttgaatgtagtatgtgctaagagaaaaatataaaaaagtataatgagagttgagaagaaagagcaaatagtattgggcaaagttaggcaattattcctttgagctaaa

SEQ ID NO: 72737 - DNA, 1070 bp, Homo sapiens
gataggtcttagaatatttaattgtatatatagtaagattaggtgagttttaattgtgtagaactgctaaagaaaggtttttagggattgttgtatgaataaaaggctttaggttcattggaatcaggggaatcaggctttactagaagaacaggagaaggggtgactgaccgaaaaataaaatgccaagtactcagaataaccctttaaatactgatatgtaatatttagcacattctacataaactgtttctatgagaaaggttgtgagaataatataaattatatggcttataaaatattaatgtgcttctgttttatactttaacaggatttggaaaaacatcagggaattcatttaaagtaaatagctgcaaagaccacattggaaagtcaatgccaaatgtcctagaagatgaagtatatgaaacagttgtagatacctctgaagaagatagtttttcattatgtttttctaaatgtagaacaaaaaatctacaaaaagtaagaactagcaagactaggaaaaaaattttccatgaagcaaacgctgatgaatgtgaaaaatctaaaaaccaagtgaaagaaaaatactcatttgtatctgaagtggaaccaaatgatactgatccattagattcaaatgtagcaaatcagaagccctttgagagtggaagtgacaaaatctccaaggaagttgtaccgtctttggcctgtgaatggtctcaactaaccctttcaggtctaaatggagcccagatggagaaaatacccctattgcatatttcttcatgtgaccaaaatatttcagaaaaagacctattagacacagagaacaaaagaaagaaagattttcttacttcagagaattctttgccacgtatttctagcctaccaaaatcagagaagccattaaatgaggaaacagtggtaaataagagagatgaagagcagcatcttgaatctcatacagactgcattcttgcagtaaagcaggcaatatctggaacttctccagtggcttcttcatttcagggtatcaaaaagtctatattcagaataagagaatc

SEQ ID NO: 72738 - DNA, 2965 bp, Homo sapiens
caagcagtcttcctgcctcagcctcccaaaagtgctgagattacaggcatgagccactgtgcccaaacactacctttttaacttagtgaaaaatatttagtgaatgtgattgatggtactttaattttgtcactttgtgtttttatgtttaggtttattgcattcttctgtgaaaagaagctgttcacagaatgattctgaagaaccaactttgtccttaactagctcttttgggacaattctgaggaaatgttctagaaatgaaacatgttctaataatacagtaatctctcaggatcttgattataaagaagcaaaatgtaataaggaaaaactacagttatttattaccccagaagctgattctctgtcatgcctgcaggaaggacagtgtgaaaatgatccaaaaagcaaaaaagtttcagatataaaagaagaggtcttggctgcagcatgtcacccagtacaacattcaaaagtggaatacagtgatactgactttcaatcccagaaaagtcttttatatgatcatgaaaatgccagcactcttattttaactcctacttccaaggatgttctgtcaaacctagtcatgatttctagaggcaaagaatcatacaaaatgtcagacaagctcaaaggtaacaattatgaatctgatgttgaattaaccaaaaatattcccatggaaaagaatcaagatgtatgtgctttaaatgaaaattataaaaacgttgagctgttgccacctgaaaaatacatgagagtagcatcaccttcaagaaaggtacaattcaaccaaaacacaaatctaagagtaatccaaaaaaatcaagaagaaactacttcaatttcaaaaataactgtcaatccagactctgaagaacttttctcagacaatgagaataattttgtcttccaagtagctaatgaaaggaataatcttgctttaggaaatactaaggaacttcatgaaacagacttgacttgtgtaaacgaacccattttcaagaactctaccatggttttatatggagacacaggtgataaacaagcaacccaagtgtcaattaaaaaagatttggtttatgttcttgcagaggagaacaaaaatagtgtaaagcagcatataaaaatgactctaggtcaagatttaaaatcggacatctccttgaatatagataaaataccagaaaaaaataatgattacatgaacaaatgggcaggactcttaggtccaatttcaaatcacagttttggaggtagcttcagaacagcttcaaataaggaaatcaagctctctgaacataacattaagaagagcaaaatgttcttcaaagatattgaagaacaatatcctactagtttagcttgtgttgaaattgtaaataccttggcattagataatcaaaagaaactgagcaagcctcagtcaattaatactgtatctgcacatttacagagtagtgtagttgtttctgattgtaaaaatagtcatataacccctcagatgttattttccaagcaggattttaattcaaaccataatttaacacctagccaaaaggcagaaattacagaactttctactatattagaagaatcaggaagtcagtttgaatttactcagtttagaaaaccaagctacatattgcagaagagtacatttgaagtgcctgaaaaccagatgactatcttaaagaccacttctgaggaatgcagagatgctgatcttcatgtcataatgaatgccccatcgattggtcaggtagacagcagcaagcaatttgaaggtacagttgaaattaaacggaagtttgctggcctgttgaaaaatgactgtaacaaaagtgcttctggttatttaacagatgaaaatgaagtggggtttaggggcttttattctgctcatggcacaaaactgaatgtttctactgaagctctgcaaaaagctgtgaaactgtttagtgatattgagaatattagtgaggaaacttctgcagaggtacatccaataagtttatcttcaagtaaatgtcatgattctgttgtttcaatgtttaagatagaaaatcataatgataaaactgtaagtgaaaaaaataataaatgccaactgatattacaaaataatattgaaatgactactggcacttttgttgaagaaattactgaaaattacaagagaaatactgaaaatgaagataacaaatatactgctgccagtagaaattctcataacttagaatttgatggcagtgattcaagtaaaaatgatactgtttgtattcataaagatgaaacggacttgctatttactgatcagcacaacatatgtcttaaattatctggccagtttatgaaggagggaaacactcagattaaagaagatttgtcagatttaacttttttggaagttgcgaaagctcaagaagcatgtcatggtaatacttcaaataaagaacagttaactgctactaaaacggagcaaaatataaaagattttgagacttctgatacattttttcagactgcaagtgggaaaaatattagtgtcgccaaagagtcatttaataaaattgtaaatttctttgatcagaaaccagaagaattgcataacttttccttaaattctgaattacattctgacataagaaagaacaaaatggacattctaagttatgaggaaacagacatagttaaacacaaaatactgaaagaaagtgtcccagttggtactggaaatcaactagtgaccttccagggacaacccgaacgtgatgaaaagatcaaagaacctactctattgggttttcatacagctagcgggaaaaaagttaaaattgcaaaggaatctttggacaaagtgaaaaacctttttgatgaaaaagagcaaggtactagtgaaatcaccagttttagccatcaatgggcaaagaccctaaagtacagagaggcctgtaaa

SEQ ID NO: 72739 - DNA, 2217 bp, Homo sapiens
tttacacaagttgtagtagaaaaacttctgtgagtcagacttcattacttgaagcaaaaaaatggcttagagaaggaatatttgatggtcaaccagaaagaataaatactgcagattatgtaggaaattatttgtatgaaaataattcaaacagtactatagctgaaaatgacaaaaatcatctctccgaaaaacaagatacttatttaagtaacagtagcatgtctaacagctattcctaccattctgatgaggtatataatgattcaggatatctctcaaaaaataaacttgattctggtattgagccagtattgaagaatgttgaagatcaaaaaaacactagtttttccaaagtaatatccaatgtaaaagatgcaaatgcatacccacaaactgtaaatgaagatatttgcgttgaggaacttgtgactagctcttcaccctgcaaaaataaaaatgcagccattaaattgtccatatctaatagtaataattttgaggtagggccacctgcatttaggatagccagtggtaaaatcgtttgtgtttcacatgaaacaattaaaaaagtgaaagacatatttacagacagtttcagtaaagtaattaaggaaaacaacgagaataaatcaaaaatttgccaaacgaaaattatggcaggttgttacgaggcattggatgattcagaggatattcttcataactctctagataatgatgaatgtagcacgcattcacataaggtttttgctgacattcagagtgaagaaattttacaacataaccaaaatatgtctggattggagaaagtttctaaaatatcaccttgtgatgttagtttggaaacttcagatatatgtaaatgtagtatagggaagcttcataagtcagtctcatctgcaaatacttgtgggatttttagcacagcaagtggaaaatctgtccaggtatcagatgcttcattacaaaacgcaagacaagtgttttctgaaatagaagatagtaccaagcaagtcttttccaaagtattgtttaaaagtaacgaacattcagaccagctcacaagagaagaaaatactgctatacgtactccagaacatttaatatcccaaaaaggcttttcatataatgtggtaaattcatctgctttctctggatttagtacagcaagtggaaagcaagtttccattttagaaagttccttacacaaagttaagggagtgttagaggaatttgatttaatcagaactgagcatagtcttcactattcacctacgtctagacaaaatgtatcaaaaatacttcctcgtgttgataagagaaacccagagcactgtgtaaactcagaaatggaaaaaacctgcagtaaagaatttaaattatcaaataacttaaatgttgaaggtggttcttcagaaaataatcactctattaaagtttctccatatctctctcaatttcaacaagacaaacaacagttggtattaggaaccaaagtgtcacttgttgagaacattcatgttttgggaaaagaacaggcttcacctaaaaacgtaaaaatggaaattggtaaaactgaaactttttctgatgttcctgtgaaaacaaatatagaagtttgttctacttactccaaagattcagaaaactactttgaaacagaagcagtagaaattgctaaagcttttatggaagatgatgaactgacagattctaaactgccaagtcatgccacacattctctttttacatgtcccgaaaatgaggaaatggttttgtcaaattcaagaattggaaaaagaagaggagagccccttatcttagtgggtaagtgttcatttttacctttcgtgttgccaatcactatttttaaagtgtttattcagtagacttggtatgctaacaattaagagtgttataaactatgtcttttcagccatttttgtgtagtcagtttgggggagtatggtttgatatacagatacacagattcagtattcgtatacagatttgatatcttggtatacagattcgatatctctgaatctgtataccaagaaatcatgttttaagggtctcaatatattttcaaaaagattattagtataataattgagaaattactgttaaaaagttttgagtttctctagaaaatttgaaactcttaacaaaacctgcataatactaacttaactgttttcatatacatagcaa

SEQ ID NO: 72740 - DNA, 1026 bp, Homo sapiens
gatttgtcttttcttatttaattttacatttgaataaataaaacattacatagttcattcatcagaactacaaaaaggtatacttagagtttttattcacccacctcttgcttactataggtaatcttttttagtgtttttttttcaggattctgtttaataaaaataagcaaatacatgtatatactcattaccctttcttactcaaaagatacagtatatacaccattttgcaccttgtttattggttgttgtttacttaagaattatttggagatgactccttaatgagtatatagagatcgtcctcattcttttttgtggttacatagtagttgatcatctggctgtgtcagtgtttcctagtttatttaaccaatttccaactagtggacttattgaagatttaattaggttccagttacatactgagaatgaacaatatctaaagcttagcttttaaaccttcataagactaaattttaaatttggtatttgcatcagaaattagctaacacctttgagttatgatggttaacatcaactgactaaatttatgctgatttctgttgtatgcttgtactgtgagttatttggtgcatagtcattatcaatttgtgaatcaatttattttcatagttaacatttattgagcatctgttacattcactgaaaattgtaaagcctataattgtctcaaattttttgtgtatttacagtaacatggatattctcttagattttaactaatatgtaatataaaataattgtttcctaggcacaataaaagatcgaagattgtttatgcatcatgtttctttagagccgattacctgtgtaccctttcggtaagacatgtttaaatttttctaaattctaatacagtatgagaaaagtctcgtttttataaatgaacatttctaaaaataatgacactaacgttaagaagttaacacttcccgttttataaaatttataaaatactttggtagtattttatagtgctgttcatatcattattttatt

SEQ ID NO: 72741 - DNA, 1722 bp, Homo sapiens
ttgttaggtgataatttaagcaatggaaatgactcacattagcaagggaaagtgtctaaggaagacatccagttttggagactttttttgaggaatcaggaagaggtaaaaccagtaaaagatgaaagaggtacagtgatggtgagaattttaaaagaaggaaaatgtaaactgtcatagctattaggaaagttgagtagaatgagtttgcgtgcatcccacatgcatctgggaggtcattaacaactttattgagaacagtttctgtagagtagtgggagaaatgagagtttattgagtagagattgaggaagtgaaaatagctacattacctattgaagaaggttgactgtggagtgtaacagtgagtattagcttgaggcagagataaaggtgagtgagaaaataagagtttcaaaggtaggcaagatttttgggctaaataaaaagggcactttaaaaaaggtataaataggtagaagagagaaaagggagcgaggtgggataattgaaagaggggatctcctgtggagactgaggtattaggcggagtagagagttcaggtgaagatgtgaaggtgagagaagaggatgggtagacatttccctggtgaaggaggtaaggagtactatgatggaattagaggggacacactgagagggtccacacttgacagactctcttctattatgtgttatgtgaggtagattgtaaagtcaaaggctagccttgaaaaatgtgatattgttttggaatggcaaccatggtgaatacaaaacagttaccagaatagtatcaccatgtagcaaatgagggtctgcaacaaaggcatattcctaaatatttatatgtgtactagtcaataaacttatatattttctccccattgcagcacaactaaggaacgtcaagagatacagaatccaaattttaccgcacctggtcaagaatttctgtctaaatctcatttgtatgaacatctgactttggaaaaatcttcaagcaatttagcagtttcaggacatccattttatcaagtttctgctacaagaaatgaaaaaatgagacacttgattactacaggcagaccaaccaaagtctttgttccaccttttaaaactaaatcacattttcacagagttgaacagtgtgttaggaatattaacttggaggaaaacagacaaaagcaaaacattgatggacatggctctgatgatagtaaaaataagattaatgacaatgagattcatcagtttaacaaaaacaactccaatcaagcagtagctgtaactttcacaaagtgtgaagaagaacctttaggtattgtatgacaatttgtgtgatgaatttttgcctttcagttagatatttccgttgttaaataatgtcctgatggttttccccctttggtggtggtaattttaaagccctttttaatgttttagattttctaaatccaaagattaggtttaaattattctaatgtttctttcaaagataacttcttgtggacttgttaaaaaaaattagacacacaatctaggactgctgttactggaatatattttctatcatgctactaattttctttttaaaatgtgataaaaatagggccgggcgtggtggctcatgcctgtaatcccagaactttgggagactaaggcgggcggatcacctgaggtcaggagttcaagaccagcctggccaacatagtgaaaccc

SEQ ID NO: 72742 - DNA, 2000 bp, Homo sapiens
tgcgaattaagaagaaacaaaggcaacgcgtctttccacagccaggcagtctgtatcttgcaaaaacatccactctgcctcgaatctctctgaaagcagcagtaggaggccaagttccctctgcgtgttctcataaacaggtatgtgtttgtctacaatactgatggcttttatgacagagtgtaattttatttcattaactagtatctacaaatggctttgtttaaagaatgaacacattagtgcaggaatggatgaatgaaatcatcatattttctaattagcctgcagtggcagcctctggccccttgctaggcctgcctcatcctgctaaagtgatctgtgcttccaaattactacttcttttcccccttcaaatctttcttattttgtcattgtaaatgctctcagctaggtgttaaagtagtcttactgatattcaaatgtgaataactgatagccctgaaccttctatgagctatttatattttccaaagaggattctccttaagccaatattatctaggtagaattttaggcaatggagaggtgaaaataatattgatgacattaatagctaactttgagcattttctaggtgtaagatgctcttctaagcacttcacatgcattaggtatatcttgcttaatcctcacagtcaccttgaaagaaaggcactgttactttgtttccattttgcaaatgagagaactgaagcatagagagggttaagtaactgccccaaagtcacttaactagtaagtggaagtgctatgattccaaagcaaagagtctgactccagagtcaaactctgaacaaacaaaaagacactttgggttagatatcctggggtgaaagcaagcactttgaaagtaagccaagcctgtgtacagatctgaccacctgaggtcacattccctaaaatacttaaacttctcccttttgtttcccatctaagtttttgaacttaagagattttgtaaaacatcacatttttttatcctcacagtaccttcctatggcagatttagcaggaggcgtataaacggggtggaaaaggtacagcagactgtggaatgtatggatcatttatattacattaaaatttttagtttctagtaaataacttaaatgtttttgtagtgaagattctagtagttaatgaaaatttttggtaaattcagttttggtttgttataattgtttttattgtgtgatacatgtttactttaaattgtttttcttttttgtgtgtgtttattttgtgtagctgtatacgtatggcgtttctaaacattgcataaaaattaacagcaaaaatgcagagtcttttcagtttcacactgaagattattttggtaaggaaagtttatggactggaaaaggaatacagttggctgatggtggatggctcataccctccaatgatggaaaggctggaaaagaagaattttataggtactctatgcaaaaagattgtgtgttaacttttatgtattccctcatccctctttcttctcttaactgtctctcgaactaaaaagttggctagaaatcaaatttttatgcatttaattgttttaagtgcattatggttaagcattctgtagaagtcttttgaaaagtgctgtttgtcctggggtttaatgaactggattttcttgatttgggacatttttcttaggcatttataaatatagcccaatttataaagttaaatttggccgggtacagtggctcatgcctgtaatcccagcactttgggaggccgaggcgggtagatcacctgaggtcaggagttcgagaccagcctggccaacgtggcgaaaccccatctctactaaaagtacaagaactatctgggcgtggtggcaggcacctgtaatcccggctactctggaggctgaggcaggagaatcgcttgaacctgggaggcagaggttgcagtgagccaagattgagccactgcactccaggctgggcgataagagtgagact

SEQ ID NO: 72743 - DNA, 1044 bp, Homo sapiens
ccacaaattcttagcttccaaaattttggtgatacctcatttcctattctctctagttgcctttgtccatgtagattttttgaggaagcttgggtaaataagtgtattttaaactattatgtttaaatcgaagttccttttatctgttttctaatagaaacatttaaatagcattaagaacttgtagcagtataaacaatatgtttgagaagtactatattgtgaaaatattttcacttttatacagttttttacttatttactgtcttactaatcttcctaagactttttaaagtgaatatttttaaggcagttctagaagaatgaaaactcttatgatatctgtaatagaattgaatacatatttaactactaaatcaatatatttattaatttgtccagatttctgctaacagtactcggcctgctcgctggtataccaaacttggattctttcctgaccctagaccttttcctctgcccttatcatcgcttttcagtgatggaggaaatgttggttgtgttgatgtaattattcaaagagcataccctatacaggtatgatgtattcttgaaacttaccatatatttctttcttttgatacaattaatttgtttgtttgtttgagatggagtttcggtctcttgcccaggctggagtgcaatggcgtgatcttggttcactgcagcctccacctcccgggttcaagtgattctcctgcctcagcctctcaagtagctgagccaccacacctggctaattttgtatttttggtagagaaggggtttcatcatgttggtcaggctgatctcgaactcctgacctcaggtgatccactaatctcagcctcccaaagttctgggattacagatgtgagccactgtgcctggcctgatacaattaacttgaatgttatatatgtgacttttttggtgtgtgtaacacattattacagtggatggagaagacatcatctggattatacatatttcgcaatgaaagagaggaagaaaaggaagcagcaaaatatgtggaggcccaac

SEQ ID NO: 72744 - DNA, 1816 bp, Homo sapiens
tggggctaagaatgagggttctagggccaacctctactacctatgtggcttgtgcaaattagttgtcccctttgtgcctcagttttacctacaacacagaaacaatgatattacctaccccatggactgttgtgaagattaaatgaattagtacatttactacacatagatctatttctcaaaataatgagcattcagatattagccatctgtaatgtagttggtgatgattatgattattagagtacatttataattggaggatcatttttgccgtagggaaatagaattattaatagtttgaggcacctgagaatattatgtgagaaactgattacattaaccacacccttaagatgagctctaattttgttgtatttgtcctgtttaaagccatctagttacaatagatggaacttttttgttctgattgctttttattccaatatcttaaatggtcacagggttatttcagtgaagagcagttaagagccttgaataatcacaggcaaatgttgaatgataagaaacaagctcagatccagttggaaattaggaaggccatggaatctgctgaacaaaaggaacaaggtttatcaagggatgtcacaaccgtgtggaagttgcgtattgtaagctattcaaaaaaagaaaaagattcaggtaagtatgtaaatgctttgtttttatcagttttattaacttaaaaaatgaccttactaacaaaatgattataaatccagataaagtataaagttagtttatatcagagaagcaaaatccactactaatgcccacaaagagataatataaaagaggatctgtatttattttgaaacaaacatttaaatgataatcacttcttccattgcatctttctcatctttctccaaacagttatactgagtatttggcgtccatcatcagatttatattctctgttaacagaaggaaagagatacagaatttatcatcttgcaacttcaaaatctaaaagtaaatctgaaagagctaacatacagttagcagcgacaaaaaaaactcagtatcaacaactaccggtacaaacctttcattgtaatttttcagttttgataagtgcttgttagtttatggaatctccatatgttgaatttttgttttgttttctgtaggtttcagatgaaattttatttcagatttaccagccacgggagccccttcacttcagcaaatttttagatccagactttcagccatcttgttctgaggtggacctaataggatttgtcgtttctgttgtgaaaaaaacaggtaatgcacaatatagttaattttttttattgattcttttaaaaaacattgtcttttaaaatctcttatgattagttggagctaccagttggcaaatttgctagctaactagtgatctgaaagtaagcctctttgaacctctgatttttcatgaaaagcaattctctcaattctatattatttcaagggtaacaagttacatcctagtctgtgtacttaattttatagaaattgtccttaattttattttctgcaatttatgttttcttactatttctggtgtatgtgtttatcccattgtgatgttatattggtgtcctcaatttatttccttagccatacactctacttttcattgtacagggctatttattatctcagagtcaagcttttttttttttttttttttccccgagatggagtctcactctgttgcccaggctggagtgcagtggcgctatctcagcccactgcaagttctgcctcccaggttcacaccattctcctgcctcagcctcccgag

SEQ ID NO: 72745 - DNA, 1049 bp, Homo sapiens
gtatgtgaagtatcactgtggttctagggagtcagacctgtacaaaaagatatacttcatgtcacttcctccttatccttgcagtcccaatcctaatcctcctttttcccccactcacaccctgttcctttagtttctgagtttatccttcctgatttcttttgctcaaatgaacagatacatgtgtattttcttatattcccttcttccttataagaaggggaacatactctagcctttcttttatgcttttcttttttaactcaacactgtcctggagatcagttcatagaaatcgtcctcactctttttttacagctacgtggtacaccattgtttggatgtaccacagtttatccaactctatcctgtatatgagctaataaaagttgcttccaatattttataattataatgtttcagtgagtaaccttgttcataggtgttttcatgaactttatgttcatgtgtattttactattattagaggtctatcttcagagaggagtacaagaaatgggattactgggtgcaaaggtaaatggatatgtgtctttgctaggtattgccaaatttatctccagaaatcttgcacaaatctgtactcctgttagcaatgtgtgcgtatacctgcttccacatgacctcagtaaaagaatgtgttgtcatattggtattgaaattttagcactgtaagcaacaggtcattttggaaaacctgagctttcgccaaattcagctattttgatttgcttttattattagcatataccaaaataaataggcatattagagtttcctttcttgcatcttaaaattcatctaacacatctataataacattcttttcttttttttccattctaggacttgcccctttcgtctatttgtcagacgaatgttacaatttactggcaataaagttttggatagaccttaatgaggacattattaagcctcatatgttaattgctgcaagcaacctccagtggcgaccagaatccaaatcaggccttcttactttatttgctggagatttttctgtgttt

SEQ ID NO: 72746 - DNA, 1033 bp, Homo sapiens
gattcccctaaatcactgatactggttttgtaattttgcatcggcatgtttgacaattggtatcacatttagggtttttcattcttttttggtccaaacttttcatttctgcttttaaaggaaatacttttggaaacataaatatgtgggtttgcaatttataaagcagcttttccacttattttcttagaatattgacatactttgcaatgaagcagaaaacaagcttatgcatatactgcatgcaaatgatcccaagtggtccaccccaactaaagactgtacttcagggccgtacactgctcaaatcattcctggtacaggaaacaagcttctggtaagttaatgtaaactcaaggaatattataagaagtatatatggaggccatcgtatattctgttgtatacctagtaaacatggtaaaatgtaattaaacttaattagaaaatgtggttgttatgtggctcctgtaagtatagttatttagaaattttatttattgaagcaagatatgaaactctgggtgcacactttccaaacaggtgctttcatttacatgtgattgaaaagtgttttttgtcatttatttcactgttccatacaattagggttgtttctaagctgtttgtaagctgtttctaagctatttaagtggttaaatcacagtagatgcaaatcaagctaaagtctttaacattggctaatggctgattcttaaatagctaatacttgctaagggtatctatattaactcatttaatcctcataacaaccctatgagataaaacctaagtcctcacttaacattgtcaataggtttttggaaactgattttaagggaagtgatgtataacaaaaccatttttttttctcatcactgttctaacaaaatgatgttgaagatttaaatgacattgctcaaagacctgctatacattgtttgacttaaagtcacagtttccgagaacctatcaattatgttaagtgaggacttgactctattatcctgattttgtagatgaggagactgtg

SEQ ID NO: 72747 - DNA, 1045 bp, Homo sapiens
ctctgatcaaagaacaggagagttcccaggccagtacggaagaatgtgagaaaaataagcaggacacaattacaactaaaaaatatatctaagcatttgcaaaggcgacaataaattattgacgcttaacctttccagtttataagactggaatataatttcaaaccacacattagtacttatgttgcacaatgagaaaagaaattagtttcaaatttacctcagcgtttgtgtatcgggcaaaaatcgttttgcccgattccgtattggtatacttttgcttcagttgcatatcttaaaactaaatgtaatttattaactaatcaagaaaaacatctttggctgagctcggtggctcatgcctgtaatcccaacactttgagaagctgaggtgggaggagtgcttgaggccaggagttcaagaccagcctgggcaacatagggagacccccatctttacaaagaaaaaaaaaaggggaaaagaaaatcttttaaatctttggatttgatcactacaagtattattttacaagtgaaataaacataccattttcttttagattgtgtcattaaatggaatgaggtctcttagtacagttattttgatgcagataattccttttagtttagctactattttaggggattttttttagaggtaactcactatgaaatagttctccttaatgcaaatatgttggttctgctatagttccatcctgttcaaaagtcaggatgaatatgaagagtggtgtttccttttgagcaattcttcatccttaagtcagcatgattataagaaaaatagaaccctcagtgtaactctaattcctttttactattccagtgtgatctctgaaattaaattacttcaactaaaaattcaaatactttaaatcagaagatttcatagttaatttattttttttttcaacaaaatggtcatccaaactcaaacttgagaaaatatcttgctttcaaattggcactgattctgcctgctttatttttagcgctatcacaggacccagagcctatgcccttt

SEQ ID NO: 72748 - DNA, 1021 bp, Homo sapiens
ctgtaacttaagtattctgcaagtcttattaatgagacttgttttgtttctaaaacagtttggttttcacatcctaattttgcagtgatccactctagaacaaggaataaaacttgggtttcaaacaggagaacagaaaaaattacaagaatttaaccttttcttttttgaatccttggtacaactgctattgtctgttctcatgtagaacacccattatgttgatagatatgtaatgcgcacacttttttataaattataaataacatccaagctacatgaaacaaaatatgaagcttgagtatatgtgcatattatcccctcaaaagtgacaatttaatgactacaaagtcaacatactgcatcataagggataatggtaaaaatttgtgttatttattcagcaatcatttaatgagaccctattgcccataaagagcatttgccagttctatgaatgatgcaaacagcgaacacaatacaagtcaatattgggtgttcaaagagttacacaaatcagaagccatgggagttgaaaaacagatcacttctacaggggataaagttgatggcatttaatcaatttttatggtttacaaaccaaatatttcaggggtcagctagggaaagaagagacattaaataggccaggaaactattctttagagctctagaaaagttatgtaacccagagccacttctccatagtggtcactcacttaacccaagtgagccaaaaaccctaaagcagggagccagccaagtcaggagggcttgaatctggtcctttgaaccgctcatgtgaaatcaaaggatggtaatttccactttgagctctctgacatttctcccctctaccagcccagacgagtcaagccatccatattgagctggttatgccaccaccctatcaaccaagatacccaggactacctgggcctggaaaatgggagcattattaagtagatcattaggagattattttatgttgtgcttggagatacagaagttagcaaagctg

SEQ ID NO: 72749 - DNA, 1035 bp, Homo sapiens
agaagcagcatctagatcataaatgaatcgcagactgctcaacctctaaagatctttagcctaaatgcaaaaacaccattgacatgtgcagtcccatgcagataaagtgcttttaaatgttccttgatgaagaagcattttagcagaatgttaaatgcatccttttaaaggaccaagtccaagccaagatttagcatttagcattatattagaaaactgacccaaaactaaagtcttcacattaataattccaaagttatcaatttccaagaattaccatttctggcctgaaaactaccatgtccatttccagcctgaaaagattcttttgttcggtctgaaatacctgaaaatagcaggatacataatgaggaactagaaaaacaaagaagtaccttgctaactcttgaacgttgaatttccagcgagtgtcaggttctcggaatataacttcatagttattttcaagtgcctgatttttcaaaagtacataaaacattgaagacatagtatgtatgtttgggaatgtttatgctgccatttaacatttactacaaatcttttcagaattccttttgttttaccagtaatccaatgccttaatttatcacaataaatgcagttgtttcattcccatacttagccactctcataattctccatgataaattttgctcaattttatctagtatgtaggaaatttgtaaaggttctttgttttggacatctttaaaaatagatgactgagctagtttaaaacgtcctgaacaccggtatgaatgaactcagtgacgtctcaaagtcacttatgggatttttgtagatttacttgtcagatgccttgtcctattcctcatgccttcctttagaaagtgggagtaccataggaacataactggtgaaataaaagtgatagtcacatacttcacatcatcttccttccaaaagtagctctccccattatgcaatacaatttgggtcaatgctctgggccccatttccttgagtttagaaaactattataatttccttata

SEQ ID NO: 72750 - DNA, 1060 bp, Homo sapiens
aaagagaacaagacaagaagctgctcaccagcgctccagcacattcttttggtcaaagcgagtcactttgctggcccacattgaagggcgaggaaagtagacttcttgatggaaggaagagcaaagaaaatgtggccactttaaatctagtacagataaagccagtgacacgaaggaagggataagtataaagaagacttgatgaaccagtgctcatagtttccgtatgaatgtctgttattcgacttctttaaagatacgcacatcgaaagtccaaaccttaacctctgatgcaaacaattatacagacaggacaaaaatctaagggtagcactgatgcattttcaggtatgtatattttatatttgtgaacactgtacagttttaaagttattttcatcaatattatttaaataatgaaagttgtgttcagagattaaataatagtgtataatgtatttcccttatcctctgtacactaagttaagcaaccatggtaactgaatccaagattttttttttctttcaggtcccgatttgatatcccttctaaatctggtttcatttgttctcctattaagtctgctacttacaagttttgttttggtttttgaacattttcagacttgaatttttcttttcatatacatacccttatctgctcttgttttcctctttgtggtttatattattgattggaagttaatactttataatatttcctttaaaaagactttaaggcatgagtatccaattcactgtttgttttgttttatttgaatcctatttccttctagaaaacaaaaacagcacataacactactgcccttttaatcacaaaattttaccttagagtaaaagctaaatggctcaggatcactatggggcaagaacaccatccatcatttcctgagacacatctgactgtggcctccatactcttcctaacaaacaggcagacaaaactaagggtgtttttcacctttaaggccaaggatttttttttttttttttttggcctgtatgatcttcctgaatgacttcaaaacttgttttatct

SEQ ID NO: 72751 - DNA, 1087 bp, Homo sapiens
gagaaactcaggggctaatcttgatttcacaacttattcttttgtgtaattctttatttaataatagagaaccatagagatatatttagatatctcttcagccagtcagtcactcactgagaaagtcagacattgcatgtaattttaacttgacgcccagttttttactagggaaattttcaagcatgcaaaagtagatggaataatatactcgatcctcatatacacatgaccagttatcaacatatggccagtcttctctcatgtccttcctatttcattgcatcagtcactccatcagtgtttagtctccctgcttgtctcatcagtgttttcctccagttggtgtgcgtgcaacagggaccaaacaagatccccacattgtatttggttgccatgtcccttaagtctcatttatcctatagtttgccctctcctttttatttccacctgaacttctcccgccacaaccttttaattagaaaatacacaaacctatggaaatgagttgaaaaacagtatattgaacgctgcttacccttcatctatggtcaccagatgttcacattttgccttagtttatgtctctcctatatatatttttggagaacaatatgaaagtaaattgcaggccgggcgcggtggctcacatttgtaatcccagcactttgggaggccaagacgggcggatcacttgaggtcaggagtttgagaccagcctggccaacacggcaaaatcccgtctctactaaaaataacaaacattagccagactggtggtgcacacctttaatcccagctactcaggaggctgaggcatgagaatcacttgaacccaggaggcagaaattgcagtgagccaagaccgtgccactacactccagctccagcctaggtgacagagcgaaactctgtctcaactgtctcaaaaaaaaaaaaaaaaaagataaactccatacatcgcgatactttattcctaaattctttatcaagtatctcttaagaataagaacaattccctgcataaccacaataccattattgcatctaaaaaattaaggcagagtgccctaagcaaggtccttca

SEQ ID NO: 72752 - DNA, 1052 bp, Homo sapiens
aaaatttatcaaacttgagagaagtgctacataccttaaattagaaaaaggatatatatggatggggatgagtggataatataggcatgttttctttcaattagtccaaagagaaggttacatttaattccctaactttgtggaggaatatacaggtataaggactcactggggatgactaaggtgcccactgtaggtgagtcctttattcttcattacatcttttctcctgtccggccctcagtcttacccattatgatagagtaacagctacaaattagatgtgtagttacttgacttggaagcaccttcctattgttgtgatctgtggtccacagtgacagacgtaactattctgagggctgttcattttccaggtagctggaggaggactggcttggaaggttagaaggatgatagaaaatctggaaaagccagtacttcacctaacctagtgggggtggctggggttctgttcacattagttggttattatttaaatgtgtccagaggcaatgctaatgggtacattttgaagtgaatagtaaaatcaaaatttagtgaatcattctagaactaatagttcaggacagtaggtatttcttaactgttctcataaacacctctatgggcaaagtagactcatttcgtctgtccatttaataaaaccaaatacatttttcctcatcttcttgtttctccttattccccatggagacattattgccacttaaaacacacatacacacacacagagcaatattttaaatgtttaaattgacatttgtggccaggcgtggtggctcatgcctataatcccagcattttgggaggccaagttgggtggatcacttgaggtcaggagttcgagaccagcctggccaacatagtgaaaccctgtctctactaaaaacacaaaaaaattagccgtgtgtggtggcacttgcctgtaatcacagctacttgggaggctgaggcaggagaatcacttgagcccaggaggcaaaggttgcagtgagccaacattgtgccactgcactccatcctgggcg

SEQ ID NO: 72753 - DNA, 1033 bp, Homo sapiens
ctaaagctggagtttgtctcagatctcaattagtaaacactatccagactccaatactaggattcatttgagttcttgccttatttgcaaggccactgaccatgagcttggctcgtccaatctagccaaacaaatcgcttcgtagcctctacttatggttttctctttatctctttcaagtacatgccatttccaaatatgaaattctttccctctgcttttctttcaagctacattctttttcccttgtacaaacacggcttataatgcacttccacatgtaaggcattccagagaaaactataacctcaaattctcttctacaatccttttagcactattaatgtcactcataaaatattcataagcttatcatttatattttctatatgcactaattttattttatgttagtcttgtctcccaatttagaaggtaagctagttgatgaatgaggtctatttcctttaaaaagctttctgaagtttaattaacggatgcttgatcattgttgattatgatgacatcatgcactcaaggtaagcgaggcatagaatcttttcacaatagtgtcttgatgcattctggtgcccctctaaggcagtgattgctaatctttttgcatcatagacccctctgaggagccgattaaatctatggacttctccccaaaaaaatggcacaaaataacccccaaaattttacatacaatttcagaatatggaccttggactacgatctcagaactaaaatgtcttcagttatcacttaaagctcccgaaagcaaaagcatttactttgaaaaaaattggtatgtttctttggtgttagtaggcgggtagaaaaattacaacaaataggctgggcgtggtggctcatgcctgtaatcccagcactttgggaggccgaggtgggtggatcatgaggtcaggagttggagaccagctcggccaggatggtgaaaccccatctctattaagaatccaaaaaaaaaaaaaaaaaaaattagccgggcgcagtggcgggcacctgt

SEQ ID NO: 72754 - DNA, 1037 bp, Homo sapiens
cttataccagtctgcatttactacagtccatctatactggcctctttgaactgttcttcagatatgataagcttgtccttgctaaaagctctaactgttatttctgcttggaatgctcttctcgtctactcttcctatgcctagcattttcttaatgtttaggtctcacctgagatgtcactttcactgtagtactagtagttgatgttactactgattcgttggcagtattcctgaaatagaatataggataaatgaggacatgtttattttgttcacagctgtgtccacaaaatctaaacagtgcctgtagtactgtaggagctcattaagtagtcggctgattgatttttgtacctaatggttctattaacaatattgacccccaaatgtattttcttcataaccttctcctctgaactccagtctgtatatttaactgtctacctgacatttccacttctaagcttaaaagctcctccaattgaacctgtgatctctttaaatctgggactccaggatttcctgccacagtgaatggatttaccttttatctatctctgtaagctagaaagttgagagtcttcttcaatgccttctttccccctcatattcaatccatcaaatggattctatggactttgccacctgaatatctcttgaatctgttcctacattttaaactaccatcatttgatggattttcacacagtgagtgtatctatataattaatacccaggtcaggaaatacgatattactagcaccttagaagctccttgtgccctctctctgtcagagtgatctttttaaagggaaaatgtgatcatgcttaatgcctttcagttgcttcccattgctcttagaataaagaccagaaatcataatgtgatatttaagatcctggatgatgttactgtttttcctatgcaacttcatgttttttaaattatttttctcactttctgtattccagccctgataaccacctctcaattccttgaatgtggtatgctgttccctcttgctaaaaaattc

SEQ ID NO: 72755 - DNA, 1212 bp, Homo sapiens
gtggcatgtgcctgtaatcctagctactcaggaggctgaggtaggagaatcgcttgaacctgggtggcagaggttgcagtgagccaagatggtgccatgcactccagcctgagcaacagagtgagactccatctcaaaaaaaaaaaaaaaaaaaattgatagagtttatactatttaatgtttaaatgttttctgtaaattaaacatcaatagacttgataatcatattttaggaacatttttttccattgaattatttacatatactgttgtactgtaaggctttaaattaattttaatattttattattttaattagcatttgaaatgtatagtgttcaataaatggattgctaaattatgttaagttggatttttttaaccctaattaattttcaggcagtatttcctaaaataagtcaatactacttgtaagtggttttacttacttttcttttatgtccacttgttacgtaagtatgttagtagtagacatcatggaaattacataaattttccgaatatttgaagaattaaaggagctttttctctataataggaactttttattcttttatggaattttaaattaattttctgaaagaacagtaaaagagacagttacttaagtttgctttgtaaataacttaaattttacaaggaaaatcttgaagtacagaattcttactgttgggtatttgctttattttgttttagtcaacttaaaaaaattgaagaactgggtcttgtttggtttctcttaattccttaagagtagtttgtgttttttcttcattgttctaaatgttagagttggagtttttgtttagaatagaaaagttggaatttttgtttagaaaagaaatgtcattggttttatgaatagattaagatagttttcaattcaggaaactggtaagcagtacataagggtattgagattataggaatatagttcaatgtaacccttggcagagatgcagttaagacatttatctagaatataagtaaattgaagtatttataggaaatgtgataagagtaatgggctagacattttgaaaattaaaaccagggatcttgttatctttggatcactactgtgtcctaggagctttattctttactaagaatcagtaactgttttattcgatattaggcacagtcttctccctaaaacagtcaacaaacttttgatacgaaggaagcagt

SEQ ID NO: 72756 - DNA, 1696 bp, Homo sapiens
caccatgcccgggtaatttttttgtgtttttaatagagacggggtttcaccttgttagccaggatggtgttgatctcctgacctcgtgatccacccgcctcggcctcccaaagtgctgggattactggcatgagccactgcgcctggccagaaattcttaatgtattatcactctatgcacaagaacaagaagaaggagtagcacaaataactttggaaagagagtctcaacagtaaatagttattctagaagctaagctgtatgtattgaaaagttttgactttttgtatatccaatagaaatttatttaatcattcataatctctttttcttccttctccttctgacaaattctgttctctgaaaaataaccctgttacattccagttgtggtaattgtaataattacacattataattcacttcccagaatggaatatgttaacttcagtaagttctcttaaatttcagtgtggaaaaaaatagatgatttttctgtaggatggacacaggcacagtctgatccctaatctcaaaactagacacaattgcattagcaattggtgagtaactgaagacttcacattgaagtcttggtttggtttttaatatttccatttcctttttttttgtaattgaactactttttgtaaattaatgggaagattgaaatactttgagaggagctattgggtttgcctctcagttttgctagtaactaagggaaaaagaataatgtggtttttcatggttgaaattgtgttttagtagagtccattgaaatatactttattatttggattattttcttattttccagttttaactgttttcagatggtacatgtaaagttaaagttttattcttggtgttaattttcagttggtaattataataattatacagctttcagaatatctcttcattctgaaagaaattctgaagagtaattctgaactcttcagttttttagtgtaacaaaatgaaagaaaatttactcaggaagggattgtgggttctttgttttcctttttttttcttccgtttttcttaatcttagaaatcatatttctttttctttcatagtcttttcttgtgtacgtgttttctttcactctattcattttttgctcagctatcctcctgtaacctcataacattcttaatgaagatgatgggatggtaagtgtctggcaaagcgggagataatatctttttccctcctgtattctactgaactcattgttccttctcagccttacttaatcaagttaaacttatacaccacagctctgcatttagtttcctgaccctgtgggttaggtagaatttagatacgaaaatggctggaaagatttataaaaatctattatgttaatcattggtggggaatccataacatggcatagaacttgaatgtatggatttgagaaaaaatatttacattaacttaattatatgatgatggatgctaattgataagcagtaggttgaaattcactgttacataattcactattatgtcatggttgctggttgcccttaactgaatgattttgaaggaaagctgataactattttgagttaaatttttacaagtggttccttatatggtgcaatgccgctgcaacaaacagtaggaattttgtagcaaaaagtcttaatagtatccatttaaataactgctgcttattt

SEQ ID NO: 72757 - DNA, 1337 bp, Homo sapiens
tctcagcatcccaagtagctgggacttcaagcatgcactgccacacctggcttattttgcattaaaaaaatttttttgtagagatggggtcttgccttgtttcccaaactggtcttgtactcctggcctcaagtgatcctcccaaagtgctgagattacaggcatgagccactgcaccagctttagtgatttttttttttttttttgagacagagtctttctctggatcacccaagctggagtacagtggcatgatgtcagctcactgcaacctccacctcccaggttcaagcgattctcctgcctcagcctcccgagtagctgggattagaggcactcgccaccatacctggataatttttgtatttttagtagagacagtgtttcaccatgttggccaggcaggtctcgaactcctgaccccaggtgatccgcctgccttggcctcccaaagtgctgggtgggattacaggcatgagccaccacaccaggcctagttggtttttttaaagtggaaaaacagttgttttcctaaacattgtggctaattttaattaaaaacagaatggaggaatgaatatgcagtggaaatactaaaatcactgtttaaagtcattgcttggtgtttaaaaatctataaaaatgtgaaatttacaatttttcatcaaaattctattcagacagtcttttttgggggttggggttaagagatgaggtctctttctgttgtatagactggacttgaactggtctcaagtgatcctcctgcctcagcctacctggtagctgggattacaggcacccagccaggtataatgttagtggaatagacccctgctgctatgccctattctaaccatctccatcacaaataattaaagtggatattaatcatatttacctaagatggagtacatcttagttaagtagaatacaacttctagtttggttcagtaagattaaattgtatttatttttttgtttgttccataggtttagtgcagaagttacttttttgtggtaaatgaatttatgattttttatgtttcataattttagtgaaaattcttgtgtggtaattaatttgaacttttgatactgctttttaaccaggtaatctttattttcagtatttatctttgtaaaagataatgttagcttttttatatttttgtctgttttaaaagtaagattatttacaaaagactgaatttttttaattgttggagtgggtgatttaagtatttgaactttgcttatctcttgtctaattaatacagattctggaattttccagttttacgtatagataagttttgaaagtatgatttaagagg

SEQ ID NO: 72758 - DNA, 1429 bp, Homo sapiens
gggtaccttagttttctctattcattagacaggtaaaattatatttcagctgattgatctgtgtgacaaaattatttcttagctataatcagcacatcacttagttcaaacaaaattccccagcaaatgttagatagtaggtatatcagtcacctggggagttttcttcataatatgcatattcatcttgtaatgcatacatagttatcatcctccttctcaacccatctccctaaccccacatgcttgccagttcttgaagggataaagtgattctaataatgttttacttctctctgttcaatttaatgtgatataattctagtataaaaatattttggacagttgcttaacatggtcataagaggatttgtactatagaatatcttctagtactaatttttctgtagagcaaattatatttctctcactggatagtttttagatgtgtttcttcatataaaattaaaaactgagatggaattcatttcagaggtcttgtcattcatcccctgccttcaaaccaagctttacctagactaacctagataattaagcatttctctttgcaacatgaggaaaaaaacactactacttctcttaataccattgttaccaatgtcttctgaagaatatttcttcaacagttttgatttacttttttgatttactctttttaggggaaaaaaaacccagctaattacaatgctgtcttaaaaattaagcattatgattctttatatgttttacataatattttgtggcctttaagctttctcctaaaccagcacatcttgaatcccatagtatttctttgttttaaaaccttttgctattcctttcaactttagatattctctcacatctttatattactttttaagttgtcaggccaaaaactagattcactgctatcaacaaggtctttgttacattgcctttagtgaaataagaatatgattttatttgtactattcagtgctgttaacatttgaatgaatattacctttatcttgtttaatacgtgtgtttgtatatatttgttcatcttaactacgatgtaagaatatgctaattcatgttttgtgtgtaaatgtatattgtatacatatacacatcttcatctatgttttcatatattcttttatttcagagtaatacttgttggtgtttggacttgtgtttctaagtattttattctgtagattagcgcagtttgaaaattgtacaaaaggatttcattttgggacaggtgaaacaactcttaggtagactatatgtccctttctttctgtctgtcttcataaacttaggagtaatagtactataaatttagctttttggccgggcacggtggctaacacctgtaatcccagcactttgggaggccgaggtgggcagatcacctgaggtcaggagtttgagacca

SEQ ID NO: 72759 - DNA, 1017 bp, Homo sapiens
aaatgtgatagcaactgtcataaataacttctaaaaagtgatattttacttcaatttttgcaagtcctagaagtccactcaatctttctgtaattcttaaaacagtatttcataatctttaattttgttattaacaaggggatatagtcagcaggctcagtgaataggtagttctatgtgaaaaggatgtaattaacatttttctgtgatatatggaatctttatacctttttaaaatattgataaaaacatttgagtttttaataagtctttttacataaaatgtggacagatgaaatatatattgtttatttacaaaatattatttagaatttgtgtgctttttctctaaaacagttaatctctaagcctgtacattctgcaacaaagatttacaatccttttcttttttgttaggaggaataaacatggtgtgtctcgaaagaagattgctcagatgttggatcgttatgaatatcaaatgtccatttctattgtaatgaattcagtggaaccatcacacaaaagcacacaaagacctcctcctccacaggggagacagaggtggggaggctctcttggctcacataatcgtgtctgtgtcacaaataatcattaaattagctattttcagctaacacatttgttgttgcacttgaaaaagagttagtgagcctgtcttggagtttaagtagtttcaaataaaaaaaggctacagtgcctcacaaaggatgttcccagcaagttgtttaaattcccagcaagttgttaaagtgtaaataaaaatatatgaaattgtattttaaatgtttttatattctcttgttgtaatactcttggctgttatggaagcacctgagtaatagagtggtgggtaggagctaggatgtttttctacaatcgaattttaaactaatttatctattttatagacactattgaacagttttttaatagttcatatctaaatctaacttttcataaaactttacggtttttccttcactaccttaaata

SEQ ID NO: 72760 - DNA, 1316 bp, Homo sapiens
ctgcaagctccgcctccccagttgaagcgattctcctgcctcagccacctgagtagctgagattataggtgcctgcccccatgcccagctaatttttgtatttttagtagagacagggtttcaccatgttggccaggctggtctcgaactcctgagctcagcccatctgccgtgctcagcctcccaaagtgctgggattacaggcatgagccaccacgcccagcctcatattgttttgactttccttaaggatagtaatcttaaggaattactattccttgagaatagtaatcaaaatttatccggttaaatagtcttaactgttataaaccatattattttataaagcgtcatttttcttggtcgagcaagtgtatagtattgtcgaaatgaaatttaactgtctgccttctttttactttaagaagtacttctctgggtttttgttttcttcctttcctttgtgtaggccataggaaaaggatacagagtagagtttcatgaacctgaaacttggtggaaatttgatcctgaagaattagaaaagtaagacactcgaatttttattgaatccttaacttttcttctttcttttgtgaattctgacatcctttcacagtttattgaatacaaatgtaggttcaggaaactgagggtaaaatgtgaggaccttttttctctggtttttggctaggccacttctctgcattgtccttctgccttcatctccttctcattttaggtcccatcaactttttactttgtgctttcatgttgctcccacttttctatcttttcaactacaggaccgtagtattataccaagatccttggaatcaatgtgttttggaatttaggttttagcaatttttgaaaggtaatatagtgcatatacatctaatcttaactcccttttcagagtttgggggagcatgttataatcaaacatcttaatatttctgcagcaaatcatgactagtcaattcaagtaaataacaaagaatctgcataatgtaaagtcaattctgagtaagttgttctgccaaatgagtacagatatgggtagagtttgctgccaaatgagtcagggagaactgagttttcgcagcttaaccagatttcagtaattgtggtgagagattgtgaacttctattttcagtcctaactcttccatttgtacctatctttaccttttcccttcatatcactgtgtttcctgactgttattccttttttttttcctttacttttttttttttgagatggagtctcgctctgttgcccaggctggagtgcagtggtgcaatctcagctc

SEQ ID NO: 72761 - DNA, 1439 bp, Homo sapiens
atggtgaaaccctgtctgtactaaaaatgcaaaaattagccaggcatggtggcacatgcttgtaatcccagctactcaggaggctgaggcaggagaatcacttgaacccgggaggcggaggttgcagtgagccaagatcgtgccactgcactccagcctgggcgacagagaccatctaaaaaaaaaaaaaaaaagagtttctgttagcatctgtaattgtgtagatttaagtgtaaagtgatttgaaatctgaaatctttgtaagattattcagctcttgtgctggtctgttcgtgatatactttcaggtaagtatcagaaatccatttaataacctttcctgtgtgatttatttcacttggttatatttatttctgatagtttatttctgatggttatagattttgtaaatggcacctttatgatttcttttattaacagaattctgcttggtcagaatcgtgatggcattgtgttcagcactgatgactattttcaccatcaagatgggtacaggtataatgttaatcaacttggtgatgcccatgactggaaccagaacagaggtttgttttgggctaagtgtcccaggatagaatatttggctaggagtcaaaagacctagattttattttcagcttaggtttttaccagctgaatgactgtaggcaagccgtttaaatagctttgagacctaatttctccatctgttagaggtggtgataattatacttgccctacctgatcagggtttttgtgaaaagcagagaatttagataaaacgctttgtaaactgtaaatagtttatcagtataagctggtaaaataatagcagcatgggatattttaagaggctttattttatacttgatgagtaaattcagagaactttgaatctgtaccattgttatgtagtcccaaagttatttccccgagaataatgctaatgttttccaaggcttaatatactggttgtgaatattaaaagtttttctcattgatattgctctacaagaaacctacttaatacattttttagcggacatgggtcaatttctgtttatcattaataggggttcttaacctgggctacacttttgaatttcttggggactttaaaaaaaagcaaaaaaaaaaaaaaaaaaaaaaaaaaaacagacaaaaagtgtgcctggcctcagccttagatattttggtttcattgatctggggtggggcctaaacattgatactttttgttttgaaatttctccagacgattctgatgtatagtcagaattgaaaactgttgatctgaactataagtaaatacatatgctatgttattttaaaagaatggattgatgattaaacaaatagcttttattatgaaaaattttaaacagattaaagagactgtaatgaacctcatagacccatcacccagaattatcaggtat

SEQ ID NO: 72762 - DNA, 1059 bp, Homo sapiens
cattaatttacatttggtttgtctgaagtgatttgaactgtaattctgtaagtggaaatagaggtttgtgcaaaagtaatcacagtttttaattggcattttaatggcaaaaactgcaattacgttcacaccaacctatacatacttaaattgttttcttttgatacaagtgattttataaaatacaccactggccctccatatttgttgattccacatcagtgaattcaacgaactttggactgaaagtatttgagaaaaaatattgcatctgtattgaaatgtacagacttttttccttgttatttcctaaacaatacagtataacaactatttacataatattcacattgtagagtattaggtattataaataatccagagatgagttaaagtgtatgggaggatgtgcatagtttatatgcaaacagccatttttatatcaagggcttgagcagcaagtgtggtcctggaaccaatctcccatggatattgagggagagaactgtatatgataccattataagctgagggatggagagatgacacttgtcatcttaatagtttaaacccttcctactatttttttagtgagaggtaagtaagcttgaatcattccaggccaatattcttttactctcaattccttctattaatataccaccttccatcccaccaatcccctcaaaattatacagtgatatccaaatgcctaatggttcaaggagaggagagaaacaacaaaatactctcgttgttgttcttggatccaaatcattatcttgctgcattttccctatcatagcacactcccaatttctttcatgagtcattggtaatgagagttctgagtacttgttaatcttgctgtacttgtcaatttaaggcagtatcgttttcaaaacaaagcttgattatcattgacctgaactgagagttttttatttagtgtttaataatttcatttaacgacttaagttcttaaaaatttaaagtttgattatactttggaggatcacagattgttccataaccttaagcctccaactatttccgact

SEQ ID NO: 72763 - DNA, 1019 bp, Homo sapiens
atgcaagctcaagtctaagacagaagctacttttttttttttttttttagtaatctccgaagtgacatcccatcacctgtatcatattctgttccttagaagctagggactaaatccaagcatactgcaggataagaggatgcaaggttgtgagtaccaggaggcagggatcattggaggcctttggttttggggtcaaggaggtgctttatcttagttctcccactaccatctaacttgccaaaattatttcttctcctggattagtttattatcaaattggcaggcttttatgaggattaaatgaggtcatagatttatgtaaaatgtttgacataaaataggctctcaaaaagatagctattgttttgaaaaaatagaaatcaagtggccaatgagcccagatttgatttttttaaattagatatttgacttactcacatttctaaattttgacattctgagaatccattttagtacctgacttgagagttctgacagtctaagaattttgaaaatactgatgttcttaaataatttatttttgctttagaggcttgataagacattcagatattcctagattcatataggtgtttttttaagtccataaaataaagcttcatggtttgaagtaattcacggaatttgaaaaatatgcataaacagtctatgctgcctgggaggaaaagtcttttcaagttaaacttatttactatagttatgatttatatatttaagaaaatgttctttatagagatttgttcatatgtattgttgacttgttttaatgatataaattggtgtattgctcccccaccttttattttgagaaaatttaaaccgttttttagatacaaaaaatatgattgtcatgtagaatgatattattaacatcttaaaaatcacctgtgccgggcacggtggctcacgcctgtaatcccagcactttaggaggctgaggtgggaggatcacctgaggtcaggagttcaagactagcctggccaacatggtgaaa

SEQ ID NO: 72764 - DNA, 1928 bp, Homo sapiens
tgcagtgactcatgcatgtaatcccaacactttgggaggccagggtggaccagtcacttgagctcaggagtttgagaccagcctgggcaacatagtgagaccctgtctctaaaaaatgaaataaaaatgttagaactataatgatacttgtaatcactgacaagtgcttttatgtttctagtagaagaaaatctttaatttgctacacttgagaatagcatctgacagtgtaactatttaaaaatcttttctgatagaagaaaggagaattggcatatgtttatatttagattctgctaagggctttaaaaatagataacactacgtataattatggcagtgatgaaagcaaatgctacttgagaactgtcctggcctacccttttgagtcagctgttcaaggaaagttggactcagtgttagaaaatttgagtttttcaagttcagttggaggtgagaaaaagagaaaatttgggtattgactcagttatttccctttttcaccttgggcaagttttgctctctgttaatggaataaatgatacttactttttctggaattgggaatcaaatgagatgacccaaggaaaggaattttgaatgtgttgagcactgtgccatgttcataccattgattggcagaaggaacccttttttgatttcttaaaattcaggagtttgaagtgagtaatatctgaattggtgttagaactgttggtggtttattgtattacaagatatttcaaattcctttttttgtttacatttttaaactattgatgcacttgaatatgtttatgcagttgtgaaaaaatagtgtaaagaaagcagtacaaattatcttgagtttatataagatgattcaagatttgtgccggacaaggagaaaaagaaaatttgttgatatctttgggtgaggatggagaggtccaagaaaccattttgcaaatgttttatattactaacaagacaatctaaacctaaataaacatctttttcagagaaaagacactagagaaagatttaatttgtgatatttcaagctagattataaactgtgatctttgtgaatgaattaattcattccagaattaaattttggtctttgtattttgattccttttactttagtgaggattttgtagagaagatgaaatttcacctctataataatagaagttaggagtgaggtctcacaaacatgggctgtcttctagatttgggatataccatcagagacaataaataactgaaatttggaaactggataaaagagtctgctagttaggaccacttgactaagagtgggtatagaagaaacctaaggaagaaaagttagatttgagacaacatattggagtatgttgaaattaaaggtgaataaagtagtggaaattcgatagaatttaaaggagacattgtagtgggagatggtagaggtgattagatataatatgtatatttatttgaaaaatagatatataagaatgaaagttgtatgtagtaccaacaagtaccattcgtattatgattcacaatttacagagtattttcatatataaaaatcttgtgcaatgggttgttttttcattttatagaaggagcagaggctaaaggaagttgaggttaagtgatttggaagttacaaaaactagtaagagctcaaactagcaataaaattatagtatgtttttcccttgccttcactgtaatgcttaatggttgtgtagtcttatacgtgactcctgacttcaaggatcctggtctgtacctctttaggtcaacacgttttgagtgaactggtgttggttatttggaattagatataaagtcatatattctttggtgaggaatggcttcatataggagttcacattcaaaacaagctttgacaaaataatagagtgaaaattggtagatcagagttg

SEQ ID NO: 72765 - DNA, 2158 bp, Homo sapiens
cccaatgcttgaacggcagtatagtcattgttctcagttaacacatcccgagttcccagacagaacgttttttatattaactcatgtagtggtcaggtaaagtaattaaaagccacaaatatggacttgaaagacagctcttcatgcagtacacatgtctgagatgttcgcatctttagggacaataaaatgagtattcaatggtgtatgcaggtcagttcgtgcaacaattaatcttgtatctcatggtgatagcagaaaacctaattaaaatttgtagtgctgaatatgtaggtgaaaattacatgggaacttttatgtgaagatagatttagtctcagaaacttaactgtaaaaacacatcttaagaacattattccttataaataaaatttgtacttaatatacatttacaaatatgtctaacaagatgcactttagactttataaaaattaccaaaatagtgactttttcctcctttttctgatggttttaaaaattgttctcttctcagctggcgtttacttaaaggtatattttaaatgggaaggtagtgtttgtcttggccttttttctttttttcttttctccttgtttcggttaaggctgattttccctatattaacttttcttttacagcagcttttgttactcttgtaggctttgttctctcgtgttatgtctctcccctctccccatattagagagagatgtggtgatgatagtgattgttgttaggagatgtttgtattaagcttatttgtaataagattctaccgagttggctgttggatgaaagttgtttaaattgttctgcagctttgtttaacgaagtaacattttgagcagtaggctttatcaataatttgttaggcctaagataaagtgatactctgtattaggcagggcttgccctggagaggggtgcaatggtagaaaatacccaaaactttgtggggaaggaatatttcgggaagctgtattctttctgctttacctcttgggaaatttagagactgccttagaactaacaggagtgctcagtatgatttggcatacggactcttgaatgacatggactgtatataacgtatattggaaaagaatacatttgtgtttcctctgttagtgttaaagagcaacaagaaaacttaaggatgatctccaactcacttatacatgagaaattaggttcagattttaatttcattgatttatctgaggtcacagtcatattcatgtggtggaactggggcagcccttaagatatcctggaagcttagaagtttccccattgtctttttttgttctattcaggatttagcaatatttattaataaaaattcagggtagtacattaccctccatccccttctcacctttttattcatttaaccaagaataaagttttgtggttagccgtctgtttcagcgtctggtttttaataatttctgtttaggattcagtccatttaggttgtctcagaagatagcctcttgtaggtctctgtctccgggagccgtctttctttatgtaacattacttgacatggcatttatttattctttgtgaaacttctaagagtaatttgggaaagttagtattgacctttgttttgttacaagatatagtgcgtgcatgagtatgcgtgtattttttcatttttaaactcagtttgctacacaagtcatctgtcacttctagttacaataggcgttttacttggttttcgtattcctgttcgggaatgttaaagattccaaaaatacttagtttaaaaacaagcccagtagtttctctgagagtgtatttactttttaagaagctgccaaatggttcgcaattctgactccttggagagtagaggtaagaagccctttcctcacactgttctgttacaaccacttgattctaaccatttcccccattacttgaaaaaggttttagaatcctttctcattaattagttcagaattaagaataaatttgctgtgttgagactgtaattgttttagctggcatgagtgatcgtgcacagtgaaaaaatcatgataataaaacttagatgaataaaatttatttgttcaaatcttaaagcctttgaggtttaaaaagtataatcattgtgttctaataattagacattaataataagt

SEQ ID NO: 72766 - DNA, 1073 bp, Homo sapiens
ttttactgaaaaaaatccatgtataaatgaacctgcacagttcaaacctgtgttgttgttacatattttcaactagctagaagagaggcttttgaatgttcccaacacaaataaatgataaatgtttgaagtgatggatatgttaattaccccgatttgatcattacacattgtatatgttgaagtatcaccatgtaacccacaaacatgtacaattatatgctggttaaaaagcataaaaataaaacccccgaacctactagctgtcacttcccatcaccccttatttctttagtgtttgggataagccaggtcaaatgcttaggttggtgccaaaatgtaagtacacagtaaaaaagcagttataactttttgcagggagactgtgtggcaaagtccatttacatagttttagagaatgcaaaaatgggataattactgaatggatgtttgcatacttccatactgtgcaaggatgtggtgcacagtgctggctagagatacaaagatgaaagatactcaatcaagagatgtatattcaagtgggaggaaagaggctggtataaaaatacttataaaacaagccagagtatagttagtgccttcaggaagggctcaatacaatatttggaattggaaacttgacaaatggagattagtcatgttactctgagagtacaggaactatgaaaaaattcttgaaggagcaaccattttgaccaagtcttagatgatggaaagatgggatttctggctttaatgaagagtaaagaatgcaatgctttttgaagtcttaaactatttgtttttgtttttgtaccctcatgctgctgccagatgattgcctctggaagctattcctacacctttttttgatgtttctaatctgttatgaacctgggggactaaattagtaaataatcttttagtgagagcctgatgtctgtatgaaaaggataccaatatatggtcttacgctgtcgttttgatatagttgcttttttagtttattctgtgggtcttggtttcatccctgttaattggtcttacagaataagtaattcctagataaa

SEQ ID NO: 72767 - DNA, 1022 bp, Homo sapiens
tttctgcttgagctctatctgccctatgctgctgcaaactgggagtgtcctcaggagtaatgctgtacaaatttgaatctcctccactatacttccccttctttcatgatcagatctccagtttctacttgctcttgattgctttcctctgttttcaagtcattctttaaaagtattttttttcccagggtttataattgctatttgtggaaagattatttcagtgagtttgctgaattctattccaccatgtccagaactgttcacactcattttcattcattttaaactgggcgttaaacacagttgctaacttaatacacaccttgttttagaataagatagaaactcagtattgtttcagtcacatacacttgataagaataggttatttgatggaaagctaagagctaatgaatgtttatgaaggctggtgaaagggatagccatatttctactgttgtctcttttcctctttattggcagcaacctgatagacagcagtgggacacatggtaccaggtgatactggaagaaaatatcatttttcagctgtctttgacctttacccctcttgatatttctactctgaggaaaaaatactaaaatgtaattgttggtctcaactgcttctgtctaaaaatagatagggctgttggacatttatctttaaatggttaggtaggaccagctcaagtccaaaagaccctttaggatcattttacaaatatttgtttgtggctctgactttagctaagcagattaaagaaaaggtatattcaagagggaactacattgaattggttttagagatggcacatacatcttttaataagttggttattttgtattgccagcacaagtataagggacagtgcagtttaaatgcatttattaaagttgatttttcttttgaatttgaacattgtccgttttgttttaatgtaaatgtaactgtaagaagttaggttttaatatttgatcttgctcctttaggaagtgaatgcattcaaaacaatgtt

SEQ ID NO: 72768 - DNA, 1024 bp, Homo sapiens
gcatggtagattagtcaaaaaattgtatgttgaaaaaggcagatttttgtttaaacagttggaaaatatgtaaacagggctttcaagttgtatgcttaggggagaatagcataatttacttagcgttttttctcgtaggaaaaactcccattagatttttggttgtccctcaacaagaataagctaaacttcttacactgtttaattattgtgtactgaagagttgtctttatggagggcaccatctgctggttgcaagaggtagcagttgtggcgaagactgccttctgtagttatatcagactctttacaaaatcttatgttttcctttgaattccacctcaaacctggagtgaaatcccagaaggaaaaacagctttaaattaacatggcccagtatggattctagtagtggtttgatttgatttctgtgactgtgaatttttaagaaaaatcaacatgaaactggcagatgccggtctttatttgttgatttggatgcctaaatcaactaaaaaataggattgcttattgttatgattgctcttgctctttagtcagtactttgttttccttttctattcagtgaaaatatcttacatattttttactacagtctcttgtttagttacatctatgaacatttatttatgtctgataatattaaagaatgaccatttcattgatttttcttgtactcagtgtgattaaaagattctcatatatttaattaatgatcattttatttgaactttaaaaaaaaactttagtattagaatattttcttttcttttttctttttgagatgaaatctcgctgtctcacccatgctggagtgcaacggcacgatctcagctcactgcaacctccacctcccaggttcaagtgattctctggcctcagcctcctgagtagttgagactacaggcatgcgccaccatgcccagctaatatttgtatatttagtagagacggggtttcgccatgttgtcctggctggtctcaaactcctgacctcaggtga

SEQ ID NO: 72769 - DNA, 1335 bp, Homo sapiens
ttgacatcctttcttaaataaaaccatgtgactggagtggtttaatgacttaaatggaaaattaaattgtcatcttagggttttctttaggcatatactttttcttctcatgaaaggattagaaatattatttttaaaaaagatggtattcttaaggacatactccttttagtccagttgtacaagtgagaccagaagtttccacaaatattctattggaattcttccaataatgactactacataagggcaatttaatctttaaaaatctggttagcagatattttgggtaaatgaaaaaatattttagtaagtcttttaaatagaagtttactttgtagttttaggagaattgtgttctctcaaatagagactttctgcagaaaaatgaaagtatattcatttgaagttaaccttagcaattaacatgacctttatttcacatgactgtagttttacatggagcatttcattatttgattttttatttttgtatagatggttgtgaaaacttttatggatatggaccaggactctgaagaagaaaaggagctttatttaaacctagctttacatcttgcttcagatttttttctcaagcatcctgataaagatgttcgcttactggtagcctgctgccttgctgatattttcaggatttatgctcctgaagctccttacacatcccctgataaactaaaggcaagtactgatttaaataactccaagattgaccgatactttgatttatctttctaactaaaatgggagttaaggtatttagatgatttccttggattctttgacattagctacagtaatcttttgctaaacttaatgtttttttttttttttagaacttatttttgaaaaactttctggtcttgaggttaagaagtagattaatacagtgtgtattttttttatatcatgtcatcattagctctgtttctttcattataattttgggggcaattccttttcacttttgaaaatccatattgaagaccatggccattatttaaaacataatacctagtataaacatgagtttataatatataatcctcatttatttaatggaaggtgtgatataaattgttatatttgtgttataaattgtgttatacattgttatgaagaaaatacaggccaggcgcagtggctcaggcctgtaatcccagcactgtgggaggccgaggcaggatgattacttgagttcatgagtttgaggacagcttgggcaacatagcaaggcgttgtctctactttaaaaaaaaaaaaaaaaaaaaaaaggaaattagccttgtgtggtactgtgcacctgtaatccca

SEQ ID NO: 72770 - DNA, 1015 bp, Homo sapiens
aggatgtgcaacctgttttgggcatgcttgttttaaattttgattggtgaaagaatcttaggatgagggaggtagagggcaatatttgtcatttaaaggtggtattgaattgtaagatttgagaatggtcggagacttaaagtagataacatgagctggtccatgtagttgtatacccaggtactagcttgatttctaaatgtgaatttctcatttggagatacttaattggtttaaggaatgattccatttgtttgatagtggctgtggctctcccgtactagatgtcttgttggcattctcatgacgaggaagtctaacttaagactgctactgtacaatttatttatctctcttggggatctttcagtttgcataatcaaggacctatttcagggctttgggggtaacgagaaattctccctaaagaatagctacatatctgttctgtttctaacaggacaatttatgagaagactgtaaaagagctgaaattagggtctttgtgcattattccctagctgaaaaatgttaagtatttggtttttctgatgaatttttgagtcttattctaaatgcctcttttttctttttgggggatagtacttaaaattactgactttgagggtgctttctaaatatttaagagatttcacttcgtcttgattagcggcaaattcgtatatctgtatgtctatatattttgtctacagtagtgttgtatacagattagaaaattgtgatatttgagccttacctttccactttcagttagttattgtcatcagcaaaccccttttatacagttggcttcatgtttaggcagtaattggtgaggttataagtgactgttgtctttccatcgctacatagggtcaatatggcgtgtgtactctttcagcaatccaggaagggttcattcatagagaacatattttccacagtactactatcaaagtaactttttttgttttaagtaacctttttttttaaaaaattgtgttttaggtgcagg

SEQ ID NO: 72771 - DNA, 1061 bp, Homo sapiens
aattgtatagtggtgaagtctgagcttttagtgcccctgtcacctgagaagtgtacattgtacccaatgtgtacacaatgtgttttttgtctcttgttccctctctgccttctgattccctgtagtccattatatcactctgtgtgcctttgtgtacctatagttttgtttccacttataaatgagaacacacagtatttggtttcccattcctgagttacttcacttagaataatggcctccagctccatccaagttgctgcaaaagacattatttcattctttttatcgctgagtagtattccatggtgtatatataccatgttttctttatccactcatcagtcagtggacagttagattggttccatatcttaagcatgctatttttaatcctcattatagtaggtgtgttatattagtggaataagacaagacatacaatataagaggattggaagaaactgaactgaaatatgattgtgcagaaaacacaaaatggtgtacagacaaatttatagaaaatataagaacattctagaaggttgtgagacataaggtacaaaaaccttctagcataatttcaaaaaattttcatttgtagctttaacaaagatgtgaggtacttagaaatttaaccgtaatgtgtatcacctttatgttgaaaattgttataattgactgaaaagcataatagaagacttacatatgttgagagatttactgtttatggaaggggagacttagtatcataatgatgtcaatcttctgcatactgatcaataattcaatcaaaaatagaaaccgaggccaggctcactagctctctctcattatcccagcactttgggaagccgaggcaggggaatcacttgagctcaggagtttgagaccagcctgaacaacatggcaaaaccctgtctctagaaaaattagctgggcaagtgacgcatgtctgtagtcccagtgacttgggaggctgaggtgggaggatcgcttgcagggaggtcaaggctgcagtgagctgtgatcacaccacggcactccagcctgggtgacca

SEQ ID NO: 72772 - DNA, 1030 bp, Homo sapiens
gagtaatctgcttttttacagctgcccaaaactcctttgtccctccccgcctatgggatgcccatcgctgcccacactagaacatagttcattctcttaggatattttgtgttttttggacctgaagtggaacagcttgtatttgtacttaactgaattgattttgggactagatctagagtgactctatctaataagcatttattgaccatttctgtgtggtttacattatgttatgaacaaaataggaagagaatataattatccttacgtggatggaatcttagatccagtaggccagttagtcctaaaaaaagaaaagtggttttgccttctctcttttattccaattgagtcttagttttttcattcatttactcaagtagcattttgaatacaggtaatattttgcttttcatagttagagatatataatatagatattgtttatgtttttcagaatttaaacaagcaagcatatgatttggcaaaggctttactgaagaggacagctcaagctattgagccatatattaccaatgtaagtcttacttgtaattggttgtcagaaggattaaactgaaaatttaaagacttgctagaagcaaaatttcatcagatagtatatagttttaaaaacaacaaatttgtgttgttttaacccttaagtaatatattttctttctccttcttaaaattattcttgctttatattttttggaaggcttgctctcatcctatttgttcttttatcttctttcaaattgcctgagaacttaaacagttttattttggttagcaagatattctgtttgtttctactgatagaaatagagttaaatgtaattagataaaacatatggaacttttcattattcagagacgttgcttacaggtttttggagcttaaattgatttgtacaagaagaagatatgaactaatattaagacctagaaattgaaggcaagtatgaatggcagtagtgatttagtaaaagttgcttatctattgctattcctggggtagatt

SEQ ID NO: 72773 - DNA, 1019 bp, Homo sapiens
ctccacctgcttttcagtttcactcacctccagacaagtaaaggatataaatttgcattcctgagtaaagtaagaaagaaagcctttaataattacttatgcattctcctaaaatttgagggagagtttttcttgtagtatacacaaatttaaagtcagtgtatgaaatatatcatgaaaagatgtactttgaaaactaactacttcataaaacagtaacttaataaattccagcttttgtttctggcttatagccttagagaatcccaagcatacgatgatttggaaaaattaatttaatttgtaagaaattgttttgaagggtaaactttcagaagctgtggaatcaaatctgtaatctatcttaattgctccaagattttcagggaacttccaatactggtttctgcagttttgtaagttacgggtactggctgaaataaattggttggattgagttttttcatcattggcttagtggcacttgaagtgtgtagacctagacttaaaacattctgtaattatccttttcccttgcttcaagtacttctaaatgactatttccatgggccattagagcacactaggtgagctcctcctggtggccatttatttaaactcatattgccaagccagtttttttttttctttttttttggaggggaggggggacacatcttattttgatttctttttctggcataaaaataagaaaagaacgctatactgtattgatatctctactgttattggggaaaatcaatatttgattggggcaattaaaggaaaaaacccacaataaatgatgatacttgttagagttagatgattaggttcgttatactgttctctcaaattttgtatgtttgaaaatgtttataatggaagttaaataaagaaaaaaaggctgaggaaatatttttaacaatcccagaatacatcaaggtaaaaacatttctttatcacttataccttgtgttaatttcctgttgttcttgcttgcagaaatagaatccttc

SEQ ID NO: 72774 - DNA, 1050 bp, Homo sapiens
ctttatgttcaagtctagtattgtgactggctcattcacttatccattgagtcatttgttggaagtgccaaaatcaatagtaaaattgagttcacatccttagggtgcccccaatataatatataaaacaaatttgagttttcacaggtttaaggcctctttttactgttgagctccttttagaaatctggtctgtgtagatgaagtgtcttactgggagactgtagcacatactaatagagctaaaaagtttattcacacagagttttctgttttctgtaggcctggcctctgtcagtgtctgttctgaaaaaccacacatagtttttcaagggtcctgggtaggttttataagagttcattttttattttaactctgaatagaaataaactttaattgtaggaggggcctctaacattggaacaaactttaaagatgtattttcatgaaaggtacttctttaatggaatttgagataattagagcatttatgatgacatttaattttgtgaaaagtatagtgagcatttttatgtaatttttcatttagagttcatgaaagattttctgtggaattggagcatcagggaaattatggcaaagaatgggcagccttattctgaatatctactgcatggttttaaagctgtgattgtgttttattttagagcaatgataatgaggagcgcctacaagttgttaaactactggcaaaaatgtttggggcaaaggattcagaattggcttctcaaaacaagccactttggcagtgctacttgggcaggtatatgattttggtttcccatttaaaagtaatacattattctactgaccgtttttttaagaaacattatccacatttaaactgtgttctctggaatcataaaaatgaaggattttttatgttgaaagttttgaaagttgttaatgactggctatatttatatttactctttttagtctttatcctcagtaatttttaaaagataatacattttaaagctatctcttatggtattatgaccatgaagttaatattattactttaa

SEQ ID NO: 72775 - DNA, 1172 bp, Homo sapiens
tatgcaaactattttctttatgaccttacactccttcctcagtttttagtgcaaggtaatggtagtgagtgactgggctcattcccacccaagccataaatgaagcagtaatgtacatataactttagggatgggtacaggttttacgttccattttcatatactgtatttgaacagtcatatctaaaaataggtatgtgtaatagttataattttagttcataggtaattgtgttacaaggatcttcattaatttttttcaaagaaaactttaaaaagctgttgaattttacacatttaaaaacaatttctactgaaggctaaaaaacagtttataaatttatataaaaaacacattatctgaatataatcttaatattttttccattccaggctaagattagatcttgtatggactgcagtcatttattagttaatagagctctaaatcctgcttatagtctgaaatgatttgataggttattagtggagaccaaatgattttgcctgtagcagatcagaatgagaaaattaagaagcaggtcacactaaaattttaagaggcatagatactaaaaactggattatctatgaaactttatagttgtttttataaaattgaagttgtacttcttgagggtatggcatcagtgcacaaagaattacattatgattttgtaggacttttttttagtacttttagccaggtctgttttcatgatgatgcctatgaaaatgcaaaagaatcttaagagtttctttagttttgacttagaaatttagaacttggcatttgaaaggacctggcatattttaaaactctgtattatacagataaagaaaaaatccctggtacataatgtgcccaacatcctgaagatggtagttgtcttagctgggtgtagggctgttttcagtacatccagctaaatcctgttttggtccccttctatctacagatagaaggttttgatttggaaatctcatttccacttagagcggcaggaacttctttaatatatgttctttacatagttttagaattttatatacaactttagaacattagaaaaaaatcaatacaatgccttctctgcttttttgtagactacttgttgaacggatctttgctcaatacatggttcctcacaatttagaaactacagaacgga

SEQ ID NO: 72776 - DNA, 1027 bp, Homo sapiens
attttctgtttatgttttatacagaaatagtgaggacaaggttgtagaggggagaaatacacatttttttttcctacctgctgtatttcaggcactggaatttgtattatgtataactgcttttgtgctacagtggaaaagtaggttgcagagagatctgattgcccacaaagcttaaaatatttactgtccggccttttacagaaaaagcttggcaaccctggtttaagtgacatttttcctgttttacatatgatgaaataaatcacacaaatgttaagttccacagaatcacacaaggaataagagggagccaggattcgcactcaatcctgcttggttccaaagcttgttctttttccactacacgtagtaaaatacattactctcatatttacttttattacttgtaaacttttctctggaattgaaatacatcctaaaattgttggtttgtcatagcctaattggtggctctttttctcatggcaaaattaattgatggcctcttaaattggatgaaatatggtatttatatcatatttgaaactacctattggaaatcatagtaaatctagacttctctactcagcccaactgtcattcaagagtaaaaatgaaatgtcacttttaagcaaaaatgaagaatttgccagtcctacttgaaaaaattactaaagaataaccttattttggtaagaaaggaaattaaatctataaagaagtaataagattcaagaatttgaaacacttctataaatataaataataaaggactgtaaaaacagtaataatacagttttatttgcaaggggtgggagtgtggattaaaaagtaggtagcatgtaggccaatatttagccagtaccatacaccactgcagtactatgtgagatttcctgagtgtccctggaatcctccttcctatggtcctaccatgcctgggcagggctggaatgtctccaggaccttcttgcactgcccatgattctgactggttgatgcctgatgcctttgtgaaaaattt

SEQ ID NO: 72777 - DNA, 1014 bp, Homo sapiens
aaagtaagcttcaaaatctaggcctttcagaagttagaatgattgagcatataggaaagagagaatacattgactttggagttcagaagtaattttacaaatgactaccccgtttctttgaaaattattttaatcttacaactcttgttagatttttagtcctctggagtatgaacattttgctttcaatgtttatattcttgaactgtgcttatgaaaatttatacaacttagtaactttaaattagtaaagtatagctatttaaaatataacttctaagatgaaaatgtcctaataatgttgcttttgccagtaccattttgacgtgactactataaaggaattcaggtgtcccaaatttgaactggtttatctcctttaaaaaatccaaaggcatttttcaaacatattgttaaagggcagaattaaaatattaaacgatgttctttgtctattaaaagaaaaagagtttcttatatgcctctgtgttactgctttttggcagtgcttcatatgtatggtaatagaggttaatagaagtgtagaataattgaaaacaaactgatgaaaagttttccttgtttttggagatttccttaaaaatttttaattgtgtggctctaatctgtaaccaagtgtttcattaattattctctatatgttaatattatttatatattataatatattaaacgacattataatacaatattgttgcttatatatcgagtacctgtatgatttttttagatttaaatttctgcctgagaacaatacaactattaagagaacatcagagtttttgacatataaaaatattcacttataaataattccagactgtttacaatttaaataagatttgtcttaagaaaaagtatccccattctctcataactaattcttctttttatgtttttgattccatttcatccttcctgctacaacaccttacgctgtcagttattcctttatttctcaaatttataatttctccagttaattcctaccct

SEQ ID NO: 72778 - DNA, 1046 bp, Homo sapiens
atgcatgtatatgtaaactctctgggttggtttaatgataaacagggaaatacaggaaaatagttcttaaaggtaaaacttagtgattaatctcttaaattataagagagcaatgtatgcaacaagctcaaggggacagtaataaaattggcattattcaggttgacatttgatgcctttaaatattacaagggattacttagaagtagccattttagactttccttgcatatatgtcccttcacaatgctcctgttttatatttctagaaaatatatttttatgtgtgaaaattgactgttgaaggtttttcacaatttattttgttaaactaaactgaatttgtacgtaaggattttaaggcaataaaaggaatgaaaaatattgacctattattattttaagaattaaaaaaaattgattttaattgaactttaatttattttaaggaaatttacctgatcctggtaaggctcaggatttcatgaagaaattcacacaggtgttagaagatgatgagaaaataagaaagcagttagaagtacttgttagtccaacatgctcctgcaagcaggctgaaggttgtgtggtaaggagagaaaagagctgatgtttgaaaaagcccccaaatcttctttattgtttctctcttttataaaagtaatttatattcattatattaaatttgaaaaatgtcacataaaaatgcagataaactataatttctctatagagacaattgttaatattgtggtgtatgtccttctaaaatgagatattatacatacagttttgtacattttactttttcattaattagtcttttatagtatttaatagctccatagcataccactgaatacatgtactataatttgttgagtagtccactaagttacacatttagattttttcctactttttgattactattaagaagaatataattaatatttttacacagtcttgattctttctttaggataaattctaagaagtacaattgcatgggctaacagctcatttttaaagcctttaatatgctt

SEQ ID NO: 72779 - DNA, 1196 bp, Homo sapiens
gacaagaagtagaagcctctatatttgtaagaggaagactctgaatcagacaaatttattaagtaagtaatctcatgccttctctattcaaggcagtactctttaggtactggcaaagcatagtgtgctgttataccttctgtcagtagtggaataaagatttcaaatcaggagattatattgtagttcagtaagattattgcaaatagagttcacagtattgaaagaggatatctctaagggataatatttcacctaagaggggagaatgggtaagattctgtttttatagaagtgccattcttgccattgaggttaacataaattaagctaatttgatagtaaagaaaagggatatttagaaaatgattgccatctatttatagtgtaatgtggcatcatataaaactgttatgagatgatccttaaaaagccagatggggagcagattgtgaaagcctttaacattgagcttccttttactttatctgttgagaactatggatgattgagatgatggctaggaggagggaagtagaagagatagattgccaaggtgttttaattgtctatggctagtagtggaatggaaaggagacaacgtacttgaaggaaattttaaaacaacaacctaaaaaattgccagcttactgggtatggggaataaaggcaaggaagaaccagaaatattaggattcaagtccaaatgatgtggagaatagtagtaccttgaaaagaatgaaaggaactgtttttgaaggaggtgagagaggttgtgcttcctacttgtacatgacaaacaattaaaaaaaaatcaaggcctatcaagtttaatgtgaaactatgagaatggattaatctgctcagattgtatagaaagaagtaaaaagatcatagacagaactttggaaattttttttacagtagagaaattgtagaaatgtaagaagactaggttattgtaatgttttgagttaagatggaggaggttttcagaagtaaagtatattgtggacaaagagactgaaaaccaggaatagatcttggctttaggaatcagaaggtcatagtgatctagaaggtatgtcaaaacataaacaataagaacaagtagcagttagtgctttataatgtgcctggtgttactctaagaatttatgttttaactaacttctttctccaaggataggaactat

SEQ ID NO: 72780 - DNA, 1032 bp, Homo sapiens
ttttcaatatatattttatattattttatccacattctaaataacttttacccaggcattgcaattttattgctgcctattgtaattagaacctaacactaacactgttagtgcaaataaaagctaagcagaaaattcataaaatcctactttgtaattttagttcaagagccttgagtagagtcaaaacaatttagaaattattctgatgctccttgacataagtacttggacttaatatctttgttttagaaagttggtacttttgtcatattttcatgtattatgttaaagacctgaaggagaaagaaaagtagtatatcctccaaacaccatctttcctgtagatagcagataatttaatttttgtgtatttggggatggcggtattttctgtagtctgtgtttgtatatgagaatggcttcaataaattgatgttaatttataggaaagttttctttttggttgctctccttttcctctcaatagtgatgagagaaacactgatataagttgaatttcagagtagttctttcattttgatattgtatctgctgttttatctttacaagaacctctgtagtcctcctcctatgtagcatttggttggctggcttcctgagaaaaggtttcttagaaatatctggcatttttgaggttccactaatctagggcctggccattaattttgctttttagaaatgattttgttatggaaaattaccaaacttataatctaattgaaaaaactacactatgatatttttgtttataatatgaacaataggctggcaagatgtgcaatggaagtactgagggaagtcttcaagaatagcaagaagtaaactcatttaaatgtatttttgactaaatgaagcctcacattgccctaatttgttgggaaagaacagttttgtattggcctttcaagcctacaattcttggtgttcagtgtgggagaatagagcaccagtttttcattaaaatgtggcattaaaatgtctaatagaaaataaattcacttgtttcaa

SEQ ID NO: 72781 - DNA, 1028 bp, Homo sapiens
ctctcttgaccagaactcattcatatatcctcacttaactgcacaggaagctgcaagtagagtcatccttatgcccaggaaattgaagtggatattggtgagccctagcagtctctaacacattcatgtatatggtcataaactatatgctatgaagtctgtgtcgaaatgtttctttaccctacctctaaactgaattgggcaaaactgaaaatgtttgaacctgatgccttctggacatagataacctatagaagtctaaatgtaatcttgagttactacttatactatgtatatttattgaaatttttgtagtttttataatttgaattacaaaataaattacaaaataaattttgtaatttgaaaatgaaatatgtaaacagtttatttgtatatgtgtagagttgaaatatattttcctcccctcattttcagcctctgcataagagcctagatccaagcaacctggaacatctcataacaccattggttactattggtcatattgctctccttgcacctgatcaatttgctgctcctttgaaatctttggtagctactttcattgtgaaagatcttctcatgaatgatcgggtaatttatattttttagattcatgttctttgtaatgttaacttttgcaattttatccaacaaggaaagaagtgaaatgatatcaataatacttccatttgactgccttgattttaggttttcctgtttaaaaaaaataagccttgtctccattataagcaaaaccatcttgaaacatctttttagttgagaataggcatatgacctcaaatacattccttgataaatataaaatataacctgatgctatctatttcagatttacaggggtttaatttttgacaggacatctatttttaaaaatatgcagattggtaaaccagctcatagtatggttgtcatgattatagttttacctttttctatataaacttgttcttttccctacattgggagagaacgaaaaaacattgggagaggaaataatgatt

SEQ ID NO: 72782 - DNA, 1382 bp, Homo sapiens
tgttttcctcaccacacctgctttcattcttcttctgtgcttagcacagtagttgtgtttgatttattagcaagctagaacatatttggtgcctcatctatatataaacatttctccaacaaaatccatagtagaatatgtaaaacctaacaactaaacatacagacagatttcttctacgcttgactaagacttgttttatttagaatgagggaattaaatgacttgagtgacactagcattgacttatgtttaaaagaagaattttgtagtattagacaacatcttccaaagttaaatgagcataatatggtgttcagtattgctaaattattttctgtattagcctgctcagactgctgtaataaaataccaggcttataaacaacagaaatttatatctcacagttctggaggctgggaaatccaagatcagggtgccagcatggttgggttctggtgagggccctctccagggttgcagactgctgacttcttgctgtgtcctcaaatggcagaagcggtaaacaagccctctcaggccactttttaaagacactaatcccattcatgagggtttcccacaatgacctaatcacctccccaaaggctccacctcctaatactatctcctaggtacttgcatttcaacataggaattttgggggacacaaacattcagatcacagcatttttttttaaacttttttgtgccagaatttttaataaaattagatgtacagaagattttgtacaaatattttaaatgctaatctatattcattctactcatttttcagtaaaccagatatgtcacgtctgagacttgctgctgggagtgctattgtgaagctggcacaagaaccctgttaccatgaaatcatcacattagaacaatatcagctatgtgcattagctatcaacgtaaggaaatggctgtgtacaactactttttgaaggtctttgacttttaggaaggaaaaacatccactgtgatacatagattaaaatcttgaatgtgtatggtttgtttgtttctgaaaaatttatgcatgagaaacatttcagagttctgaaactgtcatttgagttttgggttgctaacatagtacagttgatcttcttctttgtaatagttttgttctataatgttatcacaggcattcagttagcagatactgaacagttgctcttaggagaactcacagaatagattccttcaagcccctggccacaacattttcatcatccagttaatatacagccttgttttatgtatgtttctgtttaaagactatttattatatatagttgtctcaactgaactcacagccaacagcactgtaactcatacctgaacaaagcttatctagcacacacat

SEQ ID NO: 72783 - DNA, 1868 bp, Homo sapiens
aagaagtgctcagtatgtgttagccattcttattttggtgcacctttcacattgaagtgtagcttctgtctctgattatgctttagtgtgagctctttacctagtcttactcatctttatatttttagattctaatataggcctggaacatagtaaacagtcaataaatatttgatagaatttaattttaatttcaccagattttgaactgtgttacctttttctttccacgtcggccttgaaatgaatgatgttacacacaaactgttctctgtagatttagcaatagaaataaagaaaatttgatgctttattgacacatatacatgaggttaaaacatccaatttatatttttatttggcaaataggaaatataaatggaaattgtccagaatatgagtcccagtctatgtgtaccccttattaaaccaattaggattaccattctgacctctttaacagaatatgtttatctcagccaacatacaaaaataattgcatttaaactaaatagctgtttctttatttaaaatgccctagaaactcttaagtctgttcctttattctgtttttctgttacaattagtatcaacctcttgttgttccatattgactctgaaaaatactagatgttacttattttgctcagcagcttacaagagagtgttaaacatagggtcatttctaataggaaaaatagatgttttttctctcactcttgaatatagtttgtttgggtcactttttccttacgtattttaaaactgaaatatttgtttttgtagcctcagcccatggtgtatttagtaggccatttcaatattgaacatggtagatgaatgaatagactgtttatcatgtacctcaacacagggtatttcaatatatttttcttcaagtcattgtggtgaactgttgggatgcagaaaatatagtacgaaagaaagagtatgtaagatttggttttctaacctggatatttttgttttgttttgttttttgctttttcttttgtttttttttgtttgtttgtttgttttctttttcagaaaaattattgtctcttctaccagagtatgttgttccatatacaattcaccttttggcacatgacccagattatgtcaaagtacaggatattgaacaacttaaagatgttaaagagtaagactttttccatcccattttcatattttctgaaagttattttttctccttaatgctgataattggatctcaattataattagtttattgatgtatttcatttcttaggtgtttaaggttctttatttgctctcttgtctttcttttttcataccatctctttatattacatttttaatgtagtttcccaaaacttaatcataattattatagttatgtttctgtaccagtctggtgttccttttctattgaagtaattcattaaaatttccattccatttcttatcttttccttcttccttctgaaactgtgtagattttcatgtgaggtcaattaatcatcttgcttttactcatgtagtaagcacatttttctttgcaataactatcttcctctgtagaaggagaatggtctaattttaacaatgggccaaattcgtaactggggaactactcctacttattacttaattggtgattctctaactagagtttaaaatatttgtaattctttcaaagattattgcttaaagactgaaaacactgtacatgcctgggtggggaataggaatatagtgatatttagagaaatctttaagaccagcataattctttaaataagctcgagaccctggtccttgttcagttacaataaaagattaccattgggatttttaatcaactaatttatgatgccttt

SEQ ID NO: 72784 - DNA, 1810 bp, Homo sapiens
gcagttatattctcttgaagagttcccatcaggactgtagtcagtcttgagtatctgaggcctcacttgatccgtggccccactattcctttgacagtctttaactccctgtcatagctgagggttaagataacttcatcctttctaccatttatgtttcccctttaacccgcctccttggaaatctggtgagattttaagaagggatcttataagctcatatctgcattgttgacctgtttttatatgtttgtatgacatattctttttccctgctggtttgtaactgtttcttttttttttttcttcctggagttatattatctaggtttgttatatttatatttagaattattgtatctatatttaacaaaggatgattttcttctatatttcttttttccttttttttttttttagatgtctttggtttgttctggaaatattaatggctaaaaatgaaaataacagtcacgcttttatcagaaagatggtagaaaatattaaacaaacaaaagatgcccaaggaccagatgatgcaaaaatgaatgaagtatgtaattctttgtaaataattatggttccatattgatttaaaaatttaggtgtaaagtatgaaacttctgtagtatttatagatagcatcaaataattttttctattagtaattagaattacgtagaattagcagtaattttattacaagtaaatgagcaaaaccagtagtgtaagctaagatgcttacacagactgttgctttcattagtttgctattcagactggattcatgttctgaaattattcctagtttacagagtctagattgccagcttaagtatctgtgtttttaaaaatatactattgcagaaactgtacactgtgtgtgatgttgccatgaatatcatcatgtcaaagagtactacatacagtttggaatctcctaaagacccggtactaccagctcgtttcttcactcaacctgacaaggtagttactttacaatttgtttgtgtaagttgaaataaaatgtattctcagcactggattgtaggaagatcaggaaggatcatggaaaaattgctgtgagtcttaagaatgtgatttaagatcagaaccagaatatgagtcaaactggaggacacacataaggttcagatattaggatgatctggtgtttatgttcagttttaagacagtcttagagcgcaggtagaaatgtgatcaaagcatgtgaatctgtgaattaatggccattgttcaaaatgggaaggagagtgctgatagagatacagtctgaagttaaaagccctttattgggatttataattggtatgaggaaacaagcagagaacagacactagaacatgcctaagaccctgggaatactacaagagtgttaccaaaccatgctccaaaaactcgagtgtgatataagatgtaaaaagtgtttcccacagtccctcttactcctttataatttatttatttaattcctcgtaatttagctgaacatattgagtaacagagtctggaaataaccactatcctctttttgcttttaaagcaaaatgccagttaagaccttaccagtgtatagagatttggaacaggcctgtaggattgctcagtagctaaaagggctgtcacgttggtgtgagcagagtaataggaatatgtacatgtggtctttcccctgaagggtgttattaaagaagcatgtgttttctgatgcactcttagagctctaacatgttagagctcaaatatgttttgttaatattagagttggcatgaggttggtttaacctta

SEQ ID NO: 72785 - DNA, 1053 bp, Homo sapiens
ggctggagtgcagtggcgcatctcggctcactgcaagctccgcctcctgggttcaagtcattctcctgcctcagcctcctgagtagctgggactacaggtgcctgccaccacgcctggctaattttttgtatttttagtagagacggggtttcactgtgttagccaggatggtctcgatctcctgacctcgtgatacacccgccttggcctcccaaagtgctgggattacaggcgtgagccactgcacccggccaaaaaagcatattcttatgtctttccatggcaagagtctaattatctattttcattgttgattattcatttcatttgttctcactttttatgtaagccgttttctccagataactaagaaattcaactgttatgctgtctgtatagtttttaatttgttcaagtgatatttagtttatacttattactttgcttaaggatagacacatttttcatgatttgtaagtaaatactttgagagagatgttatttatggttctttacacgtaactttcttttggctttaaccaaataaaaagagatgtgcatttctcatttcagcctaaaacaaccaatgttctaggagctgttaacaagccactttcatcagcaggcaagcaatctcagaccaaatcatcacgaatggaaactgtaagcaatgcaagcagcagctcaaatccaagctctcctggaagaataaaggggaggtaagtgcaaaagaaatgccacaatttacatttaaggattccagcaaggctatgagatctgaaataatataatccaaaatgtttcatgtcagtaaatggaaagtaatgtattacttaatttttccatttaacattggtagtcacaagttcatacttatttgcttgctcattttggatgggtgctctgtcttagtctttcattctttagcttgttgggggtaatctgtgttagtacacataaactagtttccaacctcagtgtgtagcaattgtaaaactgttgtattatggtgtatgatacaatggaatacatagtcattaaacatgatgagg

SEQ ID NO: 72786 - DNA, 1530 bp, Homo sapiens
tttctaatggattagatgtgaacagttagggaaagggacgatttaagggtgtatcctgggctttttacctgaataactggagagatggtggtaccgtttactgagatacagaagccttgaggaagaacaggctctgtttgtatgtatgtgttttggggaagtggaaataagaagagtgttcaaataactgttttggctacattaaagatcaggtgcctattagaatttcaagtgaagtgttgagtagacaattggatatgtgagtttagaactcagcgtagctggaccagagattgagatttagagttcaacaacatataaatagttttaaaaactagataaaggtgagaccacccaggacagaggcctggacctttatatgaatgccaactctatgcctggcactgatttaagtgcttggcatacattggtaagtaaaattgattgacacaagattcatgcttatattctaacgggaaggcagtcagtacgtaataaatgtaataattatagtgtgttagagggtgttaaatgctacagagagaagaaaaaatagaatagggtaaggaaccagggcaggttgcagtgtagaccaagctaaactgccaacgagaaaagttttaattggttctatgatctgaccccaaaatagaatttaggttttaaaaagacttagaaaaatattagatttaaatttttgatttttaaaattttctcactatattaaattaaatgagcttcattgcttgttgagttggtaccaaatatggtagaatgaaactgattcatttttgaaaagaacgaaattttttccataaatctgtaaagctacactaggaacagaaaaagcttgtaaggttatttgattgtaataacaattacaaatgtctgtattaaaaggcttgatagttctgaaatggatcacagtgaaaatgaagattacacaatgtcttcacctttgccggggaaaaaaagtgacaagagagacgactctgatcttgtaagggtgagatatttgcattgattttataataatattaatgataattttacttagtaatgtttacactgaaaccagttaacatgactatcaaatttacattttattttattttattttagtggttttaaccacaaacctgagtttataattatcctctatgtaatttaagtatatagaatctgtgcttcttatcaatgtgataagtaatctcaattgttcagatttttggtattagacttgccagttgcatactcaactgcttggtttttgtattgttttcctcatttgcttgtggttttgttgttgttgttgtttttgttaacataggatatttagacttagccttagagaaggggaatggaatgaggacccttaaaacttctttcatttaatttatttcttgagccttttactaaataagctgctgttaaaggtagaaaatgctatagttctcgtcaagtccttgttcagtttttaaatcttaatagaaatgataaaatgataacttgtatgatagacagtttgtg

SEQ ID NO: 72787 - DNA, 1374 bp, Homo sapiens
gtttaccttttgtatcttgcaacctccatttgtaaaataatagttcttttatgatgttgtaagcatgtcatatagttaatattttatgtcttacgcactatgtggtaaaattagaattacttaaattgactatccaaacagatactttagtatagttgtcatttaggaccaagcactgaatttataatgctctttttaatgagatagctcttcactaaaatttataatttagtaagatactgatcttgagaggtttccttttaagacactctagctgaaaagtaagagtgcaaatgtacccttttatcccagataagtttttaaaattaaaaactataataaaagcaaataaatacagttctggtgtatttaagagctgtatattttaggtacatatctaggacaacattagataacagatttttttgtttcattcctcaaaatatgtatactcacaatttcataaccataaattgtgattttttttttcccctagtctgaattggagaagcctagaggcaggaaaaaaacgcccgtcacagaacaggaggagaaattaggtatggatgacttgactaagttggtacaggaacagaaacctaaaggcagtcagcgaagtcggaaaagaggccatacggcttcagaatctgatgaacagcagtggcctgaggaaaagaggctcaaagaagatatattagaaaatgaagatgaacagaatagtccgccaaaaaagggtaaaagaggccgaccaccaaaacctcttggtggaggtacaccaaaagaagagccaacaatgaaaacttctaaaaaaggaagcaaaaaaaaatctggacctccagcaccagaggaggaggaagaagaagaaagacaaagtggaaatacggaacagaagtccaaaagcaaacagcaccgagtgtcaaggagagcacagcagaggtaagcatgtgtaactctaaactgcatctgtttcgttactatattataaatcataatttgatgctatccacatttgggtcttccccaaagcagagcagaatctcctgaatctagtgcaattgaatccacacagtccacaccacagaaaggacgaggaagaccatcaaaaacgccatcaccatcacaaccaaaaaaaaatgtgtaagttgtaaatattacatttcaaaccaatttcaaattattttgcaaaagttcctaaatttgtaaacatacatattgctgtatttaaattccatatatttagccccattacactaggtaagataaaatttttataaacttaccttagtgattgatatctcaataaactatcttgtacatttttacaggtgcaggcaaatcttcataaatgaataccaaatagtatattatttccta

SEQ ID NO: 72788 - DNA, 1425 bp, Homo sapiens
aaatgataatatgtttgaattttaggttattttactgtattgataattgttaagatccaaactcagtaactgctttcccagaaagataatgtaagttcataaatgtgaaatgttttcatttaccacaggaaacataagtagaaagatgattaatctgtttgagttatttttcttgctgtagacattgacttctgttcatttctctttaaaattattagatagaaaagtaaaataatttttttctttcactgttctggggaagtctgtgagcctgtaagggatcaaatgttatagaggtctaaatatgtgatgccagggcagaaagtaaggataaaaagtttcagggaaaggaaagcaaagaaaatcaggaacaaatgagaataaagattagttaaaaatgattactgcatatcttatgcacatatacccattttaattaagcatctggtgactttccttttaaggtacggcggcgaagtgctaaaagggaacggcgatgaacaaatgtaattaataactttctctgtgaaagctttggaaaaatctttttttttttttttggtcaagcttgaggctgaataaagcctttgatgcacaaaatgggactgctgaagagtggacagttggaccttactttggtgaccccatacatttgtggtcacatgctttagccatacacatggtaacattgactatggagtcttgtgaaagtgtaatgtgcgatggctatgtagacataaagaagaaacttgtaaatatcttttttcttttttttaatgtttctgatttctgaagtgcttgtatagcttttatctgcggctttaaactgacagtacccgactgtttattggatctattgatttgaaaagaatttgttaggatagatcttaagcagtaatctgtcagtgtttgtatttgtattctctgcaattttactgtgaaaaaaaatttgttttcaacaattggtgtcattttcttgatgtcactatttgttggagagttaaatggtctcttccctttgtgtatcttacctagtgtttactcctgggcacccttaatcttcagaggtgctaaattgtctgccattacaccagaaggatgcctctgataggaggacaaccatgcaaattgtgaaatagtcctgaagttcttggattactttacacctcagtattgatttgtcccagaattttctggcctttcatggcaatgaaaattttaagaagaaagatttaaagtattttaattttaaagagtgtgttataaaataatgtactgaattctttatcccattttatcatcctttcagtttttattaatctactgtatcaataaaattctgtaatttgaatgagtttttaatagtctagaatgttattgtgtatagatatttcctcttgaacgttatgttcagaaaatgcaaat

SEQ ID NO: 72789 - DNA, 2248 bp, Homo sapiens
tataacataaagaataaggaatagctttgtatttttgtcattgattaaattgcaccagaaatgtttatggaaatattaagaacattttataaaacatacgaaaaagtgattgtgaaggatttttatttgcatgattatagttaagcaaatttcatttcacatttttgtaatgctgtacagcagttcacaaaaaaatgttcattgtagattttgttatgttcaatgccaatgagtctgtaattttacgacctgtctgttctttttttgggtggattacgatgtaaatttttcttttctttctttctttttttttttttttgtgtagaaaaataggtgcaataatgatcaaagttttgatgtcttgagtctccatcttaggggattatcttacgtttaagcttaacatttcatgtagtaagatttggagagccacatactttacagtaaaattaagtgtgtataaaacattaattgctaacaattgttagcaaactatttcagtgataatgttcattttgaaaatatgtactgtataacattaagaaaatatttaactccctgtaacaagttccattatgaaaatcttattcctcagtgaggttatcttgctgcactctgtagcaaatttgtttaatctacattataataaaatttcttgctgcagtgcaacaggaggctttttcagtgatcttcactgtatatgtaaattacaaatgtggctgtaaaacttattccaggtattaaaggttaaattgctttctatatcttcttataacttgtaagtctgatttttaagatttccttttgtccacttgtaagaatgtcaggaatttaagaatttgtttaaattaggcatatctctgccatcacatagtattatgtcaccataatgaacaattgctatttaaatagataaccaattttcagacacatttttggatttctgtgaagttgaataaacataaaagctaatacagttgtattattttgtgtatgtaaatcaacatatatatttaaatactaaatggagaaaggcacatttgatgatttttaattttggagcctttgtttcatgaagtggaaacacgtctcagtaactttttccaaaccttttgtttaaacttctcatgcaaaatgttggcggacagagaattctaagtattatttaagttgaataattgcgtaactgaacaaaataaatgtataatataaactttaaaaataagcactaaataaataagttgccagtagcagttttattaattcgttcagcaaacatttattgagtgccttctatgtgccaggcactcaaaaattttactcagttttgcagaggataaagtgtgatcaagatagtgtaagtccctgcttttgtggtactttcattatgttagaggtgggtgaataagaaaaaaaaaattaatatatgatgtcagattgtgaaaaatgcagtgaaaaaaaggaaaagcaggatagaaagtactaatgataggtggagaagttattttatatactttgaaacatacagtttaggattgttatatcttcatgatgaagtgatatggtttataatttaaaatgtcacttggtatctttatgaatatttttaatctactttgcttgatattaatgtagccatatcagttttgtttcagctattgtttgcatgataaaacttttccttttattttcaacatacttacgttctcatggttaaaatgtgtatcatgtaaacattttatacttggattttgttctttcatctgagaatctttgttctttaatagtgtttaagctctagtgtagttacttatatagttgattttaaatctaccattttgctatttattttcttttatgccagtctctcctttattttctcctttcctgcctatttctggctcatttaaagtgctttttattattctatctcttccattagctttttagttaaacctgattgtgttattcttttagaattacagtatttatgtttggcttattatagtctgtgattaatgcttttgccaccatccgaacaatgcaaaaagtttaaaacaattcagctgtatctgcctctctagcctttgtgctaaagttgttgtctattttcagtataaaaatgctacagtatccttgttgaatagtcatgttctcatatttacccatagattttccatttttgctctgttctttttttaagaatcattatgtgctatcatcttagttcatttttcttctttttttt

SEQ ID NO: 72790 - DNA, 1019 bp, Homo sapiens
tgctaaggaaggatggtagaagcctctgctgtagtgacacacggcatacagaaaagtaaactgagtgatggcagacagtaagcaggagcagggccacatcaaggactgtgtctacaactggctcagtctcaattgcaggccaagtcaacattgaaaaattccatcacctgcatttttggtaagctggagatgctggtgcctttgggaatgcagcacagggacaaaatcaaagcgagacaaattgcaccagctgagattgttttttcctcttgagtctggaagagtcccactatctagatgcagcttgcagctacagtcccccaaggcatggtgtaattcaagctaagctgcttctagagaagacggtcttaggagatcttggccgccgtgccaataaagtgactcaagaggctgctcagctgcccccagaggtctattatttttatcaggactgtggaaagtgggagttagtaggtgccagtggaagtgaagtaaggtggggagcctagatgaaaatagaagttcaagatttaaaaagatttaagaagacttactctcatggggcagggccatcagcaccaagaaagcagctggttaagatgcaagtgagttgggcatggtggctcatgctgtaatcccagcacttggaggggccgaggcaggaggatgacttgagtccaggaattcaacaccagccaggccaggatagcaagatcaagtctctacaataataaaattttttttaaaattagctgggcatgatggtacatgcctgtagtcctgcctacttgggaggctgaggcaggaagatcacttgaacccaggagtttgaggctgtagtgagctataatggtaccactgaactccagctttgatgacagagtgagatcctgtccctaaaagaaaaaaaaattaaaaagaagaaaccaaaatagttgaagtaggagaaagaaaatggggttacccagagacctttaaggacggaaggtgagaacaagtcctaaggagtttgatctgta

SEQ ID NO: 72791 - DNA, 1075 bp, Homo sapiens
tggcaaaggaaaacgtgaaatcccgagcagctcattagatgagctgtaagatagaattggttacatttaatttcaaagttctctcacatttctctgtaaagggcttattgcaatatagaattatgaactgggaggttgtcttatcttgggaaaatttaatatttcatcttgtcctttaatgtgcttgccaaggtatttaaagagctgagtaaaaattaggatgactggtattagaatgatgaaaaatgctttaagcactttaaaccactgggtgtaaattcaggaagataaggttaagaagcccgcgtatgctgccacatggtaatgtcaaggttgaaatggacatggtgacattccacagtgcaatgaatgacaaccgagtgcaattagctgcctcgtgtagccaggtctcccaagactcatcagtggcactgatgggggtcatatcaacaccgatagatcagcttgtgccctcacctactgacagcacctcctgccttggaaagttccctcaaggcaggtttcagtgttcctggggtttcatgtgtgtattcctgagtgatcactcccctaatagctttgccatgtctcccttctcttctatgttgaagcctgaggaagaggtgtggggaagggtgaaaatgtccccatctagttcatcttatgctctgtgagccatggggaatgcaggctgctagtgctctcaatgatagaggctgcaaggaagcctctctcttattctccttgcaacctttctgttcctgggatgcagtccatgaagatagacatgggatagtccacaggacaaacactgccagactcaaaatagtcgttctcctctggttctgaggtctgattacctggccaagtggatgcttctgttgccttggttccttaagggggattttttacagttaggctttctgttctgtgaaggcaggggccatacttgtcttgtttaactctatatcactgcagggtgggcaaacaataaatacttgttatcgctctgcctgggactctcaagtcttttggaaaacaggttctcctggggctggccccacaagtttgctgg

SEQ ID NO: 72792 - DNA, 1050 bp, Homo sapiens
atatataggcaacagaatcctattcaggcacaaaaagaatgaaatcttgacatttgcaacttctatcattgttatgtcctgtttaacaaactggttcattttaacaaacgcttatagaatgatgcagcagaaaaggtcctaacagatgaagtttccaagttaattgaggcatgatccatgcccttaaaagtctatagcctagcgggagagttaggctatcagtgacctatgacccaccagatagggaggtcaatgtagtcactggggacatgaaggggtggctgggcatcactggatcattaagtacatggtcaggaatgacaccacttaagtgagtaaagtgatatacccccagccttgggcactgatcatttccttgggtttcagaccttatattagttagggttctctagagaaacagaacaaataggagatatatgtggagatttactatgaggaattagctgacatgattttggagatggagaagtcccatgacctgctgtcaccaagctggagatccaagaaagctgcggttgtaatttggtctgagtctggaagcccgtggaaagccagtgatgtagatcccagtctgaggcaggagaagatggcatgagacatcccagctcaagtagtgagtgaggaaaaaatgggcaaatttctccttcctctgcctttgttttattagggccctcagtggtttgcaagttgctcaaccacattggggagagtaatttacaattgacccttgaacaatgtggaaattggaggcatccacacccctgcacagttgaaaatttgcatgtagactcctccagaactgaactactaacagcctaccattgatcggaagctttaccaataacataaatggacaatcaacaaatattttgtattatatgtatatactgtattcttaaaataaagtaagctagagaaaagaaaatgttaagaaaatcataaggaagagaaaatatatctgctattcatttagtggtgatggatcatcataaaagtcttcatcctcaccacctccacattgagtagact

SEQ ID NO: 72793 - DNA, 1024 bp, Homo sapiens
tgtgaaaacagattaaggtggcaacccactaagtaaatattagtttttcaaagtaagtagattaagttaagttaatggtacaagttgctagagcccaaacagggagttcttgatgttgttgctgtgagaggttgaactacatttttcaattaagtctcccttatggtttggaagtatcagatatgagtcttttacatttaatcagttcttggattaaagttgacactagtctaaggctaaagccacattactttcaagaaataaatgtctttggccctttctgagtcacaagcaagaagccagatcaaagcaggctttattttagctgagcaaacatttacagagcgtgacttctgtactgggcaccgtgcttagcatggcagagcatatggatggatgagactcactctctgatcttaaggatcttacaattgagggagatgaggcatgaacacaaaaaactccaacacaacaaatttggagaatttccatagaaaggttacaaagaaaagtccaaggagggagagatgaagaatgagggcttcatggaggaagtgacaactgaaggctgagatatgtgaggaacacattttgggtacctgctcggcagatagcataagcagaagtcaggagagcccagtgtattcatctggcttgcatgtatggcagacatacaaagtgacaccaaatgacactgaaaaatgacgctggggccataaaggaaggacattgaatattagggcaaggagtgtatgcttgattcattaagcattggggaaccgtcgggtgttgttgagggacttaccagttacagtgttctcagctgtaaagacagaaccaaatatccaacgaacagtcatttgaacagtcatttaaacaataagtacattttattatctcacataattccagagttgggtatcccgcagctcagtgatgccagggctaaagtcagcctctattggctttccctttaaggtcacaatataattgtcacaacttataattatcacatcttcacaaa

SEQ ID NO: 72794 - DNA, 1046 bp, Homo sapiens
gctgcccttcttcctagaaagtgctggggtgggatgcccattctcccccaagttttcccggggcacctggggcccacagagctcagggcctcttgtgacttcacagtggaccttttctgacactagggagtacaaggagtgaggtgggaattgggtaagacctgtgttgttctctagacagtggatctggaactcagccatcctctagtgagagaaaagtgtgtattaaaggagggtccacattttcagagagaagtcttgggtggagatttttttcttccagattttacagttctgtcctcagtcatagctgaggcccgtagaccagaatagttacagttgtattctgcacttgtagctagtgaacagtagccagtcagaaaaaagtatcaatgttctgccaacttctggtgtttgtgaaattttgccagaagcaaaacaggatcaaaaataataaacagacctcctccctggcttcttgactgctatttacataaagagattgatgaactgactctgcttgtgggagtgtgcagggaagggaatttttaaggagaaaaggttaattttggggtccttggttgcaagtgatttgaggttttcttcactaattgggtttccagagacaacctttactatagatggtgttgcttctccattataagcagcctaaactatggataagacaacctgacacatggattacatgcagctataaaacttccacagggaaagaaaatgaaccttgaaaacaaaggaataatatgagccttaagtagaacacttatgttcccagtagagggagagacctaatttgtatggcaagcttgggaaatctgggtacgggaggcctgggttctcgagcacgtttgtcctaacatggtagtcatcgatatttttgttaacctctcatgcctcagtttttgaatctatgaaatgggaatactattagctcctactattctgtaatataattgaggaaaaagtaatcaatgtgaaatcaattcaaatggaaggtgtggtgctcagttctagagtgcctgagg

SEQ ID NO: 72795 - DNA, 1267 bp, Homo sapiens
aggtggacggtagttggtgcaggtagctggctggctgtccgcaggccctgccagctgtgaaagcaggctttcctccctttgaggttgcaaggaaaggcctccctttgggactccattgtccacgaaccacagcaagagaggaagtgattgttttgagccaggaggtccttaagaatccttgcgtggatcagaaggccgccccctccttagtacctctcccagtgtcacactgccccttgctgcttctgtgcatgctccatggagccctctttctgtagggccaaggatgcagtgggcggtccagccatctcagagccttcactgggagctttaggacactttagtcactgcctcatgcctgccccaataagggaacgtggccagactccacagcacagttcctgggcagtgcagggtttaggaccccattcaccaacatgttggctgctggaagatgcttcggggactgggggaagcatgattggaagggcccctgaggtgaccctgaggcaagtctctggaccttgttgcctctgtgtcctctccaggactatctcttgagctgggcagtgaccaccacatggggcagaagaaagttctagagaagaaggtctgatgcctagaaagaaggaaaggacaccactggtgaagcgggagatttaaccttctttgaactcctcccttttttccttacttgaactgtaaagcaagtggtttgctaggtgttctgcccttaaacccatgcacccacatcctcatcagcctgaaagcattctggggaagatgcccagaatctatagcaccttgagagaaggtcactagcaagctaaattagaagtggagattatggatgattccaacactcaatgttgtaagcatacaatgttcattccacattttctctccaacacagtggccacatttagtgtgcacctaagaaataaacagacttttttggtttggacccagaaataaattgtggtaacccagcagttttgactgttgatgtttaaaaacctgtacatgcactgtagacctcaattaataacaattagtaactttccctgttatcatgctaaattgtatattctacatgatggatggtgttagagaaatttttgtggtctagtaaacttttgttgcttcataacttcagaatgcttactgcaaatgtttctttcatagcttctgttatttacgtttgttagtttgttaaatcaatgggtcctcaggaaacaagaagtcattccaggaggcctgccaaggc

SEQ ID NO: 72796 - DNA, 1056 bp, Homo sapiens
ttttcacaaagaacactccaaactcccactctggtttgagtggagtaaagattttattatgtttttaaattttattttttgttgagaaggagcctcatgatgttgcttaggttggtctcgaactcttggcctcaagcaatccttttggcttggcctcccaaaatgctatgattacaggcttgagtcactgtgcctggctgagggaaggggttaatctatgatagcattagttttatcaagtgtaaactgtagatttgggggtgggggggaaccttaagtaatgttttaaattaatcagcttgatcaaatattccaaaacgttgttcatcacattcacccataatgcatggctattatgaaatttcctgtcattcatggtgatttaatcaactgtgacttaatagttaagtgtttgtatgtacattttctatctttttaatggattaatgctaaatatttcaacatttggaagggtaacgcataggcatatctagcttctctagcccactctgcagccccagttttcaatgcttaattcactcagtaaatatatattgagcatttactatgttctgagcactgcattcactactagggatgcagacattaaaaatccacttcctaccctcaggagggtttcaatccaatgtaggaataaaactgttactttgtggggcttaggtgtaactttagaaaagaagagtcagtgtgctccaggcagaagaacacgtgcaaaggcactgaggcagagagtgtggtgcatttaaggaactgccagttcctctatttcttctatgagtatctgacaagtattggtgttgagggtaagaggaagaaagtgtaccagggccttgaggacagtgatgaagatttaagctaaccactgtgactgtttctggaaaacaggaaccagaccctgctagagacatggcaaagattttgctgataattctcaccccattggcatcatgtcatcagtctgtgcagttctggaacttcattgacagtgtgtggtggcctgcatataagactagatagaggggttttgccagatag

SEQ ID NO: 72797 - DNA, 1050 bp, Homo sapiens
tctgctttagagaattctcctaaatcttctctacccatttatcatttagcacatactgctttgtagtgataaaagtcacatatgcacatcttgctggctatgcagtgagctcttgaaattccaggcttgtatctcattcctcattgtgtaagactatatcttattccttcttgtatctacagcccccaaaaaagtacctaccttctaatagattctcaatgatcaccactgaataaaatttgaacccttttgaaattttgcagtgcttagcacaatgcatttctaatagaaggtcttagattaaggtatgggtcagttccagccaacttcagtgctttacttacagtgtttatggattgcctgacctgctgtactctctactaagggaattctcaataactataatataaacctaatcaaaacataattagaaggcaaactactgtaaaaaagccatcatctaatgcattcctaaaagagatttggggattatatctgcaccactggttttctccttcaggataattaaaagttgattgaaagagaattgcttaaaaataaagaaggtgactgtttctttttcagtaccattgtcatgattgaaatgtggatcttgagaaggcacttggctagaagtaaggggcacatcgcaaatgttatgtccaacaggatttaagaaacatttactcatcttcaattagaggttcaaaggtcacttcctcttagagttaaatgtacttcctggcacatcttcattcattccttattcactcattcattcactcactcacttgcttactacttattcgccccctcacttaactcacaggctcattctttcaacaagcaattttctgggcacctacaataaaccaagtgctggtgatttcagcactcataagctagtctagtgtaagagacagacacatataatttcttaagtaaaagggagttttcagaccatcctctttgcttactattctctaaactaaatctggtagtttgctctacttttctgaccaatcatttacacattagtatcatcatata

SEQ ID NO: 72798 - DNA, 1050 bp, Homo sapiens
cacacactggggcctgtcatggggtggggggaggggggaggggggagggatagcattaggagatatacctaatgtaaatgaccagttaatgggtgcagcacagcaatatggcacatgtatacatatgtaacacacctgcacgttgtgcacatgtaccctagaacttaaagtataattaaacaaaaaaataatttaagttttttttaacatatctaatcttgaagtcgctttgagaatttaaacttattattttccaatctgcaatttttaaaagtctcctcgtacttgtataacagagcaatactatggaaaagagtaccttaaaatttaacatatgcaactgttatattctaataacatttggaatttcgcattcatttcatttttaagacttgcctggctcttgccagtagcattctcctacatattttcaccttacccacgcaagagctgcagtttcactgcaaggcgagggcagatgctcagtcaaaatccttgtctgcaacgactcaggcctgttgttctcatgcatccatttactctgtcttccagataggaaggtccagctaatagtgattatctgaagccacgtttattaaagaaaactctgtctgttggaactttaccttatttatcatgtaaaaaaaggatgaaatgctagtttggaaactcattttcagtaaaaaatgtgtatttgcatgtgttatatgcatatatcagtgtatcttgatgggatcatatatcccctgccataatataagttcttgtctttttcagcattgtactccccagattatgcacaagaaagttttctaaattgaaatggaatctatgaccacataagctaggcatgacagaagggagaggcattttatttctaagtctcatttcatcactatcatcacaacaaatttaacattccttattttctgagaaaaataatctatttgatatcccagtataatcatatctttggagaaaagggattctgctcatttttctggagccacacatggctgtgcatttggggagttccctgcagctaggctt

SEQ ID NO: 72799 - DNA, 1023 bp, Homo sapiens
tgtttgggtttctcttttttttttgctgttcaacatctatattattactaatcattactctaatgtgtttctacattcttggttaacagaattatccagacttttctcatttcatcatacaacctttattctactatgtgttgggcagagtagtgggtgctggtgaaatatagataaataaaattgcaaccaggcgcggtggctcacgcctctaatcccagcactttgggaggctgaggcaggcagatcacctgaggtcgggagttccagaccagcctgaccaacatggagaaaccccatctctactaaaaaaaaaaaaaatagaaaaattagccgggcatggggcacatgcctgtaatcccagctattcgggaggcagaggcaggagaatcgtttgaatctgggaggcagaggttgtggcgagctgagatcgcgccactgcactccagtctgggcaacaagagtgaaactccgtctcaaaaaaaaaaaaagattgcacttttgtcttcaagacactcaacatctaattaggcagaagttggataaatgttgatggctattatttgatagatttgaactataatatattgtactgacagaaaaataagtgagtgcctgaatgatgctatttgttctacaaattttcttcaagagcttattaatcatgtcatctttgccacctgaccccagcctttaggacattcctgacatagccatcaaggtgttcatggtctcttctaccctaatgtcaatgtccttttttgctaagccagtagtctcactgtttcttgacttctactcctagagatttggtatcctacatgctactcatatggctcccttcgaacttagtattccctcgtattgcacagtaagagatgagtctggttcgatggttgtgaatgttctccaggaacattcaatttgaggataaaaagaagtatcaaattctgaatcaaactgttctcaactgtctctgaagggaaaatctcatggttgtgctcttaggctgtaactcaaatg

SEQ ID NO: 72800 - DNA, 1046 bp, Homo sapiens
tatgtgtgtgaccatagatgggctattaagttctgaataaatttttctaatctgtaaaatgaggagataatgctcattttaaagaagaataaagagaccaagaagatcctaaaacttgtgtttgctatcttctcctacgtactatggtatgaaagggaaaagtgctcacattacttctctcctctcatccctttcctttctcaagcaacacttggatcaaacgatggaaaatgttattttcatttttcattaacatgggaattctactattcttgtcttttggtgtgtgatgacacgtgcagctcacagggtagaagatttgaggtggaagggctaaaacatggtcgccctatgatcatttctattgttgcatcacaatagaggataagggttaaattcaaccattttttttccaggtttcaaaaaatgtttttgtttttttttttttctgctgtggccagcagaccttgatttctgttgctaggaaacctggaaggtactttttagtcctcatagaaaccatgttttaatgcaatcactttcaatgactctttattggctgttttgcttggtgccaactcaaagaaggttcacatcaaacccttacaaggtgaacctgatcgtgtcaaactgcgctagccctggggactttgtggaagtgcctcaggggtttcttggggataggaaagggtgggagccagggggcaatacccctccccacttcaagcagagcaattctactttgatctgctttaatgttaggctttctttgaagaaaatgctttatgggagggagtatttgaaaagccttgacctaatctaacacacaagaaagctgaatttctgcgaagtgacttgcccaaagttacccagttcccaaacaccaagactgggattaaacctgagtgttctgattccagatctctttctattaccccacacttcctgctcctcctcaccatgcctacctggtccttcctttcaccatgttccggagatccctggcctgactctgtgcccagaactgtgaaggacagtagaccctg

SEQ ID NO: 72801 - DNA, 1068 bp, Homo sapiens
ccacatttagagttcctaaaattccagataacataacattctggcagatgagaaaataataatttttaaaaggattaaaagtacaaaaaataaaacccaaagaaataagacactcttacaattaagtagattaaaataggtagataaaaagccaagtaaaattttgagaaataaaaagcaatcattatattaaaaattaaattgacagattaaataacaaagtcagaactgaagcaggaatttgtgaatggcaaaatagttctgaggatattatgcagagtggactaccaagaaatggtgaagaaatgtggagggtagaatgaaaatcagcaatacatgtcagacagaaatgtcagaaagaaatgataaggatctgagaggcagaaatttctaaaatttatgaaattcataaatgctcagattcatgtagtacaattaatgccaagcataataaaaagaaatttgcatctagacacatgatagtgaaattacagaacaccaaagacaaggagaagatcttaggagaaaccagaaagaaaaagaacaaatattttatcaatagcaaacttctccaaagcaatactggaggctagaaaagaatagaataacttaagaatgctaaaagaggccaggtgcagtggctcatgcctgtaattccagcaatttgggaggccaagacaggcagatcacctgaggtcaggagtttgagaccagcctggccaatatagcaaaaccccgtctttactaaaaaaatacaaatattagctgggcatggtggtgtgtgcctgtaatctcagctatgcaggaggctgaggcaggagaattgctttaatctgggaggcagaggttgcagtgagctgagattgggccactgcactccagcccgagggacagagcaagactttgtctttaaaaaaaaaaaaaagaatgctaaaagaaaatgtctaaaaagctagatctctgtatttaactaaacaataactatgagtacagttgaaatatagaccagtccagacaaaaatatagagagttttctactcacagatctttgcccaaagacataccaaa

SEQ ID NO: 72802 - DNA, 1064 bp, Homo sapiens
taatcctccttcaccttccctcatcatctccttggccattatgtggtagatgcaagaaagacatttgtttctcttctaacacgtttcccatccttgtcttactggtatagttactgagatagaaagattcagatcttcctaagcagtaattaactcattggcattcattatgaatccctttgagatatgagcctgcatttaaaaacaaaaaccaaaaaactcagtctttgtaaattagatcccatgttctgctgtcagcccagtgtgcattatataccggtggaaataatcagtgctctgtccagccctggaaagtgttaaataaatcacacagttttatgagcttacaacaagactcacttggtagcctctttcttacccaataatcttttactaataaaagcactagggatttataaacactacatgtacttttagtgatcttccaaaatatgttaccctccttccttctgaagaaatggcaggttgacacctatctatctaaaaccatttatccagttctcaaaataagcaggtattgtgctgaactaaaaccaaaattgtccggagtattcataaaatcaggtagacatttaagagtatgatttccattttcttttctaaaagcacttagaatagcctcttcatgttcttacattggtaaatcatgtataagagatatggtttcatcttcttggtgattacggaagtgctgagcattccaggtcctaatgctgatgcctatacctcatggtacaagacatgtgaatgcagttatgagctttgggctcaacagtgcgaaactagggaataacctagaagatttgtgtttgtttattttaatcaaatgtctatgatagttatatttgttgaatttgattaattgaaatgtagatttctggagtacaacaacaagatgctattaatatatgctatgattttttactttatttctttaaatatctatgtaaatacaaaagcttctagtattcaaaataccatattcagagatcaggttaaaatattttcatgatatctggtgagcacataaaagtaatttgcgt

SEQ ID NO: 72803 - DNA, 1016 bp, Homo sapiens
ttaccgaacttaaaaaaactattgactcttttatttattgagatggagtctcggtctgttatccaggctggagtgcagtagcccaatttcagctcactgcaacctccgcctcccaggttcctgccattctcctgcctcagcctccggagtagcggggactacaggcccccgccaccacgcccggctaattttttgtatttttagtagagacgaggtttcaccacgttagccactatggtctcgatcccctgacctcatgatccgcccgcctcggcctcccaaagtgttgggattacaggcgtgagccactacgcccggccaaaaactacttactcttttacttaccttactcatcctgacggaaaagataaaataagatcctgtgtgagaaatgttttgtaaactgtgttgcaaacgtcacaatgacgagaacgaaggagggacagaggaagtggagaccctgttactgtggcgagcatttcagggtcaggggcctgtcaaggaagcatccaacaacagaatccagattgctcaaaggtaaagtcctgcttcttatttaagggaagttcttgatcatgttttacctaatgctcccttgttgagtggtgactgaactggagaaaacctgaatcccttgacgttttatgcaatttatgcaataaattttcaaaggagtgcctctgtggcatttttcatattctgaagaagtatttaattaaaaaaaatccaaataaacttttgaccagatgcaacaagacatgcaagaagctatcgagttgaagatagaacataagaaaaaacaatacacagatatttaatcttgttatggtcaagaattaatggctactcttgtacctttaattaagaaataagaccatttaagttatctctcgatgagcagttaaatgacagcaatattttctttcaccagctcccttctcctgccagttgctttgtgctggttaattttgatggaaagacaatgcctaataggattatttcagacaatggaggaa

SEQ ID NO: 72804 - DNA, 1374 bp, Homo sapiens
actgctgcaccctcagattttaggtaggatgtcctttggggttcacctactcaatatgtaggtaggagagaacctgtgtcatgggaatatgccctggggacttacatggaaatataagcccctatcaaggatgagaaaggatatggagcaagaatatggtttgctttttgtggagggagatatggatgcagattggtgctctctgtgaaaagggtacagtgagggtttggagatctcaggggaagtaacaattaacttagtccctgtatatctgataaaggcaaaggaggagagtaggaacatgtggacaaagatttaagaaaatagatgcagtttgattatcatctacgtcttctcttttaagttctctagggcacaaaaagaagactcaacatcttattttccccagtgagagagaaatattatacagtgatgccctcttaggaacagatcaatgagctagctaaaagcatcgagtattctacctctggaggcagatcagacttgaacaaaaatattaaaagttcctgtacatttctacaggaagatcggattttgttaacaacattagacaaataattgccttctatattgttgaacttgttctacctccttttatgtctgataaatccttggctcctagtctgtactataattactttcaactttccaatttaatttgccgcaatcacaggaaactggactgtacacactaacacctgatcccaacagatttttcacatcttacagagcagtgccaatgaagttgtagcggcggagtttaatcccctcccatgcctaagcaagcaggaagcgacattcaggataaagtcctgcggatcgggactgccatttggttacagttgcactggtgttttctctctatgggattggacctgcacccagaccccctttcaactggcaaggataatttgatcccatttttaagcatactgatttacagagagcagagagaaaacccagtctattctggacacttccacacatgtgtaaaagtacaacaaatctacatgaccgtttcattatggaagacattttattttttaaacagtggtgagttttttccttttaagtcagagctgtgcgtgcacgtttgacagtgagctgttattcctaaaggcaggaggttaggcagcatgttagagtttcatattaaacaacaaagagttttaaggagcgtcctcaaattacactcacagtttcaaagttcaagaattgtggctgagcactccttaccttacaatttcgggtccaaagaggtctttaagtttaaagcagtacatcaaatgtgcaggatttattttcttgcatgaaagtctcatctgtcatagcactccactccccgagaagagc

SEQ ID NO: 72805 - DNA, 1070 bp, Homo sapiens
ggcctgaatctcagagttacagaatcctaatctcatggatgatagggtctgttcattagtcagtcctttattttaaaaagttttctaggagattctgatagtcaggtttgggagttcccgctttctagcatttagttttgtatcttgcatgtgctgtcacgtatataagttatacaaaattagtgtcaggcgaatagtaaacttttcagcatatatatatttatatatatatatatatatataaaagatacacaatattttgtgtatctacccatgaaactccaagttttacacatatataaaaaattgggtgtatctactcatgaactgggagtttcatgggtagacacataaaatatttgttacttaaaaagtagtttggttctacctagagcagttcagtttgactagggaaaaatgccttgttcttttttttcaggtgcagtgtggtgactttcctcatctgttagtgtacggaccatcaggtgctggaaaaaagacaagaattatgtgtattctacgtgaactttatggtgttggagtggaaaaattgagaattgaacatcagaccatcacagtaagcatttcactttgaggccctgaaagtaatttatagcggggactttcagtcttggtcatgtatgtccccccaactcagttgcttcctaatgtatgatttaaataagaattccacaggtagtcttggggcacaggatttgagagctactgatatggatctgttataaccagagcaaagccatttatgttagataggaaataagagcaacagagggtttggggtaaaatgtagagggtgagattaatttcagattacctaataagacaatgtcttagctgaaattagaactcaggtttccagacttcatttttctgagagcagtagtggggatggaaagaaagagaatgattttgagaaaaatgttaaacatggtatcaagtgacttggtaaagagtgggcaactgactgactgggaaaggaggcctgcaactctgggaagttgagaggctttctgtgatcttgcccttgccaagatgtccagctgcatacc

SEQ ID NO: 72806 - DNA, 1299 bp, Homo sapiens
gtctattatatactcaccaaactgaaaaattgaaaggcatgataaaacctactgtagatggggaatgttggggaagagtgttgccagtggaaaagtgaattgttaaactgttttatgaagcagactggtcaatacatacacacatacacacacatgtattatattaaagttagaaaacacattcccttcaatccagaaaactgggaatctcttacatagaaatgaaagcagtatatgcaacatatgtacagagatattaattgtggaattgtttgagttcagaaaacaaaatgtccatcagtatgaccagctttgcaacatccatgccataggttggtgtgtgactataacactgtgccaattgtctgagagggattgccaagatatattaagtaggaaaagcaaaacacagagacgtgtatgatttcctttttttaatttttattttttacaagaaacattgacactccatgaaaatacatttgtgtatgtttatttttgtgttaacatgggaaagactgaaaggaacagatcgtttgcaatgatctgtgtttcagatggtatacagatttggtttggggatttctggagataaggaaaagaaaaaagtagtcacaatgaaacaggatgtgtgattgacccaatttatataaaaacatgtttatctgcacattgagaaaagagtgggattaacaaagttaaaacatgaatggtggttatctcaagttttactttgtgtaataaaaggaaaaccaatgaaaatacaaaagagtggggaaataggcaataaataaatgttaaaaatatctttttctttgtccacagactccatctaaaaaaaaaattgaaattagcaccattgcaagtaactaccaccttgaagttaatcctaggtaagttactactatatagaaattaagtatttttaaagaaattggttttgggctttctttttttaaaagattgaaacccttttttgaaataaattgatacgtgtggaagcacagtttataaaacagactaaagtggagctgccctgcttgaaatgggaatcctagagcccttcctgttttgccttctgtgtcaaataatttcaacaatgtatttaccttttctagctctagggagctcattgatgtacacacagtacattgtattgtcagtaaatttttgttaattatgttggctcattcattactgatgagcagtgtgtctaaaaagtttacagtgtttggagtaaatatttcagaaattgactttgggttgccaaatctttctttgtcactctctttgtttaaa

SEQ ID NO: 72807 - DNA, 2150 bp, Homo sapiens
acctccctcctctcctctttctggtcctctcctgccacctgagcgcagtgcccaacttaacaccgcttcttctcactttttaggaccgcgagtaacccagtacccgcggtgaaggttttgggtcgactttagagtttagttaggaggtgaggaggcctcctgttctctggggttctttttctcacacttaattgtccttggtgtcgctctccgaggatgacagccttgcccctggagcctaaattcccccgtgctgctgaaatgtgagaagcgcattagcttccaacttgagcagctggggtgtgatgttttcgaaggagacagaaaatgatgcagttttgcatctgtctttaaatattccaaggccatgatggagagtgttgtgtctgtatccatccccctccatctcagaagcagccgtcccttctttgtaatattgccctgaatatactgatctcttagtcattttttgtgcacacaaggtgtgtgaggacaccaaatcacacaggttgatttctgtggttactttcagtagtgtggcatgtgggtaaagactaaaggaaaggttttaaacgcagccctaggttttggttcctttcatggtaagaaagagttactgcagaagtgtgtatgacttaatgttttgcgctatctacagagaggctcagaagcgtttaagatgtcagggaaagaaatggaaagaaggagaggagaatcatacattgaggataattaacagtagttcatatttagtgctttgtaaatggaggttttgttttgttttgttttgtttttaaatgcagccaagctttttaaacagttttctctgcaatagatctagtctttgacatactgtaaggttgggctttgggaggcaagacataaatcgagagcaatcagttgagtattgtatttggtgtggggtcacaggaatataacaatatgcttacaggggtactttgtaacacccatgcagtcatttttcagctaagcaattatttttacttactctattggaaaactgagagaaagctgcagctacatcagtggtgtcctgagacatgcattagataatgtctacggtttatgaacctcgtaaatgcacagaaaagttgaagctgtttttttccttttgctagtgtgtcaggtcaaaggagattatctgtctttgttatattcattgctgtttaaaacaaaacacctctttttacttttttgtacctttcaaataaatcatcatgaaaagtcagtgtaagtttgagggaatgtcactaagttgatataaccaagttcttttcagaacactactagaaatacagttttcttgagttttaattttaactagctgcaaataagaggtcagtacttgccatttctttttaaaagaagataaatctcaaactgttagtatgttagcaggtaactgtatttctgtaatttaaaggaacacatttttagttgcagttttgatctaaccaatatcatttttaagttagattatattaggctattttagtaagtattcctatgcttacttaatacattttaacctggtaagaggcagtagagctttcacaacctggaaactgatttgaatgtataaccagtttggactctgcagcagtagcaatgtgtgctgaatcagttcttaacagatggggttttttagatatacggtagactaagaaaggaagtgaaatgtttctcttgagataaaaaagaaatttaactcttcagagcaatgaaaatctgacatgaagtttcagtatgcagacgttattttagagaactttaccattaagcttagagtcactagaaataaagtaatactgagatagtatatccccaaatctacctaagattttgtaactgcaatgatatttggaatttaaagagttaggtttaaaatttctttgtatgtatttaaagaatgcaatagatttttaaatagaaacttttggagaaaagaataaatgacaaaaggagctgtttattactaagttgttaattatattaattgtggagtataaattagtcatttgaagtgtaattttcttgaactgtagatttagggctttattgtccaatacactcatgaaaatgtcatatgaaaatttaagtggattctcaaaaatatgtggaagtcatgg

SEQ ID NO: 72808 - DNA, 1054 bp, Homo sapiens
gattttttaaaattttcagttttagtttaacacattaaataaaaatgtaaggtgaaatagtgaaatacctattactgtgccctgaatgacagaaaagaaaggagaactaatgaaacttcaaaaaaaagaggagtttctaccttaaacaatacctttgtctcagtcgcctttgtcagtatatttttctttctttttcctgtttattttttcttcctatgtaaggatactcataaatacttggtttttaggtgctgtttctcacatgccttggccaaagaattaaaagctgggcagagtgaagttttaagcatgcactaaagtgtaggacttcttcaacagagcggtggctgtaatttttctgctttgtttcccaaaggtctagagacctatttttactactaggtggattgtgggagtttggtgaggaatcaccaatgtgatatgatataaaattagtcatttttattagagatgtatgtattttgtataatgatgttatagttgacttaaaacagtgaaatatggaatggataatgttaggaaggtaggtaaattagtttgtgaataaagttacagtcagagtgcattgtcaaggattttgcattgtagctctactaatgaaagaaactgatcgttaacaaagtttggcttctggaggaattatttaaagtggcaatataagagaatttaactacagagaagagattttgttgattgttttcagttgtaaaactggcgtactacctaatctattacttcttttgtaaacacacttaacatatgtttatataagctttatccatatttgaagtaaaagctatgtaagtatcgtgttattgttgcttataacatggaagtttcttttataaacataaatttctagaaaaatatgtttataatagaggattaatatttacttagtgaaagaattcataatttttttggaatggctttcttatgtgtatagtataattctatgattataattatggaatttaattatagacaaattttttatgaataactgaattcatgaaattttttcatgaaattt

SEQ ID NO: 72809 - DNA, 1051 bp, Homo sapiens
atttgtctttgtcttttttcaccctctggtaaggtggtaagtacactttctattgtgtctaagatagccatgttaaacatggatatttaagtagttatatgtatgaaaagaagtgagtgtctgagatgggtgggtagccaaggactctaatgttatagatttctgacggttttggctgcctagcatccattctttctgctgttaacattctcgattttttgatactcttttagggagtcattcttgatttttatggtctggggcttcactggactttatcctgctttcctggaccagacagagaaactgacgtctggcccaacagtaactggtattggttataaaatttagctgcatttctgagacagcttgataacttctttctgaagaaagaaaaaggtgctttcgctggggttgctgaaaatgttagaatgtaagtctagaattgattgcagtctgcaccatgaagtcagattctacttgagaacagagctgttaaagaggcacctaaaaccaagccatacattgctgatggcagctttggatcccctcaagtcagttttatctccagatgtttcagtgcatcattttgccttaagccagtttgagttgggtttctatccatttgtgccccaatattctaaattaaaaaatatttaaatactaatgtttaaattaaatattctaatattctaaattaaaaaatttagaatattctaattttctaaattaaatatttagaaatatttaatttctaatattctaaattaaaaaaattttaaatactttaggtattaaatattacaggacgaagcataagaaaaatgtttacttgtcaaagaacttgatatatttcaagaaagaagaaatatacatgtttaattaatataaaaatactcactttggctaaataagaacataaggcaacagataacatgaaaaggaagtgattaaaaagaaatgaccagctggtcatggtggctcatgcctgtaattccagcactttgggagtctgaggtgggaggattgcttgagccagggagttcaagac

SEQ ID NO: 72810 - DNA, 1052 bp, Homo sapiens
tgatgatctgaggtggaacagtttcatcccaaaaccattccccctgaacccccctattcatggaaaaattgtcttccatgaaactggctcctggtgccaaaaaggttggggatcgctgccctaaagaatatagtatagaactatttacatagcatttacattgtattaggtattatctggagaggagttaaagtatacaggagggtgtgcataggttatgtgcaaatactataccattgtataccaggaacttgggaatctatggattttggtaaccacagggggccctggaaccaatcccccagagatatcaagggacaactgtgtttgtttacttatcagactgcactagaggctctgaatcttttgaggatcagcacattatcttaccttgctattatgagtatttaacatagtatctggcattttgtggtgtttagtgaactttactgtggatattttctctcatctttggtatagttagtttgcttgtttcagtcatattcagcttcggcacaaatcttatctttgcaggctattctgattcttttaatttctacattttcctcttgctttaacatttcagtttttatttttgagtgggggatgattggtgtacctacatgtatgcagttgtcccttggtatccatggaagattggtttcaggacccctcaggataccaaaatccatggatgctcaagtcgtttgtataaaatggcatagtatttgcatataaccaatgaatatcttctcatatacttcaaatcatctccagattacttataatacctaatgcagtgtaaatgctaggtaaatagttgttctgttgcagtgttgagggaagtgacaagaaaaaatgtacatgttcaatacagatgcaaccatctattttttaaaagaaatattttcgatcccctattggttgaatctatggatgtagaactcatggatacagagggtccactgtaaatacatggtttatattttaaaaaaagttttctggatatttgagactggtaaggagtcagagtgtttttggatctggtcaat

SEQ ID NO: 72811 - DNA, 1022 bp, Homo sapiens
ttattttgaagtacacagtacaatattgttaatcatagtcactgtatattttaaccattttaaagtttacagtttggtggcattaagtgatttcacgttgttgttcaaccatcatcaccatccttgtccagaattttttcatcttcccaaactgaaatcctgtgcccattaaatagtaacttccatttctcctctcccaacctcgggtgatccgcccacctcggcctcccaaagtgttgggcttacaggtgtgagccactgcacccagccaaaagtaatttctacaggactcagattctttagttctgtttctttaatatcatgtggaatatatatatatatacacacacacacacatatatatacacacacacatatatacatacatatgtataaacacaaacacatacacacacacatatatatacccaccatagtgatatttatttaaaaattcattttttcccttgcatttgttttgttctcatagtagagctactcttgattctcttatcttgaaacttctatgtattgctccacacctagccctaaccctgtattttcatagtattccatttccttcatctttattacaaagcttaaaataattaaactgggaagacagtcttaaaaggtgagggaggtgaagagactcagcaggccaagccagaattctggcacaggaaaagaaagaccacgaacactcacacatgtataatttttgttttgtcacctaaaaatcgatttgtggacaacaaaactaatttgttatgtatgattaagcctgatgatttcacttccttactgaatattcagcagtgattttatcccaagtcctcctttatctaaagcaaaatacctgtaattcatcttttccttaagagattgtaaacatgttacattaaacaatctgaattttaacattaaaaaaaggtaaagcaaaaacttctatttatctttcatactacctgtctatttataggcttctagagagcatgaccaatatctatttgaacttattt

SEQ ID NO: 72812 - DNA, 1075 bp, Homo sapiens
ttaaaaattatatatgtacctcacattatatttcttttagatagcattgttctaactgaggtaagtcagttgttaggtcttatattggagactttgggagacaaattcatattttacatgattttatgaactataatagtcacttgtcctttatctttggagcaaaaacgattcatttttatttataatgaaattagaggatattcatcagtaagaaggggaggacagattcagattaagttttgactgggggaagtgacaatgggaggagaccctctaatgcctggtaaagtcaggcctgttatatagtaaacatttgatacatattaattttttaaaaattgggtcaggatttgaagaaatagtaataataggatatttcacaccatgaatagagttatagtttaaatgcataggtgtaagtttaggccctggggagactggaggtgcttttggtttttactgcctgcccttgagagtaggagctagaactccgggcatttgtgaaaaatgaataagagaaaaggtggaggaagggatgagagtaagtaaactgagagtgtttggaacttatttctaatttttgcagtctcataaaatttgatttccaagaattgcaatagtttatcaaagtagagttaaatggcttgctaaaactgagaagaaaattcaagttggtctgatacagttcagtattctaagatcaggatcaccatgaatatggatttttccttaactgttttggtagcagcactattatgtcaaacctttctttttctgtaaggatatcctgtcccctcaccacctcctaaaggaattgtttttttccttcctgcaaattgagttacagttttccattaatctgcaataaaaattgaaagtatgttacagaaaaaataccttagaagccaggtcaaatagtattatatgtaataatacagtaactaattatgaagtgctatgtttatttgtcgtgttttttaagagttgaggtttaatgattcttttttttaccaaaatgttacttttcatattgtaagtttctttagagtatctattgctatgaataaaatat

SEQ ID NO: 72813 - DNA, 1143 bp, Homo sapiens
gacacatttctcaaaatgtatctctgttgttaagtgatgaatgactgtattttatcctagaaataatgtttaaccttattagtgatgtgcactctgaaagataaactaatatattttagttactgtatgacaaactgtcactcagtgtgacagctgaacccaattacattgaaaaattatgctgccaaactctgaaataaattgaagatgacctggctggaaaatataggatatagacatttacaacagagatttgaattccaacgaaagaatggttgtagttttggatcggtatgcattttatattttagaaccttaatttattatctgtgtatgtaaaaagattagagcggtattagtgggaagattgtttatgggaataaaatttaataattagatgtgtcacacttgtggcatgttattagttgttaaagagggactctattaatgtagcttattcctgagaaaaaaccacaagtctaataaaagttttgctttatattattatcaggatatgatcagatattaatgtttaacatacactcataagttattaaattatatcattgtccagttttgactcagttattcagtgtgggttactatatttagctcacagatgatctattcttttgctcctagctatttctctgtggcttcccctcctcctgcacgcacccccatataaataccagtctattggatctaaatatgtatattcattttcaatctaacttcatatctggtcacatatccattttatcccacaaacttttattgattacttaccgtatgtaaagctaggcacttcggatacaatgatcaagataaggtctctgccctggagtttatagagttgtagagggtgacaaatatgggcaatgagatgtgtaaattctatcatagaaatcaattagggtattgtgggctacactgaaaaaagaaatctaccaagtaagtcaaggtaagtctttataaaggtgatgaagcttgagttgagttttgaaagatggctagaagctagatctggctacagctgtgtggtccagcatggcggccactagccacacatgtggctagtgagcatttaaaatgtccttagaatataaaatgcacacttaattttgagggctaggtgtaaaa

SEQ ID NO: 72814 - DNA, 1902 bp, Homo sapiens
tatctctttaaaggttctatctccaaatgcaatgccattaggctgtactgtgttccccccaaaattcataatgttgaagtcctcacctttagcatatgaatttttggggggatacagtgcagcccataacagctggtcttaactaagcgaaaataagggtaaaatgagtgatagtgataaaaatgtaaggtcttttattagtaatgctttacttaaattcctgtaaaaatgacagttttctatttgtaaacccattgcttttttactttgaattatttcatccttttccatgcttctactcttttcttcccccccccgatatatttttattctcacatgccttcatctgtgcatccaaaggcactgttgattcagtagtatcagcggaaaagcccaaatagttttgactccagctaattaaaagaaaacacctttaaaaaatatatgctgcaatgtttgtagaaaatctaggtcttacttttctttattaatatcaataataataaaaataataataaacctctgttaagtgcatattaggtaccagggattttgctaaatgctttaccctatgactttggtagttttatagatgagggaactaaaggttaaagaaagtgaaataatttttccaagatttcagagcaaataattgttaaattaagcttcagacacaggcagtacttgctatgcttactgcctgttttttagaattcttaggaatttaacttgcaactgtctcgaatccaagctatactctgattgaaattaagatatggaaataacatcatatgttgatagcttttgtggtaactatcgtgtttactatggcaagcattcagcacactgagctttggatgtttaaatatattgaagctttgattcttgaagtcctcaagaatctgtttgcttacccaggcacaaaatcactcagcatcttcacttggcacataaatgctaattcagtagcatgatatacatggcatgtcataatttgcccctgcctgtctttctagtgacattttattttttctcatagctctacactctttagtcataataaactactacacttattttctggaatttaattattcttatggctccttggggttgctcatgttccttagttccatttaggaaatattttattgattacttactaacgcacaattcaaggtttgtttgtttctgtctgcactattgagagtgatgttggggcccaaaagaccaaaaaggagttgtttacaggtggacttggactgttctgaagagaatctgcagatacctatttgtgttttgctaagtggagcttaaatgacaatgggccacaaggagcagggctacaaagggaagagcagggggagaacgttatctatgtctctgggtccattagtaggtacgtgcttgatcccagctggatcaggttaacactggagcagaattaggaacagagggcaatagaaacagtgagtggggaaaggattattgtggtgactatcactttggtgctccatagcggtgcctagagtagaggacccatcacagaagtgttctagcaatgacttatctaggaaactagctactgtaaacttggttatttgtttatttcttcagacttggtgatacatattatggtcttccattaacattatatggtatatgtcagcagcattcttgtatggttttaaaccctgacagaactataaagaccttttggtgaggagaagcagattagtttaaacatacttgtatttctaggtagttgatgggagcatagcatagggatggtatgcccaactctgaggacagaacaggattgggaagatgattcttatctttaaggatttcaagatctaataagagagactaatgtgtaaattaaaaaatactaaataatgt

SEQ ID NO: 72815 - DNA, 1062 bp, Homo sapiens
ttaatgtaattattaatattgccacaattctggcagttatcattgctgtttattccgtatttattacatctgtttttctttctccttttcctattttatgtctggttttggattaattgaatatttgttatgacttaattttacacatactcttgatttattaactacacttttttttttacatgtttaatggtttttctagagtttatcatatgcatcattaacttagtgctctctaacttaaaagtaatatgctacttcaagtttagggttaagaaccttataaaagtacacatatatttctcccgccatgtcctttgtgctgttgttgttactgtttttatttctacgtgcattatcttaagcccatagtacattgttgttatttttactttagatagttatgttttaaagagatttcaaactgtggaattttttctaaacaagatacttaacattctggtgctcttcagttttttgtgtggatttaaaatttctgtatgttttcttctgtctgatgaagttacttacatttctcatagtaaaagtctatgagcaacaaattctgtcttgtagttggctgcagaagtctttttttgctttcatttatgaaatagattaggatttttacttgttagactaagagaatttaaaagtgtatagtcgtttggccattaacacttcatttttaactcattttacttgtcacttgactactggcagtcaggtatccttactatatctattgttatagacatataaagccattataaaggtggttatacagcttttgaaaaattgcgtgttgctttaaatatatttgaaagatgtattttcaagtaggcactttatgatagtcactccctttgttttcccttccctagagtttttatagactgtatttgtagcagcatttgatatactcttgggtacagttatttctataacacaggaaattgccaatatgaattacttgagagaggaccagtgtaaaagaaataggaagcaaataagtaattttctattttacttgcctttgtttcttagctggggtacagggtc

SEQ ID NO: 72816 - DNA, 1058 bp, Homo sapiens
tattcatatatttatttatggtattgagaagacatggatttaaattctgatgctaacactagctttgggatcttgggctggttatttaatgtatgccaacctcagtttcctcatttgagacacccattgcacagaattttgagaattaaatgaggctatacacataaattactcagcatgtgataaatgttcacaaaatggtgattcttaattatgtttctgcttacatttttatctctgtataatttcatatagctttatctagaagaagatttatgttttagaaattaataactcaagagctttataatatagattgtgcctactttgaaaaataatttgaattggcttacagtgaaagatagcagtatactaaaggaaggaaagcaaaaactagtcaggaagacagaataaagaaaggagataatgaagacaaatatagttatcaaaatttgatccttaatttttaatttcctggaaaccaaggctaaaaggataatatggtggcttacactattcttattgtatattaaaagaaagcatactagttcattaaggtgcttaacattttcccccagattttatgataagaaaaatgtatttctttataaagggacactgtcagtgtaactgatgggagaagtcacctacaggtcagatgcctaaggagatgagaaattatactactgatctcatactatattcttaacttgtttatattttaaagggctttcatacttttttcaatttttatctttgtgtcctgtataagttatattaaatataatttatagtagagctatagtagatcctataaaagtatgcgatcatagaggagggtagtattaattttgaaaagaaatgtttcagatgatctcatcaaggaggtggaagttaagttgggccttgaagacattactaaggtttagagagacaaaagtacgtacatctgtgtgtgtatgtaaatatagttacctatacaaaagaaaaagtgtgagtaaaaacaaggaaatatagaataatgcagtggtcacaaagtagaacatggcagaagtgag

SEQ ID NO: 72817 - DNA, 1056 bp, Homo sapiens
aacttcattcatttttatggctgaataatattccattgtatggactatattattaaaagttattataaatttttaataattaagactgtagtattgggcttctttctttttgtttctgcttattcatattcctttgttcagttacagcaatggtgagaggacaattttctcagaaacttttcttgtctatttgactgttgagggcacaaacaattagtctataacattatgtgttatatatgatatataacacatatatatgtgtttatataatgatatataaacatttagtctataacaccatagtctataacaccactgctgtggtgtggatggctgtaatgggagtccaagaaaaaccatctttgtgggtactgggaggagtttctggattaagtggtatctaaattgatatttgtagatttaatggaagttaacaaatccagagtttgagagggaaccctgtatcatgcatagggagtaacacatacaaaggattttctatgaagtgagggatggtattgtagaaactttccttatggcagtagctgggaattagaaaaaactgaggctgggagttaatttgggctttctgaaaagtgttaccattttagagtttatccaaaataacaaattgcaaagaaatccagcagtttaacaattgttcactttgatttaaataatgaacattgaattattgcgtatgatcctaataatctaagatttcaaatcaagatatttaaagactcactctatacctaaaacatacacaaaaggtacttaaattgctagtatttataaacctcagtgctcttagaagacaacatgtttccaagtcagcattttgtatttcaaaatttttattcagtaaagtttatttactttatgtaaataaaagttactgcagtttaaaaagctcagctgtgatatttattttacacaaattcacttaagactgattcttgagtagcaagcatcattgtggaccacttctctaacagcggtagtaccttttagaattttttgaaggcctggaggaaaagaacaccgttaact

SEQ ID NO: 72818 - DNA, 1007 bp, Homo sapiens
gtagatgtttcatttcttacccataaaaatcattgtttcctcattttactcttcatagagctttataaatatcccctctctttctttctttcttaaatctacacctctgacttcatagcaagtgattaagtgcattttgtagtctatattaggatcctggatctaccgcttacttatgtgtgaccttagtcttgttgcttaacctcacttatcttcagtttctttctatgaggataatgaagcctcactgtagttcttcataggatcgttagagaattgtttaaataatgaaggtcaactctttttacttattatatgctttagttgctaataagcaactcattacaagcaaataaatattttcctaatcttgggatgatattttcattcagcagttagcctctttaacacgaatgtattaaaagttaacaataaaggttataaaaccatctcactgtagaaagcataggcccattacaacatctgtagtaaatatttttactgcttccggcaattaaatcagagagctaaatgatacatagaaaggggcaatgtgtttttggctgcgaaagatgtacactcaggcttcacataacagagcctgattgttagaattacatatattaattgttaattcctttcacagccgactccaccagcacccctgcaatgagcccatctctgctatttacatatgtaattatttggctctaccagactctgctaaagcagttacaactggtttaggagattcatctaaaaaaattctccaatactctacaattcaagtgtataccctttattctacaaatttatacagaggcccataggcataaacctcattatcggcttctattggttcaatcaataagtgtccgtattgttgattttccaaccttttgtttttatatagtttatttctcgagaaccttttctgagttaccaatcactagtgtacaagattcacagtagtgacagactgaagtcagttgggctcataataatga

SEQ ID NO: 72819 - DNA, 1073 bp, Homo sapiens
tcaggtttggactgctggtatcagtgattcccctctggctagggctggttgagatgccttcttgtgggtggacatcagcttagtttggtcaggttttcctttatgctatagcaagatggccccaggttcagtgcctcacaattgctctgttctcccttcaccagcacccagagatgctcttggcaccaagccatgctgctggagtcagggaggggtggcgtcagagactcagaactgttttctatcttttcagtgtctctttcagtgatacgaggttaaaaccaggttctgtgggtgctcacatgatttttagctcttatgaagaagcttttttctgtgtagttgtttgttaacttagtgtccttgcggtagggttagagggacgatctgtggagttttctgttctgccatcttgcctcacctccctcctaaaaaatattcttatatgagattgtaatgtttatatgaacttgcatgaagacagaattcttgtgtttggatcctgagtctcttacccattttgtaacattcttcaacatacttttaactctgtgcctatgattccttatctgtaaaatgaagataataatagtgtcataatagatgtaaaacatgtaaaacaatactaaatgccatgtaaggttaagtggtggtattattactatttatcctatttacatcatattctgtggtcatctgtcagtatttgtgaatacctttcagtgacaggaaattaattttacttcttgatcctaattctactccctgtctgttcctaatcttgttttgcctttgcttcctcttttctcatctactcatattttatgtcttccttcatgctttatataacttttagccaccttcaatgttttttggaataaagtaatgtatgcatacatacatatacatctttgttcctagaatttagcactgttagtgcatggtttttatcttggacattcatatattctagttccagaacagtaacttctagaacttaataatttattaaggaatcaatgacttcaaatttgtcagacgttgtatatgattattattttattcctaaatct

SEQ ID NO: 72820 - DNA, 1037 bp, Homo sapiens
ctgtatcatttatcaaacttgactctgaccaagtttttttttctttttctttttaatttctaagctattttcaaaggtataccagaattagagagcaggttgttatttaaaatgtgaactttgtgtaaatgtgttctgtatttgctgattgcaaatggtccttaaagtctacttggtggtaggcttttgttggcaattaatttgtttttaagtatttctgagattttagattgaaatactaaaagctgtcatagtcttttatttcctagtttaaatttcttatatttacttataactaaccttttatatttttgtttagtttttatttgacacatattaaactgcttctactgtacagggaaataagttttatttttataagaatgtttaatagccattaggtgtttagttctttttatcagaggatattatactattctcagttgtctttgcagttttcgtactagcaaaggagttggttactctgctcattttgttggcaactgtttaatagtcacatcattgaagtccaaaggaaaaggttttcagcattgtgtgaaatatgattttcaaccacgcaaggtaggtaaaagtaaatatttttataactcacctgttatgacagaattcttaactctccttttatgagctctgtagtattctctttcacgggttttcctatgcttttaattgttttctcttatccttgtctgcatttcctttttacttttatgtctaatttttgtcttctgtaagatcagtgttttgatatcttgtggtgtatttctcttacactctctcattatctcagtctgatctgttttatggcattctttcaatagatacttattatctactgagtattggataccattgtaggcactagggattaataaatatttgcctttttttaaaaaagttaaatgttaaacccccagattaagcaatgcacagacacattttttttgtgggagattaacctaatcctagtagttctgaatattgtttcctgagattgaaggttttgttaatttgtg

SEQ ID NO: 72821 - DNA, 1016 bp, Homo sapiens
tcattaaaaataatgcatttttctttattacttttaaaaatagagctatgacaagtgctttcttggatcatcagaaactgctgatgcaaatagggtattctgtggtcaacttggtgccgtgtatgtgttcagtgaagcactcaacccagcacagatatttgcaattcatcagttaggacctggatataaggtagtaataactgtaattttataaattctatggagagttttagatgtaaaatgtggtgtaatatcatttttagtgaaaatctttaatacggtttaagagtcatttctattttttggaatgtagtcaagttttattatatgtttctttttggttcaaagatgcttcttaaccattttataaacttttattcttcagaatattttctaatattcatggcatgccttttgttaacaattctgaaataatagatcttataaaactgttttgcttaatgtagtatttaaaatacaaaaatttgaaatatacatattacttaatgaacataataaagaacttgttaatattactggtaacttggaaagaagagttaaagatttagaaggaaactaagataatatatttcatgggcctaaaattattcaattttagcttatagttttgctttaattgcactaagtgaggaagtaggtacagtagtgagtatactaatttagcaaaactaattaatgtaatttatcatattctttttgttttttaaactttaaaaacaaagactctaggtaagatagagcgtgcacatatatgagttagttttaagtgtgtagtacatctggctaggggagtatataagggttctatttaaatcacattgggaattgtaaagtctcaaactacttcgagctgaaagagaattacacattatagtcaaagtgtttataattctgaaggagtacttgtcttgtatggaagtgtggttttttattgaactcaatttaaataattaatgtgaagattgtgtaatggaaaggagtagtaaatattaaaa

SEQ ID NO: 72822 - DNA, 1054 bp, Homo sapiens
attggtagcttgaacttgaaatcagattattattaatatgatagaaatcagaagtacataaatgctcaaaatcaggacctcatccctccactctgcagataattcctttaccagcataccaatggttgacgggtttccctgtcaggctactgtcagtgttcaatttcttgaccaaagaagtgtttatacaggtgttcatttcatgataattcgttaagttgttcatgtatgttttctgtacattggcaatattttacaatgaaaagtttttttaaagtaataccaagtgtcaataggaggggaagagtactttgtgcatcttggtggcagtggggcaataaaaggtggagagcagtctgggaaatagggaagatatttcttttattataataggcgggatggattttttggataataacttgcttgcagatataataatcttcatgtaaatattaagtgaataagcagatgctatacattatacatgaagggattatgcttttaaaacttgtaaagcagtagataaatactggttgctacaagaaaggcttaatgttacaggatttttatgaatctagcttcattttttaaaagtattctgtattgtatattatgcatattagaatatattatattttcatttttattagtaattaaatattttgaaattactttaaaatttgtacgttatgatagaactgatatgcacattttaatattttatactcattttcacttattgacgcagcataaatgcccactataatatgtattttctgtatacaagtgacatagaagaaataggctgcaaaacaaataattgcaataaaacagagtgtcattttttctgtgctttgttaaataatgtgtggggtgaaaatggagagagtccttaaatgaagacaagtttaattgagagtggaagacatattgggaaacctattaatgtaataaaaacagaaaaaaaagcattaatataaatacttggggattatacatttataaatggatattaatatataacaactttttaaaaagttcttttttccacaaa

SEQ ID NO: 72823 - DNA, 2007 bp, Homo sapiens
aacctgggcaacaagagtgaaactccgtcttgaaagaaagaaagaaaaaagtccctttagaagagatgtttcttttggtttggactgcattgacatttcttttgcaggttcattgtatatctatattttgcaattattatttaaattgttttctaaatgaagttcaaattcttcatttttcagatcttgacagaacaagtatgtactcaggtcgtacacaaaccacatccagagccagattctacagtgaaaattcagaatccaagtgagcaaatggcagttctttactgtattgtggtaggcgcatggcaacatatgagactaaatcaaaacttttcctaaccccttaaatcattatggtgtttacctagttcatgacagttttaactcaccttttatagtgttaagtatttatttgaaagttggtaatactttttgagttgaacataggatatggttacaaatctacaagttttttttctttgtttacagtgattcttaaagtggtggcaactttgttaaaaaactctacaccaagtgcagagctgatggaagttcgtcgtttatttttatctgatatgataaaacttttcagtaacagccgtgaaaatagaaggtaagcagtttggatactgtaacaacactttattccataattaatattttctctcttttagattttcaattcatttcaaatcttttccatattgctaaatacttttaatcatcagaaaaggcattttatgtttctttgacataatctgtattcggtattcttctatttatttttatattatttttattttgttacgtggatattatattttaattgtatatatgaatatacatataaacaaactcttatttagaatgtaatatcccttttagtggtacctatctatcaccaatggaactttcagttgtaattgtgttggatttccccattttcatctatgctttccaccccatatttcttatggccgaatgttgtgcatttttaagctagttagcttgaacatggggtaaagtctgaggccatgaactctggggtagtcattgcctgagtctataatttaacaaatattgattgagtgcctactgtgttcagtgtaagactttgtgctacacaagatagtcttagtacacagtctcagtacattccagtgggaaaccataaagcaatgattaatgtataatgtgttaagtacattgtgagtgctaaaggtggtgagaaagtagagaagcaataagtaaatctgactgtgaaagttaggaaaatgattttgaatgataattaggatttttcctggtagagaaataagagaaagtcattccaagtatagaatatataacgtgcagcatgactgtacaccttgctttactgaggtcagatcatattttcactattttatttatcaaagtttcaaaatagtaaattctaacttaatttggatatttttaatgagatcaaatttttttctccctagatgcttattgcagtgttcagtgtggcaggattggatgttttctcttggctatatcaatcctaaaaattctgaggaacagaagattaccgaaatggtctacaatatcttccggattcttttgtatcatgcaataaaatatgaatggggaggctggagagtctgggtggataccctctcaatagcccattccaaggtaacacgggatttaacattttaacatcatcagagttattgcagtggattaaatggctacaaacatgcatctggtgccatcttgtgggcatcttagattttgacagattcctgtatctcagttttgtatttttccctcattgttcatagactgttagaacttgaaagtggcttatagatgaattaattcaaaccccaaatttataaatcaggagttttatacccaaagctgacatacatctgttttatagcaaatctgggaactttaatctgagccacttgctctttcaactggttcttggaagaatattttatgaaatagtctctg

SEQ ID NO: 72824 - DNA, 1049 bp, Homo sapiens
tatgtacaaaatgccttaatgttttctttacttattcctaaggtcacttatgaagctcataaggaatacctagccaaaatgtatgaggaatatcaaagacaagaggaggaaaacattaaaaagggaaagaaagggaatgtgagcaccatctctggtctttcatcacagacaacaggagcaaaaggtggaatggaaattcgagagatagaagatctttcacaaagccagagcccagaaagtgagaccgattaccctgtcagcacagatactcgagacttactcatgtcaacaaaagtgtcagatgatattcttggaaattcagatagaccaggaagtggtgtacatgtggaagtacatgatcttttagtagatataaaagcagagaaagtggaagcaacagaagtaaagctcgatgatatggatttatcaccggagactttagtaggtggagagaatggtgcccttgtggaggttgaatctctgttggataatgtatatagtgctgctgttgagaaactccagaacaatgtacatggaagtgttggtatcattaaaaaaaatgaagaaaaggataatggtccattgataacattagcagatgagaaagaagaccttcccaatagtagtacatcatttctctttgataaaatacccaaacaggaggaaaaactacttcctgaactttctagcaatcacattattccaaatattcaggacacacaagtacatcttggtgttagtgatgatcttggattgcttgctcacatgaccggtagcgtagacttaacttgtacatccagtataatagaagaaaaagaattcaaaatccatacaacttcagatggaatgagcagtatttctgaaagagacttagcgtcatcaactaaggggctggagtatgctgaaatgactgctacaactctggaaactgagtcttctagtagcaaaattgtaccaaatattgatgcaggaagtataatttcagatactgaaaggtctgacgatggcaaagaatcaggaaaagaaatccgaaaaatccaaacaactac

SEQ ID NO: 72825 - DNA, 1109 bp, Homo sapiens
cctcttttcttcttttttttaaaggaagcccgtcaagaaatttcccccttatatctcgtgagccagcaggatcacatcctctttcaaaatcaatcatcagaaaaagaaaatgggattataatgactggcttttagagactaatactggttaattaactagtaactagggttaggctagtctttcctatacccagtcaagctcaataataaaacaaaatataaaatgtgtgttagcagggaaaaagttatgactgttgtggaagaagtcaataaagtctgccatagaaagattttacttttgattttatttgatcaatttgttcttagactactcatatactttcattgctaattgttatatgataaattacctagagatggtaactgaggaaacctaaataccatgaaatacattgctattaacatgaagaccaatgtatggagataaattatgtaatttgataattataatatcagtagcctccaagtgagtgatactcagctttttttccaaccacctactctgtgtttttgttttctttaatgggctctcatgaaattacccaggtagaatttaatgtaatttaaattttttaaaggtaacactttatttttaggacagagagaaacatcttgaaatttaagatacacagtgatagataataattcacaactctaaaagggtgagaattattgactcaattttgaccatgaagtaatttcttttttttaatcttatttttttcccattaaaaaacagttcaggctaggtgtggtggctcacacctataatcccagcactttgggaggccaaggcgggaggatagctggagctcaggagttcgagaccagggcaagaccctgtttttacaaacattaactaggcgtggtggtgtccacctgtagtcccagctactcgggaatctcctgggcccagggaggttgaggatgcactaagccatgatcccaccactacactctagcctgggtgacagcagagatcctttctcaaaaaaaaaaaaaaaattatattcttgactgacaccaaacgaaagcagggtatttttttgacatctacattgtatgttttgtatgagaacactgtacta

SEQ ID NO: 72826 - DNA, 1019 bp, Homo sapiens
ttcttcagctggctggtggtatatgggtattttgttttatttttaactatatgtatattttgtaggtactttcactactgtatttcataattttgaaaattattgatctagttgattttaagattaatagtttatgaagcaaggggaaagaaagggaagaagaaataaacttgcaactttttccaggatatcaaagtcaacaatttatattaacaatatgtttttgaatttttaaatagtttgttgtgttgctgtgagaaactgtttagaatgtcggcaaagacagagagacaggggaaataaatcttcccatggaagcagtaaacctcaggaagttcctcaaagtgtgactgctacagcagcttcgaaggtaagtaaactttttttcttggccaaatataatttacctgaaaaaaatcttttttaagttgatgagaacaaagtgccatggtattgctcagtgatagagagcaaggacattgtcattaggcagctctaggctgcttaacaattttgttaccaagattacttaacttctctgagatttgtgtgttttggttattaaatgaagttactaacaatttctacttaataaagttcttacaaatattataattagcactaaaaactgttatttctatttttaatagtcatatattttcacagaatttaatgtatgaataattctccttttaaatgggtaggcataatagtcaacaaaaactcactgaatgcccattcaatgaatggagtattttgaaatatactattagttttctttctaaattagctttctttatcatatgcttaactggcccttggcgtcacatccagtttcattaacatgctttttgaggttctgtgcctggtccttgcttacttctccagcagcagctctcagccctttacccttgcttgtgctgttttagtcataccatagacttcattctgttcatcaaaagaagctatttcccctaacttctcagacttttatatgatttcctttccataaagtattc

SEQ ID NO: 72827 - DNA, 1009 bp, Homo sapiens
tgtagaatatggacagaaaagcccagtgggaaggaaattggtagtaacttacttgagctaatcagtatttatctggcaagaactttggcagtgaaaaatgggtaagtagcgatgaatgtaaaaatactaggggaagatttgacatttcacaacaatgaatggatctgagtggtgtttctttttttttccttcctgtgttatgtgtttcttatgtgacattttaggaagtaaatcgagtaatttttgaatgcagtgggaaagtttcttgcaagtttcttgcatgaatcccataccttcatgtgacctcatttttatactgtgtgaaaaggaacaattacacaagcttctcctatcatgttgtctttataaggatcaaattagattaggggtagagaaatatagaaaagaaaatatttctaatcttaaaatctatgttataaattcatttatgctgtaaattatgtattattttctttaaccatcctgtagtaaatattattagtctgttattcagatgatgtagctgaagttcagagaggttaacttctcaccgatggtcatatagccagaagttttggaattgtaatggaaaccaaatactatcaacctttaaatactatgctctttttactatggcgtgctgccaaggaatcaaacattttaattttgggctagaatatcatgattgacattcattgagaaatagaaggtaccctgtttatttttcattgttagagtaacaacaagtgcatacctattatgggctggaattgtattttgcattatacatattatctaatttaatccatacaatttttaacacactgtataagtgagaaagtacttgattgagtttcagggaccctagttcacttagtagtctactatgtgactacattacctgaaatatgtagatgtttttcctccaactataaaatgttttgttggtaacaatctttaatgtctttcagctttaatgggctgtgactgattctttttaatcttaccg

SEQ ID NO: 72828 - DNA, 1049 bp, Homo sapiens
agaacttatacttcaaaaagtttgagtgttaaaactgtcttttcatttttcataggatgatagcaaacaagcacagttcttagctctggctgttgtttacttcatttcggttctgatggtttccaagtatcgtgacatattagaaccccagagagagactacaagaactggaagccaaccaggtagaaacatcaggcaagaaataaattcaccaacaagtacaggtacttaacattgtataattatttgaattttcaccatgatgtatctcctttttttcacctttacatctagatttaaactggacctcttcataatcacctcaaatatttatgaatggttggtatagaaatgctaatttagtattccttaattcaacaaaaatgtatgaatggtatttttatatagttgctacattctcattttatcagtatagctttggtttcagtgtttctcatttattaatacaaatcattaatttataccactatttaatatgcaagtaactcatatattgttaaatatattacttttttaacatttataaacatgaaagtagaaagtcattatagagttgttcaatgccaagggtaagccaaaatacaaatctttgtagccaagctcaaaagttggatttttttcttttttagctgtatacagttaattcagtatctaaatattctatcagtgatttataatcaaacatgtgttctaaactttataccaaagtggcctcaactaaaatcaaagacttgtggaaagttaacatggacaacaatgaaccaccttgggtcatgctgccttttttcatttgcaaaaaatgctcatgttgcagcagttcttgcattactagctttgcccactctacttgaacagcataaacacagtttctggcaactaacattttaatattggacaccttctatcattatcatttccttccaggtgtttatatcaaggttgtttctctattgtttgcagtgaaaccttgataacctaatggttatttcatgtaccactggattaatttgtagttgaaattttctttc

SEQ ID NO: 72829 - DNA, 1554 bp, Homo sapiens
gatttttactttcaaagcttttttctaacctagtttctttcattacagaaacacctgctgcatttccagacaccataaaagaaaaagaaacaccaactcctggtgaagatattcaggtagaaagttcaattccccatacagattcaggaattggagaggagcaagtggctagcatcctgaatggggcagaattagaaacaagtacaggccctgatgccatgagtgaactcttatccactttgtcatccgaagtgaagaaatcacaagagagcttaactgaaaatcctagtgaaacgttgaagcctgcaacatccatatctagcattagtcaaaccaaaggcatcaatgtgaaggaaatactgaaaagtcttgtggctgctccagttgaaatagcagaatgtggccctgaacctatcccatacccagatccagcattgaagagagaaacacaagctattcttcctatgcagtttcattcctttgacaggtaggtactgaacttattattcacagggctttatacataaaaggaaaattagactttgttaattttaaaatataaggaagatcttgaaaactttattaacgtagattcttattacaaagacaatcaaaatgatggctcaacctaatcttataataagacatcttaataatacatcttaaagaagaggtttcaatgtgatatgatggatagcacattgaattggaagtagggaaacatggattatggttatattccattatcaaaggactacagtacatcggggtgttatttttctctttggacttagtcgtttcatgtacataatggggaaggggatgggtcacatctgtccaaggtttatcctggctctgaaattccattataatattataaaatactataataattgttggagattatatgacatgctttaagtgataatatttaaatttgaaccttaaatggaagtatatggaaaaattttaaaattgtttgtggtcatcttctttatgagatttccaataccaatgtaaaagctgtattttgaagcatgtatttaaaagtaaatatttttgaaaggtattttggcattttaggtatcgaaactatttataacatggcccatatgtcatatatctacattcaaatgttaaatcatgcaaggaatttttttaaggaacaattaactttttattccagtatacattcaataaaaatgatagttcacagaagcagaataagatattttagaacctaataccctagtcatctaatatcttccactatttaaaaacatgtgcaagattagaagaatattttagtcactaattactaacagtagtacttaacattgatcactggggttaatgcctattccaaataatgtttgcgtgttaatgtattaactgaaaaatgtgatggcttaccttttaaagtaaatcattgttattgatgttttaaaacatcttttcataccaaaaatttatgtatatgtatgaggtgattgacaagcaagtgttttttttgttttagaaagacaagatcaaattaggaaataaaatgtttct

SEQ ID NO: 72830 - DNA, 1938 bp, Homo sapiens
tataagtttgtataaacatatgcatgtaagtatatgtacttgtgtatttctataagcctataaggtaatatatagtaatttaagttttgtattctagttaattttaaattatatctttaaatgttggtaaaatacaaaccaataaatacagatgattattgtgatttacatatgaaaatccaatgaaataaacattaagtaaaattttttgttttaatttggattattgttagaatgagttttttaattaaaactttaaaaagcagtcacctgagtgctaatattcttagctactcaaaatttattatacttttgagaatattgctttaagaaaaatacagctttttatgttcctatagcatttgtacaaaatgcagtaggagtggaatcattattctaaattgcataagtacaaatgaaatggaagagcacaaagcatatttcagttctttttaggaaaagagtctctagtgtagttaatatatgcaatagctcaagtactatcaaatgtaaatgatgaggtgatattgatgaaaggaggggattgaggtctcgggggcgctgatgacggattgaacagaagcggccttgcactgcacgtaactcaagtctgtcgtcttcactactcaaagccataatgggaggtggcagtttgaaatgagttgccacggcaaagagtattatttttgaaatgctttcacacaaatcactaggccctgcatacaacttagtttcatgctttaatgtcatcaggaggcacaaattggtgtgtctaattgtttgccacctgccagcaaaatgagctgccagccagccagacgggtttgattgtctgtcagccattcaatagattgagagtgacaacatcaaaaatttaacttcaaactctgaagctttgagcagcttttcagagacatcatccccacaagtgcttctggaccagtgcatttttcaattatacttccagggtattgctaccatttgccttatctgtcttaaggtagctataattacattatgaggtatataaacatgtttctgaagcactaatgtctgaaatccaagttatgacatgtcttttaacatcagattgaattcgttgaaaatgagatccaggatgacaggctttagaatgaaagtcctgaatgctaccggtttcaaacacagaatctatcatgggtcttactttaccaataacgtgtttttcattttaatctttagttgaaaagtagatataaactcagttggtcgcttctttgtaactaaatcacactcctaataatattgtacagtctcaatagaattcatgtaggattttacttttgttaaccagttgtttattgattatattgcagacatgctaacaatgatttccttatacttatcctggattttaaatttggaaataatttcctagaacaactgggataatttgagttatgttaacttgtgttctacgtcgagtgtatctcaccccttaggatggagcattggtgaatttcagtgttttgaagtttataataaaaaattgcaacatcaaattcttagaaacatttagacttaattaaaataaaccttttttctttactattacatatttcatcagattatgaaatattacataaatgttctgtacatataaggaaagtactgattctttttctatttccttcagtcatctgtgcagattaagtatatatctttgattatactcagtgatccgaacagatgtgtactcatgaagtattaaaatgctagagatcctctagtactgttctataatgagcaaacactgtatgtaaagaggaaatacaatcataaaactataacaattttttcaaagttctgttactgtgaggcagagagaaatatttatgatggttttatttttaacagaaaagcttaataatctcattttagaattcttaaatcaagttg

SEQ ID NO: 72831 - DNA, 1005 bp, Homo sapiens
agaaatctttacctaccacaaagtcatgtagatattctactatattttcttctaaaataaaagttttgtagttttatctttattaggtttctgatctgttttgacttagtttttgtgtctgtggtgaggtaaaggttgggatttggctctgtctttatgtatattaatgttttagtaccattcaattaccttggaattgatttaaaatcaattgaccacctatgtgtagatctatttctagactccattctgtcccatgaactatatgtcactactgcactatcttcctgtatcgtagctttatattaagttttgaaagagatgatgtaatgtaagtcctgtaactattttttttttacttttctgggttaattcgcattttcatgtaaattttagaagtgacttgtcaattctaaagcaacaaaaaaagaaattctgctgaaattttaattacaactctgttgaaccttttaatttgaggagactcttcatcataatactgagtattcaaacttttgaaattgtcattcattgggatctttaatttttttcagcaacttattgtagttttcattgtaaaactcttgtacttatttttatgtctttttaaatttttatgtttttctaaattttcatgtgtttgatgatattatattagattttttgctgtaaatttccaattgggagttagaagccagaccaaaaagagtacatagtgtatgattccatttttatgaaattataggaaatgcaaattaatttatcttaaaaaatagcaaatcagtgattgcctgtgtcaattttacctcaataaaactgaaaaaaggggataattttgtattagtacattgatttttatatattgattttatattttataatcttgccacttacttttagtaaacgtggtaagttgtttagaactttctaaactcacataatcgatctaacactttctgtagtttccttattattttctatgcatgagataatgtcacttgtagc

SEQ ID NO: 72832 - DNA, 1013 bp, Homo sapiens
acaaggaattgttctacatcttttttttttttttttttactttcgtaattagcacactccaaaaaacttttctaagttggggatgtctaagggcatccccaaaaaagcattacataatgtctattcacagatgcgatcatggcacacaacagctctgaattcctgggctcaagtgattttcctgcctcagcttcctaagttgttgggactagaggtttgcatcatcatgctcacgtaggcattacacatcttaaaacttgaaaaatgtttacttggaattttgtttacgatataaagcagtaaactttttacttataaaaatattctatttagcttcaatttcttagtcttctatagctttatctacttttttaaccttttcatcatgcacttgaaaataattctgtttaggagtaataaagacaaaatgccagttttaaatttataagatcacagggaagtaaaataagtaagcattttttttttcaatatcatgttttccgtagcggccacaaccttagaaagctgtaacttaataaaattgtcagtaggtaattatgtcacaggtttgcagatctaggatacatttactcatcagctattttagtatgttaaattatatttaatattagaaatttagtgacaacagacacagtatttgagttgtgtcaattcctagtcataatatatagctgataagaatttaactttacaatgtgtgtttattctatcattaatactctcttaatcttgtcttttcatctgtgtttacctaaacccaatcagttcacttaccgatgcctacatttcctcatttacataggagcattcaattaataaaaatctactatagaattcactagtataataatttcttttatgtctgagtaaatcttttaggtacaatacttaagggtatgtaattatttctttttgttctatgttttcttattataaactacctattttatatgatttaagaaatgaattaggaaatttaagcactctaatct

SEQ ID NO: 72833 - DNA, 1737 bp, Homo sapiens
gttcaccttttaagaccattcattaacagtagctatttttaggtagcttttgatgtgtgttttctcttagcaataattaaggatttttgaagacagtaatttgaagcttactgaattttaagaaaattatgggttttcaatttataaactaatgcataaaaactacttagaataggtatgtatgcaagtatcaaaacctaccagccaaagataacaaagctgcctaagaatccagtttatgttctgtgagcattgtttatgttctattgggagctcacagaaatattcagagtaacttagttatgatgcggatatagcagaaagtctcatatgtgtccaaggacaggaaataaaatatagttgatcttcaggcagcctggaaatgggagagaaaagtcagtaacaaagactactccctttgattcgcaaagcaactttatagcctcctgtcttttattctctctgtgtatctactcagtgtttttactttcctcccagaccaacttctcttgcttagtcatcagaacatctcttagcatagcaccttagccctgaatcttaatgcatttttaatgtaaatatcctgcatcatctaactatagtcacttaacttatcaacagagaatctgaatggcttagccaggcctattactttgttcctcctgggttaggtgtctgaccctgtcataatcagctaagcctgaggtgggatagaggtgtctgagatacatgaggctctcccttttaggctctatatacaagttgaaacattttagaaagagatgttagcagtgcaggaaatttcactgaagggtccactctacttttggtggcatcaataaatattttattaaaatcatataatactcaagaatatttatggtttccacgactagcattttttaaaagtatataaatatagcatgaaatttctaccttcaccaaagaggatatcactgacatattctaaaatgaatgagcctagtcaagaagctccatatcattcacagatcatttgtagtagcattataggcacataatcagaaaaacttgccgtatttttatttaaaaattatagactaaaatataatttcagaattattgtttttaaattacaataatacaaaaaaatgtacacaagaaaattgggtaaatggaaaatgctggcataatttttaaatattcctgatttcctccataaaaaatggatggaagaatagataatgaaacaataactacaagaacaatgaatggacatttacaacaaaactaggtgacaggtatctcattggaccccaaaatatgcctaggtggggaccatctagcttatagctacatgatatacatgatatcagcttatttgtggcaaggactcatggtggccatcaaatatagatctatttggagaattaactaaatgagggttatataggagaaattaaaggatatgactgcttattctgaaaaatttgaaaaatggggcagtaattatgttggtagtaatattatcgatattacaaaactgttatgtaatgttggataaagctgcttggtaattattaatattctaattattttatcccgtgttcttgaaaatcaggattctggctgaagaaaggcgatccagatataaaataggagagtttaagtaaaagcttttaatttggaatttgaattggacattttcatgtaaacttatgcatacatatgcatgtacatgcacacatacacgcatac

SEQ ID NO: 72834 - DNA, 1024 bp, Homo sapiens
atataggaagaacctgtagcttaaaagagatttttttttaatttcaaaaatcaccaaaactaagttgtttgtagaaataactctatgatttaggtattaaaaactataatcaaaggcaaagtgattatcataaaaatcagaataatggtttgttataagtagggagagggttagaatgggaaacatggagtactcctgggatacgtggtaataatttatttctttagctatttagtggttgcaaggatgttcacttcataatagtttattaactgatgttttctgcagtttacttattaatattttgtaataaaatattttaatgttctctggagaagatataaaaattcttgaatgacgttaaagacctaaataatggtgaactatatcatattcatggtaggaaaactcatcacaaaaaagttatttcagtccatgttaatatatcaattttaataaaaatttgatttaaaataatttttaaattattttcatggaatttaataagctttatcttaaatttctgagcagaataaagggatgaaaaaatcgagtaattttggaaattaacaagctattatagttaaaacagcatagcagtagcacagagatagatcagtgtgtcagaataaatctccaagaacagatcccacatacatatggtaacattatgagacagagctccattgtagactggggagaaatacgtgaacagtggatctagatcaattggattcccttttgttaatttaaaagacaaaacaaagtggatctcttcctccctgaacaaacaaaagacactaccactgtggttgaaaatcaaatatcaaatgtttcaggagaaaaaaacataggaaaatatctgtaataccaaaggtattatgtaaactagatacaaaagcgtaaagtgtagagggtaaaaaaatcaccatattaaaactgttttgttttatcaaaacaacattaaaaagtgaaaagattgagagtaacatgagcaatatagtgactacaaaccttgaagtcc

SEQ ID NO: 72835 - DNA, 1049 bp, Homo sapiens
tattactctgtttatcttcctactgtatgttgatgcccattatgtgcgaagcacaaattaaatattttatacatgcttttatcccatttgcatgcacatataacatttttacaactttttcatatggcttaatatgaaatatttaaaaattcactttatttgggttgttagaatatcagtctttaatttgtccttatgggaatgaagataaaaatctttaagtagaaattattataaatgtttatcctacttaacagctacacttttgaatacaattcatcaatcatagctggagaaagcaattgtgcagttgtctacaattaacaggacaaaaacagttgataaatgtgcatctgaattaaagtactccctgggaccggctgaaattatacactggatcatttaaaggaatctaacaaaggatctttataattaaaacaaagcaaggttaatgggatgtaaaattgcctgtaatatcttggcaataatgattggaatttgaattattaaaatatgcattgaagaataaggcaaataggaagtacttatttaaaatacagaatttgagtgatctttttaaataaattaatcatttgcctgaaataaacctttgtcactcttttaaaagaatatagaatttaatttttgaatattcatcagaaaagaacagataatatttatgtttagcactgaatttaagctagagctctcaagattctgattttttgttttgtcctttagaataggggaaaatatacaccatgcatttcttaggtttttaagaggagaagcatattgcatccaagtataattttttagtgattgtatggcaccaatttgaatgtattctttaatttaacaaatgctagttaatattttaaccaacaagcattggtttgcttgagtttatttctcttatgtctttgatttggcaaaaactgtatttaaaaataaaacaaaccaaaaaaaacttccaaatctgtaaaataagaaactatttcctaaagtagatattctggtttaatttggagccaataatctctggaagc

SEQ ID NO: 72836 - DNA, 1023 bp, Homo sapiens
cctggtgatgtaggcacccaagaaaatctcctggtctgtgggttgcaaacactgtgggaaaagtgtagtatctgggccggagtccaccgttccccatggcacagtccctcacggcttcccttggctagggtagggagttccctgaccccttgtgcttcccaggtgaggcgatgccccaccctgcttcagctcacccaccgtggactgcacccacagtctaaccagtccaatcacccactgcctagtcatcccaatgagatgagctgggtacctcagttggaaatgcagaaatcaaccgccttctgggtttatctcgctaggagctgcagactggagctgttcttattcggcaagatggccagccaacgccccatgctccttttttgccactcttttattcactttatacatctaattagttaataaacatactgagtttcatacgtgaaacatgacttttacaaaattacctgcatacatcttaaatagtatttcttatttatacatataaccttagacattgatgataaataaaatgttatttatctaaaactaaagtcccatttaataatggttagattttaagtaataaggaaatatatttcaaaatttgtgatcataaattgtatttgaattatattttgttttttgagacagggtctcactctgtcatccaggttggagtgcagtggcatgatctcggctcactgcaacctccatttccaaggctcaagcaatcctcccaactcagcctcccaagtagctgggactataggcacgagccaccatgcccagctgcattttgtattttttgtagagatggggttctgccatgttgcccagtctggtctcgaactcctgaaattaagtgatccacctgcctcagcctcccaaagtgctgggattacacgcataagccaccatgcccagcctaaatcacatttttaaccatgtttaaaatatatctacaatttgacccagccatcccattactgggtatatacccaaaggactataaatcat

SEQ ID NO: 72837 - DNA, 1032 bp, Homo sapiens
tgaaatatctcttggatttttagtattggtttagagtataaaagacagtgatggccaatgttggccgtggctattaatggtttatattagttgaaagctgtagaatcatccaagaactctattagcattagagtaacaatttaccaagacaattaccacatactggaaatttttgcagctctaattcagtattattaataatggataaaattgcatttttctcaggttgctgtgggcagcggggaattatttcaatgaatatttcagcacattattttaatcatttttccaccaaatccaagtgggcaatattttatacttcttaattcagcctactaagaaaccatggtcattaaattgtaaactatttgtagtgaggtctattccgtgatttacaacccttgttaaaaacagtgtaaaagaaagcaaactgtaccattactacggtgtaatttgatgttgcctttgttactaaactccacatgattaatgcttttagtagaaagaagaaagttttaaaaaataaaaagcagagctgagtggtataatacctgaaatatgagaatgttattattttaagtctttttcacttgtagaggaaatatatatatatatgtatatatatacacaaatacaagtgtaaaatataagtatctccaaaattatcttaatttttcaatgagaccaacaaaataacttcaattttatagaaaaatgtatttccagctatgcattgttattaatagggattactttttttccctctactcttagccaattgcatgatttctggcgtttggattactgggaagatgatcttcgtcgaaggagacgatttgttcgcaatgcatttggctccactcatgctgaagcattgctgaaagctgcaatagaatatggttagtaccaatgcttcttccacaaaaatacttctggatgtgaggtgactccttgtgtttgagaattccttctttttttttcgctagtatttaatgttctccatgtcttgagtcagaaatattttgttctgct

SEQ ID NO: 72838 - DNA, 1045 bp, Homo sapiens
aatcatgttggggcagagatccggattgtacaccggagtctcgcagtaagctgtgggatccaatgcggctgctagagctggagccaacttcggtggagaaacgggccgcaacactcagaaatggatcaaaaatgcctttcggaagtgctgcagcgttggtttccctgctgctgctgctgctgctgctgctgctgctgctgctgctgctgctgctgctgctgcttttcccttccttttatctttgagcccagccgttcttaaagtgaaagactgtcctcccccctctgcttgtctctcttcctcttttaaagaatccttgtgtgagagaaccgcatggagagatcaccttctcaggaataaaaaacaaaagttgcgctgagacccagcaaagctcttccagtagtcaaaataagcacccctttccgtatttatttgcgctttcccgtaatcattgtgtgtgcagcactgttaatcaaatggaggaaaagtgtgctgagtgtgtgtccggggtgagtgtgcgtgtgtatatgtcagaagaagctgctgttggtttgtctaagagcccagatgcactcgtgtggaaattataaaggcagggccaggcaggcgggcggccaatcgccactgggctcgtcacgacagcctccttcagctccaacccggctaattaatccccactcatggatataggcacacaaactaaaggtaggaggctgctgccggcggaaaaccactcaggccacctagacagtttggaaatcaagaggaatctctcagctttggtattacttgaagcatattgacgttttgaaaagacttggcaaagcggctctcttctgtgccgaaaacctgcttgtcttttaccgctgaaatgcaaatacaggtgtattaatgggcatccatcaattagtgatcttgacggggttttctaaaacaaaatcactaacttgcatttagagtaagataattaacgtctgttaatccttggggtcttcttaaatgcaggttgaaagtttgttctttcatgcagactactggcatatgg

SEQ ID NO: 72839 - DNA, 1044 bp, Homo sapiens
ttctattacactgaacacgtgaaatgaattgccttctgtagctgaatcctttcagtgatcgtagacgcccctcattgttgaagcgagaattaagctattcggagaagcgtgttttccatccccgaaatttttttatggaaatgacctatagagagggattgcaaataacagtacatttttgtgcagttcagccgattttaatctaggcttgggggatatatttattttatgggagtaatatatttaactatttttcagtgaattttaaaaaaatatcatttgacctattaaactagttatgtcaaatgattatgtagtacatagagatggcttaatatacatttatgtattaatgtgaaaagtttttttaaaaaactccagttataccagtcttgcaatattttttgttgtaaatatactcagtgctactagaataaaattgtgtgtgtgtcatgctttaggatgtaaatacttaattgttttcagtggtaggcatgcagacatctttgacatgagctaataatagaatgataattgaggaaaactggcctaattgaaggaaaaaaatctcaagaatctcatgatttaatgatagtttgaaatgcttatattgaatggtatttagaattttaatgcctaactgacttttacattgcatttacttagtttatgaggcaggctcgatttaaaatgtaccagttaggaaaaaaaaaaaaaaaagcaataaggacatagcacaccattatcataaatgttagtagtattagtgaatataaaataattaaatattgtgatccttaacacttcgaagcgttcgaaataacagtggcaaaacaactttgcctcaagtagtatttcctaaataacttgtctccacttctgcagacctgcttacttatatgggatatacaaagtaattcataaatagtgtcattattaagcttaaagaaaaaccctgttatgttgagaaatacaagaatgcaatatttctttgttttcgaaaaaaacctgatttaaatttgaattgcatgttcacaaatctca

SEQ ID NO: 72840 - DNA, 1008 bp, Homo sapiens
tctatttagaataaaaaccacttgaatggattatttatattaagagcttactaaacattctttgtaatattggctattattttttaccttgaatgtgttgcttaaatttggactttttctcaaacactattggtattttagtggcaaaattatttaatggtagatgtttaacattggagatcttagcatgtattgatttgcacaaaaattctattctttaaaggtcatatgtaccaaatttcataaaggaaatgcattggagatgcttagtagacattttcttaggcactaagtattacttgcttataaggatattttactgtttatgtataggttaaatacttcacttgtaatgtccatcttgtaaagaaagtcctctctgtgttgaaaatctctcattgctaatcttgtttttttatatgtccagtaagagttaccaatatatctttcatgagctatggcaaatcattgataattactgttcaatttattcctccctaggcaaatgggttcctttgtagtacctaggacaagggatccacaggcaggagtcctctggcattgatgactgatggaataagccatagtgacacatagctactataccacatgagagcatcatgatttgtttattttagaactggttgtagcaatattagaggatgaaatgattttcttaaagcactaggagagtggggactacatcatcaggataacttaaagaaaagctgctcaaaaacaaagtgtcccagtctcttcaataaattgtattctctccttgactatttaatttatgcaaatgcacaatgaaaatatttttgcttcatatctgaatcttcataagaaaatgtatatttaaaaataataaaatcatatttttcagttatctacattaaatcttttattcatgttatagtttaattacatgatatctgtcttcaccaatggaaatgtaatgtgctaaatgctccattaattttttccccttataccttatgctcagttatg

SEQ ID NO: 72841 - DNA, 1025 bp, Homo sapiens
gtgaggtgggatgtggaattttctacctgtggcctcatgttagcactcaaaaagtttctgatttttgaacattttggattttgtgttcccacattagagatgctcaaggtgtacttttaatattagtactcatcgtggttcaatccagggtggtggcataattggtaataaacatggtacaaaggaacttttcagaagagggtgtcacccatgttccatctagtccataacaaattgggaatcactctggaatgttttaatatagctggttttaatcattatagaccatgtagattaataattcttttgcatatgtttcttattaaataaaaatcaagaaaagtattcataattcattagtgtgttaaattactgccatgtgctaggctctgtgctaagtatgaagaatgcagagacatacagaattcctgccctcagtgagtcaataggttagtgggagacaccaagaagtcaaccaacaattatagtttggtaagtattataaaaaggtgggtacagggttcccagtgggagcagcaggatctcctagcttaatcattagtagaagttaatcagaagaacaaaatcagaagggatctgccagtcagaagaaatatcatttgcaggggcacaaaagtgtgacagaacacggcacactggggagcagagaagtgttcaggatggttagaatttaagagctaggaagaatgcacattgtggctaaataggggattttatactactattaataataacatttgccactttttaaatacctactatgtaccatagtatatatgcttcatatgcataaattgtactatgattttgattttcatgacattaggatgcaaatttttaaaaaatgtttgaagctataatggattaaaattaaaaagtgcactagggccgggcggggtggctcacgcctgtaataccagcactttgggaggctgaggcgggcggatcacgaggtcaggagatcgagaccatcctggctaacacggtgaaaccccgtctctact

SEQ ID NO: 72842 - DNA, 1038 bp, Homo sapiens
tgaatataaaatacaattcacatagatttgaaacagtattgcacttctctagtccaaatagcgtctaccttgcagccacagcagtgatttctaaagtgccagtttcattgtctcacctctttctttgttaaaaatcttatagcagctctccattattctcagaccagagtccaaactctaatgtgagttatgagatctcgccccacatcctgctgcccactcaccctttgttgttctaattttatttttcacctctctgcttcttacaatatatgcacacacagtctgtgtccgttgcccccccacccccagcactgtgtttatgtatctttacatacatgtttacatatgtgttgttccttctgcttggtacttcctttttccccactcccctgccttttcccattatttgtgattttccaccaaactgtgaactcctagagatcagggactctgcttctcctgttcaccattggttcctaatggtcagctgataaatatttgttaaattaaaggaacggaagaaaaataaaattgataaaccatgaggacacttggtagaaaagagctgacctaattatgggctgtttataaaataggaagccttcttgcagtttatcactgcttatagtgagactggtagctggtgtcccaaatagttgggcttcgtagttaagagttaagtgctatgattccaataatgtctaggatacaaactaccactaaagaaacaataaatgtggcttttagttcagtaaaaggctatgtgctgtggtccagattttctacatctgttttggtgatgtcatcaacaaagattagaaccagaggtctgcatgggtgtgtgtgtgtgtgtgtgtgtgtgtgtgtgtgtgtatgtgtttgtgtctgtacacatgcacaaaaaggtagggagtaattgcagtagtaggctgacatttgttaagcatttcctgtgtgccaggcactgtgctgagcattttttgaaaagagctattaatatctcattcaatcgcacaatgaccccatgaagttagg

SEQ ID NO: 72843 - DNA, 1009 bp, Homo sapiens
tatatatcataaaattcacttgttttcagtgtacaatttaatgatttttagtaaattttaacagttatatgaccatcaccacagtctaatcttagaatattttcaccaccccagaaagattccctgcccacctccagcccaaggcaactgctaatcaactttttatctccaaaggtttgccttttctgtgtatttcatataaaaggaattatacaatatgtggtctttgagtttgacttctttgagtagtttttgagattcacccatgttgtagcatgtattggtactttgcccaactttttacataatactaccacattgtgtggaatatcacattttgttcacccattcatcagttgatgaacatttgatttgtttctactttttggcaattttgagtaatgctgctatgaacagtcatatacaaatttctatgtgaacatacatttttatttatttggggtatagacctaggagtagaattgctgggtcatatggtaaatttatgtttaacttcttaagaaactgcccagctgtttctcaaaatgaccttgcattccccagcaatgtatgacagttccagttcctccatagcctcactcccacttgttattacctgttttttttttttattacagccattctagtgaatgtgaggtaatatctcattacaatatttttttttcttttttttttgagacagagtctcgctctgtcgcccaggctggagtgcagtggcaccatctcggctcactacaagctctgcctcctgggttcacgccattctcctgccacagcctcctgagtagctgggactacaggcgctcgccaccacgcccggctaattttttgtatttttagtagagatggggtttcaccgtgttagccagagtggtctcgatctcctgacctcatgatctgcccacgttgacctcccaaagtgctgggattacaggcgtgagccacggcgcctggcctacaattttaatatatattccctagtgactaa

SEQ ID NO: 72844 - DNA, 1274 bp, Homo sapiens
ataaattacatataatatttcagaaaaagatttttgttagtctagcttaatatatggaaatattttgcctatagaatttatgtatcgaggaaatacttaagtttcttttaagatgatctctttgacacacacaagaaaggtatattgtacagtccagacagtttgagggctaaaattatttctattccttggaggctataaaatctcatttccagctacacaggctttaatgaaatattgtatagcttaggatacaggaagatttatttcttttttgggtgagttctctctaaaatttcagggaaaatttttgagaaaatgaatttataccttaaaaataatattccagaattcatcttaaaatagcatagaaagctaaaatatatttttgtaacaaaagttttgttatatttaataattctataaaatcttggtgttctttctgctgatcaccctctgaattaattggaacctataactttctgaattttattttgtataattggtagacttcatgtctcattcttttttttccccattaagattccagaagcttatttcattagagacccccacactttccttcttacaaaggactttattaaggtatatgttctgtatttagtgtggaaagtgttctttggtctttagctgcatgcatgtattcacaggttagattttccacatttaaccccagcttctgggaataagaatagtgactgggttaactgaagcatgtttggaaggagaagcaaagcttgtctacaaaatactaacacttggatgattctgcaccctgagaaaagagcacccgttgaattttctggactttttttcatggctgacttgggatacacttgcgttgtcaaagagtgtgttggcctctctctttgatgcatattgattatgacaatcaccctccttcccctgcaggccatggaggcacagatacagaactttggacagacgccatctcagttgcttattgagccacatccgcctcggagctctgccatgcacctggtaagacatatcagcatgttgagatttttttttctttcctttttacctgggaatagagcaaataaaattgtgattttaacagcatattttaaaaggcttctcgatttattggttaactcttcagcctaagtacaaactaataccccagggagagacagagaaggaagtgtaaatctacctttaagtcctacttaagctgtcccacttttggattcacaaaaatagccatcttctctatgtatgactctaca

SEQ ID NO: 72845 - DNA, 1064 bp, Homo sapiens
gcccatacagacaaatgagagatctagtttcattttgttccctaaagaaagaacactctctaaaattaaatcatacctgtaaatttcttcagcatttgtttctgttcaatgaaattgagacccttaatgttgctttaatgtaaaattgaatattttgtctgtgatatactttaataatttaaagtaagtaatagttctaaagtcttcactgttgctactaagagaaaatagaattttaaaggtgatgataaagatgctataatgtcagttcactccagtccaatcaaatgtagtaagaaaaagtccttgaatagttctctagggacaatttctcacttgccattgacattaatctttggtgtattctcagaaaaaataaaaagaaattgaaactggtccaaggttatagtcatatcctcgataacttttgaaaaaaaattttattaggaaattaatactagcctttttcattctggctgaaagaaaattattaaaggattagttgagtgtgaaattcaacagtattttgctcatacatactaaaaaggtgcgtagggacttggcgcatttaaacaagtttctgaaaggtttcaatttgactcaagaaaaaaattcaatatttcttttgaaaatactgaatttatcacttgctgcatggatcagatggcataggttaatctttgattttcagaatcctaatgaaataactttcaaacaatttgtgtccttaattaaaggtggaatgagatccaatttttccccctaatccttcagtttaagctgatacatgtaggttaatgtggaatgaaatcatctgtgatatattatgttcatttatcaactgagcttttttgatgttgcctgtttttatgtaaaacatgttcttaaagttaataaaataatagtacttggtgtatgaactactacataataccttagctgaagggtacgctcctcagttcatttgccatattggagtaaaatttcaccttagttcaattcacaattgacacattcagttcacgaaggaatagcccagctgtgttcttagggggaattctctc

SEQ ID NO: 72846 - DNA, 1050 bp, Homo sapiens
aacaaaaataaattccaataattttaacttccctgcactgtcaatcttatggacaactactgctagaaaggtccaataaatgctatttgttctaagtggtagatattgccaattgatatagagcccatggctttgtttagacagggcaaaaagaaactggacttgtactaattgccgatagatatcatggccaactttccattcaagcagttccaagggaagtgctttccacagcatttaatctcttgaacatatgacttctattaaaggactgttcaggggctatatatatcatttactttttgaaagtaaagtccctcagagattgaaacagcacaccatttatagtctttgagatctctttttatgcaaaacataattctattaaactaaagcagaaataaaaatttcttagcaacaaacacagaagttttcagttcattggtggaacagaattggtgatttataggcacttatgattgagttacttatagaattctttataaaaaaaattcggcaatgaatttttaaattgttctactgagcggggaatgcttcagcaaaagccacgcagttttgtcctaatgataatccttaaatgcgctctgaagacatcgtgctgtagttcaaagttcgatactttttcacttgcactcacttttttcttagatgtagacattgtagaaaaagatattaggaatatttccctgctttcagcattttagaagtgcaaaagttaaaaatatataaagtatgaagttcagtgtgaactcaaaagactatagtgctgaaagccacatggtgtgtttttgtcttgtttaatcaactaggcagggggaaaaatctagacagtttctgtactgccatagaattttaagaagtgtcaggttctctcatctgtatacatccctgtgcgcatatattggctcatctaaatattaagaacccaaaaaacattttctaaaaccatttgaaccagcgctgatgtactatatatatatataccctacataaccagccggggaatttccaacacatgccctgaagatc

SEQ ID NO: 72847 - DNA, 1025 bp, Homo sapiens
atgtggtcacttgacttgacttgactttcacctgttctacacaggagtggtctcactccaacactgcagatgtgtgttaatgcatagcatctatattatacacatatatacatattatcagttgtatgcatttaggaactacaattctttcatttaaaaatgacttagaggatgggcatggtggctcacacctgtaaccccagcactttgggaggccaaggtgggcagaccatttgagcttaggagtttgagactagcctgggcaacatggcgaaaccctgtttctacaaaaattagctgggcatggtggtgcacgcctgcagtcctagctgttcaggaggctgagatagacagatcatctaagcccagggaagtcaagggtgcagtgagccctgattgtgccactgtacttggtctgggcgatagagcaagaccctgtcccccaaaaaaatgacttagagtgtgtagggagggataagaatttttaaaattgcccctttctcatgaaaacttcagatgcccaataagaatataaatagatgtgtcatgtgaagagatttattttggttcaaggaccataactagacaagtggtttggcatccctttttctctaaataagttgactcaaatacattccatctttatttctgacctacgtgccctttgaggcacagatttttgtaaatatatcacaagtatagtgtcctcagggaaggtcccccccacgccaccattttaagaacagctttgccattgtgtagaacaggtgaaagtcaagagtcagacagaagagttgacagcacggttttgagaaaaataaactgccctaactttccatttaaagaaaatagctgcttgtgatagaatggtttggcagaccagatgcattctgaaatgaaagtctgtttgttgctttgatatagaaaacagcctgtcaaactcgacctggaatacatgtctttttcaaaccagcaagcagagttggccacagcttccaaactctggggtctctatctaggcccca

SEQ ID NO: 72848 - DNA, 1044 bp, Homo sapiens
aaagaaatagtctgccaattctgcttgcaattggagtgcttagcccattaattaatgtaattactgataaactagaatttctttctgccattttgctatttgtttttatacattttaaggcttttctggttatcttactccattactactttttttttcaattaaataagtgttttctagtacataattttaaacctcttattgtttcttttactttttttttttattatttttatagtggctatcccgaggaatacaattatcatcataagacaatctagtttggtataatgccaatgtaatttcagttatataccaagactttgctccaatatagctctttctccttcctcctcttttgtgctattattgtcacacaaattatacctttatacatgaaggcggtgttataattgtagctttatgcagttgcactttgaatcagatagaagaaaagtgttacaaaccaaaatatatttttactgtatttcacatttacatacttatatatttgcctatgtacttggttacctttgccagtgctccttagttctttatgtggaattaagttaatgtcttgtgtcctttcatttcagcctgaaagagtctctagtgtttcctgtaaggcatgactgctagtgacagattttctctgtttggggtttttctttgtttttgtttttgaaggatagtttagctggatatagaatatttagttgatagttttttttttctttcagcaccttaaatatgtcattctgctgccttctggtcaccaccgtttccaacaagaagtcagattttaatcttttttagactcttattaagttgtatgcttgctgatatcttgcaggtcactgagggactgttcatttttcttcattgttttttcttttttcgttcttcagactggataatcccagttgacctggagacaaacaaatgggaataggggaagaaaaatgccacaaagctgactcttcttccttagagtcagctgtttaataaatgctcctcaaattggtgcaagcctttggttcattt

SEQ ID NO: 72849 - DNA, 1052 bp, Homo sapiens
aaccacttatgtgctttgaacagcagctacctatctaatcttctaattttagaaaagggagtaaatatttgtctttagatactttatttttacttatcataaaaatacatgtgtaatggggtatgtttttcttctcgaatgtgctggggcttacttcaaggctgtaactcgaaattggccatagatgagaagaaatgccagttctcagtttaagaaagccagagtggggttacttcattccctgttgctccaaatgcactgtttttgtgcccggctgattgcagttttaagaattctatccaggctcatggtttcacaactcctccctcaactcccccatcatcgccatcaccacatgcttcctctgagtcttttaaaagatctgtgtgaccccatcccccttacctgagaccaggattgtgttctgatcagttccatatgcttccatcctcatatggctgtgtacagttttgcacacattgttcctaaccaggtgttgcattcatcacatctgacataatgatcactttttcttccagcctatggatcattcctgcagacacggcattctgggggctgttggggcacagaataaatactctatgggtcttcctgtctgcatccttggttgtctgagttatggccacaactgcacagttctttgattggtatcttatctttagcagtttatgttactaaattttttgagagaaagttttgttgcagtctggtttttaaccagacatctttttttattaactcatttaattcattattaactatttgttggttattttgctgctgtatgcacttgcagagtgcatactgaagtatgatgcagcaagatttttaaaaatctctgccagtcaacacacacgctaggacacacaacagcatgtaaatcaaaattaatgattatgtatttatcagtcaagtataatacggaatgtctgtgtttgataaacatctgtacatctatttgcatactcacagaagactccattaatcgttctgatcatgaggctgatataattggaaaaagtatgctttct

SEQ ID NO: 72850 - DNA, 1053 bp, Homo sapiens
gtggtggcatcggggtccatatgctgccaacaagatgccaccctaagattacttgtcccacctttttaaaaaatagtttaactgaaccctcacatcaactccataaacaatatgggaattccagtgcccagtaaagaatttcatgtttttgggttgaggaaatagaattgtttaaaaaatgaattgcttgagtgctttgagtaaatgcgtagagaggaagatggttttgtagattgccttggggcagcctacagatgtatccatggcatgaaaactgttgacgctgggattttggacaatggaaccatgaaagccggagcctgctgtttaatatcttacccagaggagacggacaccggagggcacagaccacatgctgttctcacttgtttctaccaccactccttgctcagttgcctctcgggtttgtgttagccctaagcaaagagttcattgaacagtactttttttgatgtttttagactgagataaggaaataaacgttttggaaatgctgcacaatctagaaaagattttgcaggaagctgcaattggccaagatgaccgttgtggttcataagcagcctatgtgtgagcaaaccctttctaatgatttcaactccattctttattcaggggcactgaagcttcagcaaatggttgccccgaccttcctcctcttccttgcaactttcagggtgactgctcaccaggtcatcagtccttttgctggcatggctggcagttcaaggaagcacttaccatgccttaatttcagtgatgcattttttttttttttaaatctgggccttggttaaagacctccaaagaagaaaaagggacattttctagctaacagttaaaatcatgtcccctgaacccatgtccaaggggaggatctgcaggatcttagagtctgagagtctcttcctcttgcccaagtccaagctctggatgttggaactttgctgtgggttattcacttaacctgccaagcagttactcccagaggccatttggagtataactattttttaagtgcttaaaataaga

SEQ ID NO: 72851 - DNA, 1032 bp, Homo sapiens
gaaagggtttgctgagatgggttcccgaaactgctttggtaagttagaaggatgaataggtagtacagttgggaaactcaaaggcgggagtgaaccccatgaattttgagtaggtattcccaagaagagtgaaaaccagaaaagtgaggtggggtttcactcattttggtttatctagatggcaatggaaactgcatgaagaggtggttctgaatttttatcaaagctttcatattttgtgaagttactctaaaggtattgttaaaaacagaatgccacttttgaaaaaaaaaaaaaaaaacattggaaaggatctgtcattgaatggcattgacataacaaagtcttaagacctgaacctgaacctcctggtatttttctacccacctatcagacatgctaccggtttccccttttcttctgtgcatctccctgttacatggaactaggaagcaggaagcccacagatcaccttgattaatctggtatcaggagctgttttcatcaccatggaaacatgacactcctatggaaaatggagaaacctctgatctttgtattttaaaaatttttttaaaaaacaccctagaataatgttctttctgaaaacaacaagatacatgtacaaacacacgattatattacacatcttgtatgtggttgaattttactcatcatgcttgtaaaaatattaatttatgctcaaagcaaaggtttctagacataagattatacaatgagagggcttaagtgccactggaagaaacttcagggtaatagacttctaaaatgcacagattgttctaagaagaacatgtatcccaagaagtctttgcaaacggatattcctttatgcttatttcttacccaggtaatatcaagggtatgtaagggtgtcgggagtggcacatttcataaaacactgaatttttcctcctttcaatctgcatcaagctatttctttttgtccttcaaaataatagccaaacgtttaaaaattctctgcttaggacttctaagactccatgctgt

SEQ ID NO: 72852 - DNA, 1032 bp, Homo sapiens; identical to SEQ ID NO: 72851

SEQ ID NO: 72853 - DNA, 1024 bp, Homo sapiens
agtcctggcagatgggtcagcatatgaaacagtcatacctgcattgtttggaagaactgtctagtgctagaggaagactcaaactaaattggcctacttaaaatggacttctgttaactttaatatagttgctaatacttttgcatattaacaatagctaacatgttttgagcactcaataactaatagtgccaaatactctgtgtacttaatgtgcatgatcttatgagaatccctgaagtgatcctttgacggtagatactgttacaatcttcatatgacatctataaaatgggaataatagtgaccttccaaaagatatttgtaagaaaaatattctaaagagaattgcgaagaaatgttaaaatatgtagtgtctacagatatcgtaatgttgctaatgatcattagtattccaataggaaggctagggtaaatgaaagcaaagattacaatattatcattttttaattgttgacctatacttactctgggtgggttttgttgaattgttgtgagaaaataattacttttaataagaatatatatttaaaaacctgtaagcttattcacctgaggatttaacatagttttgcaaatcatttcagattgttttaggatatagaaaatacaatcatgacattatgagtaagagtgggtgaggattcaattaatgtgggtttttcccccttctttgcagcaacagttttgggcgtattaaaagcacatgtttgaaattcacactctcaaccacctactgggcgcagtttgacaatctaggaaaagtggaacaaagaatgattttgaaagctccacccaaagacctaatatcaaaagagttggcatggtttggcttctgataaatgcactcaaagcttctgcagatagaaagaccagcagcgaaaaagctggccacacactgtcactcatcttcatacacacttggatccccgccagccagagagctacaagaacaaatggcctcagtgacctacactctcttttctcaaaaaatattccacaa

SEQ ID NO: 72854 - DNA, 1011 bp, Homo sapiens
attgatggtattatttgagattacattgttaatattatatattcaattttttttcttctagttaccatgtagaatatagctatatgatgatataaaccattctgctgaatggagttgttctttccaaccttcttccttgcttcagagagagtcaattttgattgacgtgcacattcacatacatcagaaggcacagggatcttctgcttctataaaacctgtcttttaatgtacatgaacactaatttatagtgtgtgtattgcactaaatgtcacaattagaaagttcactttgtttttccatcagcattcgggtgtagcaggtagtacagatttgtaatgtgaggaaatgaaatagcgggcagtttatgtcgaataacagtcgttctgaattacagaattgtggatactgacccatatttgttttctttctcattaaagttccatcaagctccgcctcagagaatgctattggtgatccatataaaactcacatttccagtgcagcgctgtctctgaattccttgcatactgtcagatattattctaaagtcaccccttcctacgatgcaactgctgtaacaaatcagaacatttcaattcatttaccttcagccatgcccccggtctcaaagcttctccctcggcactgcacttctgggttgggccagacgtgcactacacatcccaactgtctggtaagtttccaggggtccatggatcagattggaccctttcactccagccagcagaaacccctgacctgcatttgttgttgctactctggttggaaggctgggacctaagagcttgattctgagtctctctaccctgatgagtgaaaaggaggtgcagtcaacccatgctctcgctcctcatgctgcagggctggtgtctcgatatccagaaccagtgaagctgaatgggactgtgctagtttgacggtgaccaggtggaatctgatctcccctagcactgattgcccacccctctgcttctactcagagcttc

SEQ ID NO: 72855 - DNA, 1024 bp, Homo sapiens
actcagcagtgtccacattgttttccttgaaaaatgtgcaaataattttttctgtcctttcaagggaaaacagtgtgatgagcacttactcccctgagagagggctccaattcctgactaatacgtgctggaatgggtgctccactcctgatgcagagagctccttggatgaagctgtgagaggtgagcttctcctagcatctgtgccacttagagggggacctgccctgccctgcaaacccccaggctcctgtgcattcaccaccataaccagggaatccaggagagctgatgagtccttctggtattgtcagcctcaggtacacaaggtggctacagttgtttaaatagtgttatgccagaaactgggctcaaaattgaccgtaattaccagaaagctcattctgttgatagatgataagcacactggtgactttgtttataatatgaatagaatctcaggggaggggaagtattcgtataatttcaggactgactgtgtcctgagcatttaacatatttatttacctccttcatgcctttgcttgcatgtcacctctcaaagagatcttctcagccactttctctgctgtatttgtcttgatagcactcactgccttctgctattctttacttgtgtgttttgtttgttgcctatcttccattagaatgtcacctccatgaaggcagggaattttttggctggttttattcattgctgtatttctagtacctagaacaatgaccaacatacaggaggggctcaagaaatctcattatgtgaatattcattgtggaacaaatgctttcccgctgggaggcatttttgttatatgtgccgtataagcctagacatgcccgtgtacctgaaataacaagatggaaaaaaatagaggaaaagaacacagctagcagtttgtgacttttagtattcctgaagataaagttactctccgtctagaaaccaggaaggtatggacctcttgacctaaatgttagacgctagatgacaggactgcctctc

SEQ ID NO: 72856 - DNA, 1049 bp, Homo sapiens
aacattttaatcttaaagaggcttgccgtattaacccttatctaggatatggggttgggaaaggttttggaaggtcttaattttcttatattacttgcaactgcttttctttttaaaaaagtttttatgactacatagtatgcatgtgctttttgatctctactcatcttgaatccttctgtcttccctcagtatcctaccactgtaaataaaattttcaaatcaagttatatctcttaggatagaggaaataggattagtttgcaagtttcttagattaatgtatttttaaatcaatcagaatgcctgaagaagttctgcaaaaatagtagagccagaaaatgtccattaaatgacaaattttaaaatggagggaacctgcgctttgctggttgggttggcctagggtgtatcttgtccttctaatcctttatgcttttttcctgtaatgtacctttccttctgaagggtgcatagtcatataatatggtgtagtcataattgataaggtcagaatgttttaatcctgcttgtatgtattgttaacaatttattttagaattttgatcagtcattgaatttaggatgattttgataatatattcttttgaaattttgaaataaacattctgcaccaaatgtctaagatatggtgttttgacacttattgcccctttgtatgaagcaagagacttagagaagcatcctttgtttagtgtattggtgcgtattatttaattttgcccgacaattttcccctttaatgtatggtgtgattttctcttgtttctagctctgaatctttaaggaatggcaatgggcttgaattaaatgcttcgttgtcagagttcgagaaaaacaaaaagatctctcttcttcattcaagcaaggaaaaactaagaaggtgaattttaatatagcactttttaagcattattcttttgtagggagaaattaatgaattttataattttttgtagtattattaaaagtataagtgaaactagtaaacttagcaaacaaatagatgccactcactcattcagcct

SEQ ID NO: 72857 - DNA, 1757 bp, Homo sapiens
aggacagactccaattacggaaattaaattctactggaatcattattggtcagtgactatttttggtctttctcggcctgggatactaaataagaaatcttttaaaattaagatgatgttaaattgggactattgttggtcaaggggtacaaggttttggttatataagatgaacaaattctgggggtctaatatacacagtgtgactatagttaacaatactgtattgtctacttgaaatttgctgagagggtagatcttacgtgttctcatcaccagaaaaggtaacgatgtgacgtgatagatatgtcaattaacttgattgtggtgattatttcacaatatatatgtatattatcaactcaagttgtacaccttaaatatgtacaatttcgaattgtcaattatactttaataaagctggcaaaattaagatgattttttcttaaaatgggcctgaaagacattttctggattctcctgataatgattatatgagatttactttaacagtccttttttaatgttctttttaaatattcagatgagtgagtctgtttgtgacattccagtggctcccagcccttgtggttcttcctggaaatggctaactttggtgaccgagggcttttgcaacctcttcttatttggttctcagtgaaatagagcagctgctcgtcacctgcccatgcccctctgttggtcatgaccatgtctgcttccagttgtctcgtctttgctctaaggatgagcagctgcaaaaaaggaaaaaatttttttcagatgctatatttcgacagtgcagctgcttgttgaagactcatgcgtgttttttgtctcctgacatttacctataaataggaacttgataaataactcagtcgaatgtgttttaagcacacctgtcactaagtgactagaatctggcttaaaggtatcccggggtaaataatatagagtattttagtttttgctttctaacctaggtggttttatatttcacagaaatctataaattgctttcagttttaaaaatactgctttgtaaaatctattgagtaaaagacaactgcattaaggattggggcttgtgtgtttgattagcgtcatctccttaagtgacttcagaaataaatagttcccctctcaaaactttcagttaagactgaaaacgcaactgggcctgaagaacttggattgcccctgcagaggtcctacagcgaacacctgggatattttcctactgatctatttgcctggttagttttttgttctttttcataatagcaatatttttagagaacttattgattgtggctattttgtggaagaggggtgcagcatttgctgtacttaagaatcctgagctggcactgtgggtacacattacagaagtattcaacttaatataaggaaatacttcataaacaattagacttgaccacaggggaacaggtcaaattgtaaggtagtgagttccccatcattggggaatatgatcagtattagagtctatgttatcactaagcaaagttaaatagcgcagtggtatttaaacttcataaaaacagtgaaattcctcaaacaaaaattttacatggaaccccaatatttaaacagacaagagcagcctcacctgttatacacctactactctgcttcttcccattgtctttctcgaactcatgaacctatccacccagttattgaaaatctccctttaaaaaggatttagtatcttttacgtacctcatgta

SEQ ID NO: 72858 - DNA, 1528 bp, Homo sapiens
gaagccccacggggccacttacaccagcatcctgccctgtggagttgcttctttgccaagctgcctttctctttgtacaagtatttccagccccttccctcactcttagcttcaactctaatcacctcccaaatctgttttctcatacagatgtctatggcctggcatttccaattgtcttctatttccattaatttaagcatccccattctttggcattttcagtgggttgagttcattagctgtagagaataaaacatacagaaataaaacatgaagttgggaatgctctttttcctaattgaatatacttgaaaatatctccaaatgcaaatggcctttttggttcctaatattgaggtttgaatagcacatatattccattgaaaggactttatttcagtgtttcttatgatttaggaatttaaatctttctctgttccctggaatgtgtgtttcaccaaaataaatcatgtgggagagtcatgactttgatcctttcagcaataaacagattttccagcaggaaagacttttggaaaactgagtcataagaactctatcatttaataggatgagagagaaatttgcagaaaaactgaagtagaatagcattggtaggcaaaatgtttaaaaacagggtgaccttcagatctaatcactagtctaggtactgaagatgtgaaattagtagttcctgtccttgagctgcttatagttgaccatctagccagtcagactagatatggagtcaattgttgtgttatttgtgagctttatttatcttatcctctcatacatgacattttccctatgcctaggcaataattatgtgacgcctctgcttccttctctttcaggcaaaaatagacatcttattagttggagatgtcactgtgggctacctggctgatactgtacagaaactatttgcaaacatagcagaagtcaccatcaccatcagtgacacgaaggaggcagcagcgcttttggatgattgcatattcaacatggttctcttgaaggtgccttcttcactaagtgccgaggagctggaagccatcaagttaattaggtaaacttcaaaagccttgatgctgtatctttagaatcatttttttaaaaacccattttttaaaaactcctaaaaagatgatatatttctattttacttttcaaattgaggggccagggattggctcatgcgtgtaatcctggcactttgagaggccgatgtgggatgattgctttaacccgggagttccagacctgcctgggcaacatagtgagacctctgtctctacaaaaaattttaaaaaattagccgggcatggtgacatgcacctatagttccagttactgggaggactgaggtgggaggattgttcaggagtttaaggctgcaatgaactatgatcatgtcactgtactctaacctggacgacagagtgagatgctatttctaaaaaaaaaaaatgagggatattttcatggggagagtctatgtacatgttgtttttatttccag

SEQ ID NO: 72859 - DNA, 1013 bp, Homo sapiens
cttattttcagtttgggcactggcgtggcatcccaaagtgtccttcgtggagcttccccccaaacaggcaactttgtgtggaaccaaagccgtggtgggaacgggacctgctctgcacgcatttgccacctccatggaaatcaaaaagcccgctggcctctcttgaaagcaccttatttttcagcccctttagcaaagcacaaaatcacttttgtaactgttttcgataaaagtgaaaggtgatgattaccccactaggaggaaagcgtaggcgaaacctccccacgccagaaagcaaggccagctggggaggggggctttcatcttagtattttccgcatcttgataaataggagagagcaatcttttgtgctgagtgtagtcttattacctcttagaatgctctgcaaacttaatttcatctcttcttaagagcaagctttctgaaatggaattaggatcactttgaagtggacccgtttaacaggttttcttaatttttcaagatagaggaacctatttaaactctaaggaaaaatagtattttatggtgcaggattaggcaaagctgcacaaaatgaattctgaatgaaatatctgattatctagtagaacataaataattgtggtttcctccccttaagagagtgtgaagccccaactgacccctttgtgtgcctttgtgagaaaagccgcttgctcagtttctccagatagagctgtttaaatcccttgactcctgaggaaactgaaggcccgcaattgccccatgagagcctcagccctgcagctgctgctgattgtgggctgctctgctcctggtgataagagtgacataaataacaactcactaaaatgtaggagtgatttgctttaagcacttcagcacctgctgttactaattaagggtttagcctgccacagattgcaaatggaaatccagtgttttaaaaattgtagagactagagtgccctgcatgttactgtgatcacagaaatgaaacagtggatga

SEQ ID NO: 72860 - DNA, 1021 bp, Homo sapiens
tccctcatatttctagaaagggaggattaaaaaaagaaataatgactgattaatgacctgtattataatttacacttttatttttacttgacagtctttattacatcattctcagctagtctgagtttattttcacacactgtttttactaaaggagaaaatactgctttgtcacagagtgtgatttcattctctactgtgttttaagttattaattaaattgaaacctaagctttaattttgctttcaggggtaacacagtaatcatttgacttatttaatactaattcagaagaccttattttatatttattgtttcattgtatgtcctctaatctttcttttaaagatacggatataatgcaggagaagctacccaccatgcggtggattctgcggtcaatgttggcgtaactgcctacaatattaacaacattggtatcaaagcaatggtgaagaaaactgcaacacaaacaggacacactctccttgaggactatcagatagttgataattctcagagggaaaatcaagaaggagcagcaaatgtcaacgtgagaggggagaaggatgagcagacgaaggaagtaaaggaggcaaagaagaaagataaatgatgaagtgctgggaatcacttataccaaagccttatgaaatggatgaaattttgttaaataggcaaatgtggaattcctcacagattaaccagtattttttaaatgtattcattcctacaaattaactttcataaattttatggcatgtcttctatttaaaaggaaaagaataagtattcttgcatctggccttagaaatgtgaagttatattctcaagtttatttttttccaagtgtagctaaaatatttttgcaggtaaaataaagctgatagtacatgtgttgttcaaaccttgttaaacctaatattgaactatttttatatctgctgtctttcagaaggcaaataggaaactatatatttgcttaaaaattggcatttagtaaccttaattctttttata

SEQ ID NO: 72861 - DNA, 1049 bp, Homo sapiens
ctgtcaaaaccagtttatgaattcatctttgcttactgattgagtcatttaacaaaaatcttttaatcttactgagtaccatgtgcacactaatatctagggatgatatctgtttgaaggaaatcagtctagtccagaaaagaaaaaagtcaatttaaatgatttgttaaatgccatattggacttatattggtatttaaatcttaccagtcaagatttatatggaccagaacagttttcaacttcatggcagttctggtattgtactttataagaccatactggtaactaggttggctggagatatttttcattaattttatctagtatttgttggcttcatatttgttatataatgcttacagttttccccctcttagtactaactcttcacattttgaaacatttttactgtttaggctaaagatacttcaagtgaagaagttaacctgagtcacattgtaccatgtgagccagttccagaagaaaagccaaaagaattacctgaatggagtgaaaaagtggctcacaacattttgtcaggtattacagtaatgttaatttttttccctgtatgacattaagcctttggaaccaaataaagatattgtttattagggaatactgagaaagataatattttgtattttggttttaaatgatcaatttagaaataaatgtagaaggaactagtcttttgaaacatcagatattgtcatataagtataaattcttcctggcctattattctgttctactattgggaaaatggatagtgaaaagcttcaggaatcttcaaattcttaatagttctgaatctaaaattagttatgttcgtttcccctttgaagctccctcttaacctccccctacccctgtccctcagctgtggtctgaatgtgtcccttcaaaattcatatattgaaatcctaacccctgaggtgatggttttaggaggtggggcctttggaaggtgattaggtcatgagggaggagccctcatcaatgggattagtcccttataaaagagatcccaaagagctgccttg

SEQ ID NO: 72862 - DNA, 1048 bp, Homo sapiens
ggctggagtgcagtggcacaatcttggctcactgcaacttccacctcccaggttcaggtgattcccctgcctcagcctcccaaggagctggagctaggattacaggcatgcactaccacccccagctaatttttgtagttttagtagagatgggggtttcaccatgttgtccaggcaggtcttgaactcctgacctcaaataatccccccacctctccttggcctcccagagtgttgggattataggtgtgagccactgtgcccggcctgtgagtgctgggtttctaattaaaatacttgttcagcttctctggtccagactatatgtgttaaaatccaagctccactttttagttgttggttctgggcgacttaattgacctctctgtgcctcaattttcttgtacataaaatgacaataatagtaactgatttcataggattgttaggaggattaaatcagtaaatactattatttcagtaaatatttcaagtaaataatatctgaaaatagtttatttaccacaaaaggaatatctgatttcaataacgaaaaccttaatttactttgattattatttatttaaagctggagtcattattggttaacactaggctagttaaggccatcagctttaagattgtataattagtggagccatggcacatttagcacagtccttattgcagaaagatcagactagcaaatgattaattttcttggggatttgttgatgttgatgtttcttaaagccttttaaaatatgtttccaactttgaagtgtttattttctagtataacaattttattaaaacataaatgaaaatctagtttcatttatttatatgtatattttttttcttctaatgaatcctttcaggtttgtgactggttatatcctctagttcctgatagatctccggttctgaaatgtactgcgggagcctacatgtttcctgatacaatgctacaagcagcaggatgctttgtgggggtcgtcctgtcctctgagttaccagaggatgatagagagctctttgaggatct

SEQ ID NO: 72863 - DNA, 1019 bp, Homo sapiens
tctgctagacagatgcaacagaaaatgaaagaaactctacagaatgtacgcaccaggctggaaattctagagaagggtcttgccacttctctgcagaatgatcttcaggaggtgcccaagttatatccagaatttccacctaaagacatgtgtgaaaaattaccagagcctcagtcttttagttcagctcctcagcatgctgaagtaaatggaaacacctcaactccaagtgcaggggcagttgctgcacctgcttctctgtctttaccatcacaaagttgtccagcagaagctcctcctgcttatactcctcaagctgctgaaggtcactacactgtatcctatggaacagattctggggagttttcatcagttggagaggagttttataggaatcattctcagccaccgcctcttgagaccttagggctggatgcagatgaattgattttgataccaaatggagtacagattttttttgtaaatcctgcaggggaggttagtgcaccttcgtatcctgggtaccttcgaattgtgaggtttttggataattctctcgatacggttctaaaccgtcctcccgggtttcttcaggtaagcgaaagaaaaatgaaagcataatttgaaatacgtgtagactacatcatttttatttgttaatgtttatgtgtccagtataagtgcaaaaagataacgacaaattctactttgtttttaaatatattccatgaaattatgagccttgaacatgtttgtgtttgtctttttctttttttaaaaaagatatattaatagttttattttggtattaagtttgtgatgataaaacttgagaagagtggtcatccttacatttttaattctttatctgaagaagaaatctaataagtttaatttcgaaagggatttatgtaattcctgtggatgtatagctgtaaatattcacaaatgttgtcaagactcagctgagggtctgaactgggagagaccgagcccatggtccagaacagttgttctca

SEQ ID NO: 72864 - DNA, 1132 bp, Homo sapiens
ctcactatgttgcccaggctggtctcaaactcctgggctcaagcagtcatcccaacttggcctcccaaactgctgggattacatgcctgagccactgcgtccagcctgtggccttcatttttatctcctgcaacatacagtgccctctcacggcttgtttgaaaggaaatatctgtatgtctcacccaggcagtgaatggtacacactccaggaaaaaaaaaagtgattctgtttatgagacttgaagcaggaaggagtggatttactcatgctgctgtgtttgaagggagagaagacatatcaaagctgctttaaagaaagcagaagtcaagttatctctaaagagctttattccttcaaagtctaaaatataccacaggtttcttgttttgtttttttatttttccttttcagaatagtgggtggaaatgctcttggaatagcagtgagtcacatcagggtgcaggtaggagaaaaacgttaatgccatggatgcatcttttcatggggtacgagccccatcaatgtctgtgtggccagatgacgcactgcgtgttataaatcaatgatgagcaacgtgaagagcagacggggagcttcatgcatcctccacagctctgtcttgtgactggctcaggtccatgtgcaattttgaagaggatgtttgaaaaggatattcatcattttaaattgctctgtgggagctttgcagttcataatgtgccacttaggtacttctcaaagatcagttttccttgacgtggtttacaatttaataacagcaaaagggcaacttggggtgttaggacagaaaactaactttgaaggaattaataagaaatgtggagtggagtggagaagagctaaataggtttgagatattggagcccaaaatgtctggcactggtaacttccattgtctggcaagagcgttgtcatcctttcctcagcttaaccctcaaatatatggggaaagtctgcttacagctttcagcatgactaaaatatgctttctcttgtggaaaaagagttaaaaacccagcaatgttatttaaccatactagtattgatgatcttgaagaaaatagaagattgttattgagatagttctgagccaaactcatctgctat

SEQ ID NO: 72865 - DNA, 1034 bp, Homo sapiens
taatcaaagcactttgggaggccaaggtgggaggattgcttgagcccaggagttcaaaaccagcctggcaacataatgagatcccatctctacaaaaaatgcaaaattagctgtgtgtggtaacacatgcctgtgatctcagctacttgggaggctgaggcaggaggattgcttgagcccagaaggttgcggcttagcgagctgtgatcacatcactgcacttcagcctgagcgacagagtaagactcagtttcaaaacaaaataaaaatgctattcttcatacacaatgaccacattacccatctaaattattgcatcaaatttgagatactaaatgtggcattcatataggaaaaaagaacagtgtcaagattacagtaaaataatcccacatattgtagttatattttggaacagaggtagtaagaaaaagctattccatcaccaatgcaaaactgatcattctaaatgattttgaaaaatttatatctgatagttagctctgtcacaaatcatttcaacatgcatattgatttcacaaatgaatttcctccttcagcactttctcatgacaatgtaattgaaaatcaaatcctatggagagacttttatagattggagtatgaatgtctctaagaccttagctttgctgggattactggtcaagacagtttgaagtagccagggtgcagaagaataagccagcaggcattgctgactctgaacacagcctagaacttgttcctggaagaaaagttgaagacaccaggggaaattttggagaagaggaactttgggactttggggctaatgaagcataacatcagaaggaaggggtagagtgcaacaaattattctcataagtcaaagggagcccaaaccaggaggcagccaaacctttaaaggggaaaaaaagaattcagacagaactgtggatttcatacagccttgtaaacagtgtgggataaattgtctgcagggtcactgaagcagagagtacaaacaagcttgaaatacttccatatttatatag

SEQ ID NO: 72866 - DNA, 1052 bp, Homo sapiens
ccctctccgctccactattttcaaataagccacctctgccttcatggactgcgagctagtgactctaggctgtgacaccactgcatcccagcttcaaatctccccttgcaggcagtttgtgggggaaataataaaattagcatcctaacactacaagtcgtgagaccgctcaggaacaatcctaatttgcatactggaactcctgtagaagatactttgaaccgctttagatacaataggatcaggtaaaacggcgctgccttgccagccactgcaggttttcacctgacacagcccccagaccctgtctacgaatcccccagctggccgaaggggccgcggccgcacatgcgcagtcagtcccgttggttgtgcgctcagccccgcccccagaggcgccgcgctccctgacagcccgcgggcgtacacacgctgacgcgcaggctgcggtcgcgcaggcgcagtcggggcgccttcccggtataggcgccttttaccccagcgtgtcctgagtctttggttcgcgaagtgccgttaggccaagcaggtgctaaaagcccggggtcgtggaccccggccaggtcttagcagcatggaggcgcagggtgtagcggagggcgcggggccgggcgccgccagcggcgtgccccaccccgcggccctagccccggctgcggctcccaccttggcgccagcctcggtggcggccgcggcctctcaattcaccctgctagtgatgcaaccctgtgctgggcaggacgaggctgcggcccccgggggcagcgttggggcgggcaagcccgttaggtacctgtgcgaaggggccggggatggcgaagaggaggctggggaggacgaggcggacctgttagacacttcggaccctccggggggaggcgagagcgcggctagtttggaggatctagaggacgaggagactcactcggggggcgagggcagcagcgggggcgcccggaggcggggcagcggtgggggcagcatgagcaagacctgcacctacgaaggctgcagcgagaccacgagccaggtgg

SEQ ID NO: 72867 - DNA, 1850 bp, Homo sapiens
ttggtagaaccgccagtgaaattttggttcaggacctcaaaaccacggcaaaactgaaatctgttttctgaaagatgataaggtcttggcctaacacgaactccctcaggctataaaacagtggtaggaagggcagcttccttaccccaagagagagccaattctttgcatttgccatatacccagcataaaaccagactgtggtctttgaagctgttcctgaagtgacagtggagagaaccgggcagcccagaaaccccaggcaaggagattgatcctgcaagagaagggggttcatcatggcggatgacctaaagcgattcatgtatcaaatgttacaaagtgttgaagggctccatgctattgttgtgtcagagttggagtacctgttattaaagtggccattgataatgctccagagcatgctttgagacctggtttcttacctacttttgcccttgcaacagaccacgggagcaaacttggactttcaaaaaataaaagtatcatctgttactgttacacctacctggtgattcagttaaatcatttacctttggtggtgagtttcatagccagcagcaatgccaatacagaactaattgtcagcctagaaaagaaacttactccattatttgaagaattgagacaagttgtggaagtttcttaatcagacagtggtttcaatgtgtaccttatctttattataacaacacaatatcgatccagcaatctttagaccataatacttttatccatgtcctcaagaaagggcctctttttccaacttatactgaagagcaagcatatagataaaatttatggacggattgattgttatattttctggtgtagggtcttttcttatttagtgagatctggggataccacaaaaatagttcagtctgtcacagcacccatggagttagtccagccaccaaatatggatgagattctattccgtggatcagaatcaaactggtacattgatccatttgagccattaagtgctctctattgtacaatctgcccaggcctgcagaatgaagcagattttttattgcgaataataatgagatatttttcttcagattatgttttatttcttctcattgagtgtgaggaacataaaatggcttagtaaaagcaataaaatcagtacagtcactagctttcctttgtacttattactttatgatatagatgaatattactgattggtttgattcttctcagagggtgctgctctttaatgaaaataaaaattatagctaatggtttttcctcaaactctgctttctataactaatcagtgttttaatgtttgtgtgttctttataaaatttaaatgtaattggttactgaattctgtttccaatattagtattatgtaaacatgatagtataaccattttttcatgtgagtatacataaaatagtattaaaaaataaaaaaataacagattgtaacaaagtctgtagtcatccatggatgcaaagattctgctttgtacgtctcttgtaccttaagtttgagctagcatgataatggttccactcagagtaataactaggaatcatagcctccacactcctcccacctcaagtctcctttctaaattttatctgtaactctgtcctgatgctgcagtttttctgcctcccattcggactttccttgaaagtcatctttcattccataatcactattgaatgctttcctaagtaccaggcacccgaattaactatatgaacacagagcactggcccttagtaaaggcagcctaagagagagatacatctaccaacgattatcacacaactttgtgtgtcaccgtaggggagtgggc

SEQ ID NO: 72868 - DNA, 1059 bp, Homo sapiens
tttatgtagaaataatcatatttatctgttgtgctgtatctttagttgtttcatatgtaattattttcagtaatgagcactcagtgagtagtttttttattagacttctagagccctcaccatatgtagtccttcctttctatagtagggccgtatgaaattttcactatttagatcctctcaagtttcatttcacttcaagatgttctgtttttgtttttagagaaaaccactccactcacttcagctttgaaattgtttaactttttggtccatgatttaaaaaattaaggtgctaaaggctcacaacgatcatgtagactgactttaaactgatacgttttctgctgagtttatttaagctaatttgtttttaattatttttaaatcacaggttctaaattagttccattctggagctggctacaaatgggtaaagacctactttttatacgacttcgatatttgactggtgcctggaggcttgagcaaactcggaaaatgaattaggttgtttgcagtcttcagttgtgttcttatgcttcagtgtcacatttcatttcatttgaaactaaaattttaagtaaagctgaaataaacttcttgtcattgtctgccttttgataattttaaagaaataactttccataagtaaaaaattatatatctctttggatataaatgatttttaaaagatgtttatttaaaaagtcagattttcttttgtttgtttagcttcattatcattataattctgagaaacataatttttgtagacagaagctattcttaccctaaagtgcctgcataactctcatgaacttaactataaactacaatcatgtaacagttttcagagatttaaaaataaagctagggtataagtttaaatgtacataaatttatccaaatcaaagaaacctatttcagcctatgaaactttaggaaattatatgttaaaggcaagaatacagacttagtcacaaaggtgttcatttccttatagtcttactcatctctagcactggaggccaaggtgggaggatcacctgagcccag

SEQ ID NO: 72869 - DNA, 1050 bp, Homo sapiens
aggaaggccctggggacactattagaaaagtaatctggatcctctgatggtagaagaaaataggcaaccaactctaaagtaatgtaaaacagtctcaactagagcatctcagagttttgttttatcagctgtctgaatcagttgaaaatgtcagttctttaccttgagctagtccagttaaggttaggattgaaaaccatcaatcttgaaattttccaggattaaattttttcttggaacccatgaggctagttttacctctgtgagtttctgagttgtaatagagatacaatattatgcaatgatattctaaattattatttgacttgaaacttctgaactactcagctttgaattatttgatttctgtgaatctgatcttcagatttatggtataagctttatatctgccatgtaagcttctttaaaacatgccaaggtagagatgtagttgtgttctatttgtctttaaaaataaatatcaatatattttctattttagggcatttgatgtagaactactgtacatagcacagttctttaaaattccaatagcagaaattgctgtcaactggacagaaattgaaggtgagtatattgtttattgtatgattgtcttgagtcagataatacagttgtttagtaaagtcagctggctttaatgttctccttgctcccctcatcaagcccttctcagctgtcttgactcaaagatccagttccaaggagaatagtacctactaataccttccatctggcttgctgccttttatattttttgtctgttcatggggccttcagtaggcctactaccttgtcgaagaaacttcaataaaacttcctacaatagacaaagtcatggtgatctgaaattagaaggttgatagtcttttgagatagataaatttattttttgcatcaccatttcctatattttttttatcactaggtggatattaattaggtacctgcaaaccactatgcaaagctaaataagaaataaaaattttttttatggccgagcaccatgcctcatgcctgtaatcccag

SEQ ID NO: 72870 - DNA, 1035 bp, Homo sapiens
tgagccgagatcgcgccactgcactccagcctggacgacagagcgagactctgtctcaaaaaaaaaaaaaaaaaaagttcaggtttctcatgtgttggagcacggagcccttgaccagtgaagaggcaaggccagggctgagcctaagtcacaggcagaaaaaagacgcagaaacattggaataacgctccacacgcactgcttgattctgcgctagaaaccctgttatctccgaactgttggtgttattctgagtcacagcaccagctcttttataaagagggagacccgctccttctttaacagcagattcgtcaaaatacgtccaaggcaaggaaacctagaaaggcgtctgggcaggggaaagtcgatgcgagggcgggccagggacctttcgtcgcgtccccaccttggcatttcccgtggcgtgagcggccccggcatccgtgtcgaaagtgcggcggcggaacaggcgcgcaggagaggagcggcgcaggcgcagacgcgcgggcgggaagatggcggctgggttcaagtgagtgttggcgggtggcgggtagagttctgtaccctggcggacggcagcttcctttaactcttagctgggattctctcacctggaggccgaccccgttggggtgccatttccttcctcgtcgaggcagacgatgggcgggaggacctggaggttgtcacagtgaaaagaaagggcttcttcctcagtgagacgggagatgaaaggactctgtagagttccatacccgctgcgagcgctcgtgagcgtggtgtgtagtgaacgtgcagtcccaggagacatagttgtaatcttttaaagattgtggccgggcgcggcggttcacgcctgtaatcccagcactttggaggacgaggcgggcggatcacctgacgtcaggagttcgagaccagcctggtgtacatggtgaaacactgtctctaataaaaatataaaaattagccgggcgtggtggcgggcgcctgtagtcccagctactcaggaggctgaggcaggagaat

SEQ ID NO: 72871 - DNA, 1020 bp, Homo sapiens
tgtggtctccgtggttgttaaagttgcaggtactgctaatgttactatggcttattgcttacagtcataattgaagaatatgctaaatttcacttacagtgaaaataaagatgtacctttttgtttcctgagttatctagtaagaggttaactattcatgatcactagattattaaaataatcttttttcatgatcactagatcactctgaatccttgtttcagagcaagaacgacatgattcttttgacacagattgagcttttaaagagctcactcaaagggcttttagacgccaatcttctaatcgtttatggcagagttaaggacagcaattgaatgtgattgctactacaaggatttttactttctagaattacttttagttaaaaagttgtggagatttatgctgcatcaccacacttaagatctttgccaatttctggatttatgttaagattcatcagtttatctcagatatatttttaacacgtgtttcagaaccgtggaacctctggagtattacaggagatttctggtgagtaaaggttatgtacatgttatgcgttttgataacgagctgcttttaaagatgaatttcaagtaatttaaattaatccatttgaagtaacatttaatgtgtgtgtaaaacttgtgatagatgtgtaaaatatgtaataggtataatctatttttatataaacatatttatttagaaagagaactgccgtcctgatggaagagaacttggtgaattcagaaccacaactgtcaacatcggtaaggatgtattttccactttcaactgtatgatattcccaagttttagtctatgaaccagccaaacagtttttcacccaaattctttgtctaaaggatttgatgattttttttgtcaagagatttttatccgtacaaaagccctgtaactaaatgaaaaatgattaacacaaattcaaggacaggtgaataattatttaaacactaatttaaaatagttatgtaaaaatcaattattcta

SEQ ID NO: 72872 - DNA, 1046 bp, Homo sapiens
catcatcatcggcatacaggcagccagtcaaaaagtaaaatgaagagaggcacgccaaccactccaaaattttgagtcttgcattactttttgttccttttttaaaaacacaagagcactgaatcaaaagaattgagtttctactttttgttttttttaatgtgtcagtattttacattgctagatgtacaaactttatacagaagcacaaccttatcatttttaaataaaaacagggaaatggtttaacaaactagggttggtttgcctaagtcattgctttttaaaaatggtttcactatacataatatatatggaagtgacctaagaaataatagaaacatctttcagaagaatgtagtttgatatttatttagtataaaacgtttgtgcacagtgttaacaaatacaatttttacaaatctgttttgaaaatgtggtggctgtttatttgggtttcatactcttaattacttcatccatcagttttttaacttctttgtgtcttgtaactgctcggctcatacagtcctgaagtttagctccagttagcccacttccacctgaaaaattattttgccaatacttttaatctcagttatcattccttttcaaaaaacattaatgtcatgtcaaattataaaacaaaaaaattggataatgtaaatcagggtacagtctcaagatctacaagttagtttcacaagacctccaagtgattctaatgtatgtcttaagtttaagaaccactgacatataccattaagatggaagaacattttaggtagctaagaaactatactaaaattaggtaaataaaatatcccatattctatttggccctccctaatttaaggctcacactgagttttcatctacatatgtttaggactgaagtggcgggaacatgcctggtttgtgaagacaacagagtttgccttcctcatccattactattgttaaggttcctgttgccagatgttcctcctctccagtagggtcaactataagcaaagtgctataaaaagaaaaaaatataagttatc

SEQ ID NO: 72873 - DNA, 1025 bp, Homo sapiens
ggaacatctggcaacaggaaccttaacaatagtaatggatgaggaaggcaaactctgttgtcttcacaaaccaggcatgttcccgccacttcagtcctaaacatatgtagatgaaaactcagtgtgagccttaaattagggagggccaaatagaatatgggatattttatttacctaattttagtatagtttcttagctacctaaaatgttcttccatcttaatggtatatgtcagtggttcttaaacttaagacatacattagaatcacttggaggtcttgtgaaactaacttgtagatcttgagactgtaccctgatttacattatccaatttttttgttttataatttgacatgacattaatgttttttgaaaaggaatgataactgagattaaaagtattggcaaaataatttttcaggtggaagtgggctaactggagctaaacttcaggactgtatgagccgagcagttacaagacacaaagaagttaaaaaactgatggatgaagtaattaagagtatgaaacccaaataaacagccaccacattttcaaaacagatttgtaaaaattgtatttgttaacactgtgcacaaacgttttatactaaataaatatcaaactacattcttctgaaagatgtttctattatttcttaggtcacttccatatatattatgtatagtgaaaccatttttaaaaagcaatgacttaggcaaaccaaccctagtttgttaaaccatttccctgtttttatttaaaaatgataaggttgtgcttctgtataaagtttgtacatctagcaatgtaaaatactgacacattaaaaaaaacaaaaagtagaaactcaattcttttgattcagtgctcttgtgtttttaaaaaaggaacaaaaagtaatgcaagactcaaaattttggagtggttggcgtgcctctcttcattttactttttgactggctgcctgtatgccgatgatgatgtagctgagctgtttgtgctgctgctgctgccatagccatt

SEQ ID NO: 72874 - DNA, 1485 bp, Homo sapiens
cataagctgcttgtttgtactttctaatgtatttagtgctcttttgtattgatgtataaaaagagtgaaatgaaaaatagcatgtgaattggaatagctaactactagcttgaagcagaaaaatttatgtttaagagtattagcatacttgggagcccaaagtaataggacttaaaaacagtttctaaataggtcttttttttaagggcagccaacttgttttttctttacctgtttcttcaataactagaagagtgacacatagcaaatgatccaaaaatatttgtagaataaatttaaatatttgatataaaatcatgtgaaattggttaatttttgtttaaattcttaatagcttccaggtggttcacttatttttaacactctgcagcagcagcaacagcagctctcccagtttacaccacaacaacctcagcagcccacaacttgtagtcctcaacagccaggggagcaggtatggattttctagccttccatatgcttttacatcgaatttataacattttttggtatattccaagcatacttcatttgctttgttagtgtaaacatttcctgtactgtttttattaacaatagtagcaatcagctattgggtgtgtattcctaataaaacagtcataccatactgaatagatggtatcacctgcatcttgcatagatgattgagatccagataaatggcttgctcttagccatacagtgagtggcagagccagagattcaaacctaggtctttgtgcccctatcactcatgtattttctaccccatcattatctttctgtttttaggattttgttgctattggaataaagatatccctattatcataaaatgtagggcagtgggaacacagacaaaaacaaatgtgtacactgccaaagggaaagaaattgaataagaattgcaataaatgacagtagaagaaggaagtacaagtgtttctaaactttgggtacactggagtcatctgggaaattaaaaaaatattgattcctgagtcccaaatccagagtttctctatctcacaaattatatgaaatattcaccattagtccttttgcccagtttcccccagtcaggtcttggttggataaagctcatcctctaatagagtcctcaggaagggcacattaaaaacttactgttttttcattctaaacacattaaagattgcttggctagatataaaatctttgattttcttttaaaaaaattaattttaaggtacacataaaatttaccattttaactttttttttttttttgagacagagtctcgcgctgttgcccaggctggagtgcaatggcacaatcttggctcactgcaacctccacctcctgggttgaagcgattctcctgcctcagcctcccgagtagctgtcgctacagacatgtgccaccacgcccgactaattttttttttgtatttttagtagagacggagtttcaccatgttagg

SEQ ID NO: 72875 - DNA, 1032 bp, Homo sapiens
tacaaggcttcgctagtgttacatgtgcatttcttcccttaaatctttaaaaaaaaaaaatgatatgatagagaactagatacatttttaaatagtgttcaaattagtatattttgttagcaaaatatatacataccttgagaccaggatcaacaaactacagcacacagcctaagctagaaatggttactacatttttataggattatgaaaagaaaatgcagcagaggccatttgtgctcacaaagcccacatgatggccctttattgaaaacgtttgtcacccccagctttaagatatgctctgtgttaatgtaacagattttttaggaataagtttaaattaacagagcactgtttcctgactctgttttgatctttatacacaaattgcaacattctttagcattctgattaacatttttagttaaaaaaaaatagcataaagcacaccggttcttagagatatgattattatagtatactatgtagcattgagaaatgtaaatagatgccaatacctggaatgtatttgcacagcagtgatagttttgttatattcatggtgttcacataattcttgattactctttgttcagccaacagtcagaagaatgaaaaagaagtcccagtttctgaaatatagaatataatgtgcatctggtgcttcacaactttgaataaaatctcagtattgataaatattgaagacaatcttttgtttttaagatatttttgaagtatggaaaataagcacatctatgcagagaatacataaaattattgtacttatatatactaaagtataaattattttcatgtgtaataaactttcaattctgttataaccatgagttttatttaacaggtgttccatttggtttaaaaaatacttcaagtctcaggcccttaaatctactccaggtaaacctgaaatactgcttttgattaaattttttgtacattgactttttttctaaacaatgtatatctatatgtatcagcacttgaaattctgaggtctgtttagat

SEQ ID NO: 72876 - DNA, 5061 bp, Homo sapiens
tagctaaggaagatgatttctagatagtactttaatcagaatctaagaaaggaattgagtattttctttggctgcttattacttaagtaatccctgtaatttctgtattagaaataagatattgaaagtatatctttagattgttatttagcacaatgttttggacaatttgtcattgaacagtttaaaaatatgtacttttaatacaaagataaattgcctaatttttaatatttatgttaattttgatagaactttctttttgccattaatagtcattattctttcctataaaataaatttgtgtttaaaacaggttttctaatctttacctgttttctcctgatattttagggtagtcaatcagtaccaagaattagtccagaatgaagccaaatgtccggtcaagatgtcacacagctccagtggctcagccagtctgagtcaggtttctccagggaaagaaacagatgtgtgtttcattaatgttacttctttgtgcccagttgtttcacaagtaatctgagaaatgttaagaatcatttttggaggctaggcacagtggctcatgcctgtaatcccaacactttgggaggccaaggtgggtggatcacctgaggtcgggagttcgagaccagcctgaccaatagtgtgaaaccccatctctactaaaaacacaaaaattagctgggcatggtggcacacacctgtaatcccagccactcgggaggctgagacaggagaatctcttgaaccccggaggtggaggtttcagtgagccgagatagcgccactgcactccagcctgggcaacagagcaagactccatctcaaaaaaaaaaaagaatcattttttgaggagcgggggtacagtttagttttgtttctacttttacctttttttaaaattatttaactctttataacatgatttttaaatgtacacaaagataaaaggaaaattacagtgaacacctgtgttctagtcatttggcttcaacagctgttattttcctttaatagataagtatggaagagtggaagcttgctttcatcttactcctctgcctttctccctaaaactctctcttcccaccctattactcagaaatcttttcctcattctttatgtgtactgtaatatatttcatgaatctcatgtgaaattttctctgtaatacatatagtattcaatctgtaaccactaagagcactttgcagagttaaaaatctgggatttatagcagtattaattttatttaataaactatgaagttaaatataaatatcatctggggtttatagcagtattaattttaacaagtaagcttaatgtcattgtcttttagcaaactgaaaccgtgtcagttcagtcttcggtattggggaagggtgtaaaacatcgacccccaccaatcaaacttccctcaagctcaggaaatagttcctcaggtattacatttcttagttttttgcagtctagaataacaaatattatataatcataatctctttttaaaactttgccccattttgatttctacagttcacagaagtttgaattataaatttaggaaataacttttatgttcttctaggtaactattttacaccacaacagacaagcagctttctcaaatctccaactcctcctccttcttctaagccatcaagtattcctcggaaatcatctgtggatctcaatcaagttagcatgctttctccagctgccctatcacctgccagctcatcacaaagtgagtcataacttaaattcttcattaaatcttcataagcttttgcattagtgtttcttaagacagcttttttcaacctgtgaagtagtgatatctgaatgtactgtgtacccaaaatgtataagttgctagaagcttcaggcagagctcttgttgattgtatgtattatgtctctattgtaattgtacttgtttttctgtatctgtgtatacattctgcgtgtacctttcttataggcttacaacctacacatctccttaaaaaaataacctggtagttacatgtggcaataagatttcaaaatattttttattccagtgtaccctaggatcattttgcatatttatgtaaattgtgtggctgatatgaaaaaaatgtcataagagttgttgctgcaggtcctatctttgtgtatatgtaagaagtcaactagttccaaggtggtgatacaataaactgaaaaacaatatttcaaaaacactcctacactcttttataaattgttgtcagttactaaaatgtgatgataatcataaagcattattctgaagatactgaaatgtaatttttactactgaatacttttttttaacatcaagaagagttatacaagaatgctagcattagtttgggagaatttcttcaaattagtaaatatctgaaagtaccaatttggggaaaaaagtcattccagttttttagattttttatagatagctaatatatgctgaaagttttagtacactgcacagtgatagggtggtcttcgcattagatataaacatcttcatctcgatagctcaaaaggtgtaatttttctgccttcttgttttgcacaaagaaaaatatataaattttctgaaagtcttattcacacttcttatgttgtgggtatggattatggtaatctactgcacacagttgttactttaagtaagggttgagtgacagcttctggacattcacatttctttcctttctttctgcaggacatgaaagctaaaaaagaaaacacctcaagagcttttggttttacttttttggtttttgttttttgtttttgttttttaaaaaattgataaactgtgcatacttcattcacaacagattttctatacattctacatttaaacagaagtacacagttactgttaaagatgcagtattatctctcagatatttgctttattactgttttttgtaaatttgtttgtcaggataaacttgatgtgttaggaattaaacatgtatatttaggtgccaaatatgattgttaaccatatgtaacttattaaatatgtttacagtttatctcagacttttacactaaataagcaatatttttaaatgaagtcttgaattagtgaaatcgtaaataacaaattaatttgaattcgttttgaactttttaggccaaaggcagcatgtaggaaactaacttttaaatgggtattgtggtagaatataactgtatatttttactgttactgcaatagcatctttaatgggatttttaggtgatatactgcatccttaattgtaattgagtgtagcaacactcatgtatcatgtgtagaaattaacacttgcagttaactgctaaaaaaaaaaaaactagaacaaattgtcagtgctaagtaagattccattaaccttattttaaaaggactggccatttataacaaactagcaatttttatttttctcaatgagcaggatctggaactcctaagccatctactcctacaccaaccccttcatcgaccccacaccctcctgatgctcagagctcaactcctagtaccccttcagccacccctactccccaagattcaggcttcacccctcagcccactttgttaactcagtttgctcagcagcaaaggtctctgagccaggcaatgcctgtaacaaccattcctctttccaccatggtaacatctataactccaggaaccacggccacccaggtcatggcaaactctgctggacttaacttcatcaatgtagtgggctctgtttggtaagtttgcattgatgttcggattttttttttataaagatagtttcaccaatctaaataaattcttaatgtgtgaaattaagaacaaaccgcatattactcagactgaaaaggaatagtttagatatggacagaagctgcctgaccatgtatgttttaattttaaataatacatctgttaactgcactaagatgatatctcatcttatcgtttttgttttttgatacttcatcttgacagcagcttagaatttcctatttatcttctgcattactttctttgatatttaagacagataaataactagttgtgtttgcttagtagttttgttttttaatctgaggaattgtgtggctgattttttccttttacagtgaagtttaatgctttgtcttattctcctgcagtggggcccaggctttgatgagtggttcaaaccccatgctgggctgtaacactggtgccataactcctgcaggaataaacctgagcggccttctaccctcaggaggtctgctaccaaatgcactgcccagtgcaatgcaggcagcttctcaagcaggtcagaatgttggaaataataacctctaaaaaaaattaaagtatatgctaaagtaaaaatgtaattttaagagtaatgctaaaggcatttaatgtcattatttcatgaagtgttgtatcacatatatttcacttaaaaagcctttaaaagttctggcatttgaattaaaagtcttctagcagtcaacttctgtggaaaacttggtaagcctgtgagtctgtgcaaatctttcttctgctttccaaataacaaaattaattttggtagccttattgtcattgtagttatattccagggaaaataagtgtattttgaaaatatacattgtgtacaagaggcaactgcatcgcagttaagagcctggattctggagccagactacctcagcttgaatcccagttgtacagcttaccatttgtgtcatcttgagaaagttacctttgtgtttaattttcctcataaataaaatgggaatagcaataaaaacttacctcatagtcgtgaggattaaatgaaatataatacaaattatgtgtttaaactgtgcctgagacatgataagcattcttttatttaggagtagttattacctatacaggaaaacagttataataacttgtgcttatttttttgatgctctttaaaataatgtattataatatcttgaaacgattcagtttcacttgaagaaaaatgtaataggaaaaacaatctaga

SEQ ID NO: 72877 - DNA, 1054 bp, Homo sapiens
gaggtgggatcttggctcactgcaacctcttccacttcccaggtccaagcaattctcctgcctcagcctcctgagtagctaggattacaggcacctgccaccacacctggctaatttttgtatttttagtagagacagggtttcgccatgttggccaggctggtctcgaactcccgatctcaggtgatccgcccaccttggcctcccaaagtactgggattacaggcatgagccactgcgcccagccttaaagagcaattttaatgaagaacttcatttttacttttggtttgcgtattggtagttctgatttgttttgtttctaattaataaattcttctaaggctggcttttaacagaagtgttctttataagttttcctaattgcaataataacgtcttaaaaagagaggaataggtgtaatatttaaattaggtgaactctgggagtgaaatgatgacagatgttttttgtgtgtgatagcaaaagcagacaaatgataaatagatctgcttttgaaagttttatccttttaatattatttaatatttgcaattcatatatctagtatgaaattctgccatattaagcttgattaaacatgccatttaaactctcattcccagagtaccatgtaaaaaagaatcctgtactgccctcctgagcataaacaggcacggcagcatgaggatcaggggtgcaagcttagggacagactgctaactccctgtgtgaccctaggcaattcatttaacctctctttgcttaattccctgacttctaatacggaggtaataacagtgccaaccatgaaaatatggtggagctttcagtccctgtagagtgctgagaacagtgtttgattaatgttcattgttattatatgtatatcaatatgtctaataatgtatttaatgatgtattaatattgttacatatgtgttcatacttcatagtatatgttaatgctttactaaatgcatgctgagtgcccatatagtttttaggaaaagaaccgtgctgtgctttattctcataggcagacttaaatat

SEQ ID NO: 72878 - DNA, 1169 bp, Homo sapiens
ctctccccattccttccctaatgttgccctccttatcccatactctccacagtactcttttgcttctcttactgcttcttggtgtctgaaatctgaaattattttatctgtttacttgtgaatgtctcctccccctctggacttgatagctctgtggtgatgggaattttgtttgtcctattcatttttatttcacctagtcctagttcctaggactgtgcttggcatgtggcagtgttctataaacacgatttgtacatattcagcactgactagtttcaactcacatatattatgagtttcttttattagtgccgtttagttcaaatttcttaatatttcaggtgtttcaagaggtattccagatcctctctgaatcggcagcaagatctatctcattgtccacctcctcctcagctgaggttacttgatttcttacaaaaaagaaaggaaagaaaagcaggtcagcattatgacctcaaaatttctaaggcaggaaatgtaagtatatatattttaaatgaagcttattatgcccaaaagcctgtcttatttagcattttcagtatatttatattgtttttaatttttcagtatattgtttttaatttttcagtgtgtagatatgtggaaacggagtccctgtaatttggccataccttctgaagtagatgtaagtcagttcatgaattactttttttcatataaagtttctcagttttactattcggttgcttataccttgagaaaacaaaaaaaaaacttactttaaaaacaaagtgatttagatcatactctaaacaagttttttaaaaacaatatgatttatttcaaaaaacatcgaaaaatgatttttagaagctgtgtattgttcttttttcacattaagttgaaagaacataaccccttaatatagttttttggagcaggaatagtaaaacaattttaaaattggaaaaatacagtgtatattacataatcacgtgaaatctctctttttttgataatatttcatcaaaatttcctaatagtgcttgtttactcaaactggttaaatttgaagattaataatattatttgacataaaataaaataaagattaataatactagagaagtaaccaagattaggaacattgggttgtattctttattgatccataatataca

SEQ ID NO: 72879 - DNA, 1049 bp, Homo sapiens
caggcagtccagtaacatgaaatctcctggttaccaaagtcggcacattctcttacgtccaacaatgcaggtaaggatgtttaattaagaaatactattttagattttagttgggagttttatttatcgaattcttcatatgtttgtgcatagattaataagttttttaaatttttatttcttctagactttaatttgtgatgtacattcaataacaagtgataaccacaaatggacccaggttagttgttttgttttttaatctcaaacaggcaaaatataggatgaaaaaaaattatcattaagcaaaagtgattttctgcttatttttattcaataattaagtttgatgctttatgtgaaaagctggtattcctttataagatctagaagttaagggtctctttatatgtgtagtaatccctcaagttgcctaagatcattttaaggtcaagctggcctaatatattcaatgagataaaacttagttctttatctcctctcaaacagaagaaaaatgttttgtttttaccatggttacaaatagatactggttttttttttcaaataattcaagtttctaaaccctagcctagcctatctttctttgccatttatactggttgccttgaaatgaggggaactctcttacccctgagaataaccagttaacccctccagttctggctcagtgttatatgaggggacttcagaaagtttgtggaaaactggaattaaaagataataataaaaaatataaacttttcttctcaatataagctccatcaagttcaagatgcttgtaaatgatatcaaccatttatttagtccacccctgaagaactgagggtcctgggaactgaaccatatcaatgcaatcttttctacattattaactgaagaaaaatgggtactttttaaactttttttttttaagattaggaaacaaaaagaagtcagaaggagccaaatctggactgtaaggtgcatacctaatggtttcccatcaaaactcttacaaaatttctcttttttgatgagaggaatga

SEQ ID NO: 72880 - DNA, 1002 bp, Homo sapiens
tataagcatttttaaaatcatggactttgttgtggtttttaaggagctgttgaattggatttatagaaaatgtccaaattgcttacttcgtcttaccaattagatatttttaggttcaacatttcagcttagagctgttgaacttgtttgtatcttatttagcctataaaatatttaagaaatgtgcacttcttagatacaaccaaagagaatgccccaaattctttaggttagacttctacttagtggaaactgtatgcttctgtgttttatatatttgcatttaatggttttatatactacttatttaaatatttttatttcttaagtattcaaaagtacttgttttatatttaagtgcttttattgtgttataggtcacccatttttaaaatatgaattaatttgcataaaacatagtagtaaataaaaattaagtttacatagctgtcccatacgtagtggctatagttttgtgagccttctccatttattcagaatcataatgcagaaagagcaccaaaaggttaattcaagcctgattttgttaaatcatagcattatttgttaaggttatactggattattttcatgagctctgcctctttttaaagcagaaattaagaagaaatgtgaacttgttagagaagcttgttatgcaagagactttgtcatgtttagtggtcaatctatacccaggaaatgagggatattctctgatgctcaggggaaaaaacggatcaggtaagaccctctagagcacagctgccacaaaatacttttgctaggcaggatgtgcggtttttttaaagtagttttttaacctgctaaagcatttgtccttcagatagtgatgacctagtgataaaaacagattttgatcccagttttcttccttatgatatgttttggtagaatattagaaattatctctcttacaattatctttcctgaatgtgcattttagaagtattctaattgatatgtctttcaagtccaatt

SEQ ID NO: 72881 - DNA, 1010 bp, Homo sapiens
gaaggcggttttcttggtgtccatattgcataaaggcttgtcgctcctctgtggagatgacggttgtacaggtaaagcctaagttgtgacaaaagctcctgcaatgggaagactctggtcgatcagggaaatcagtagaattgatagcaacgcgtagaattgatagcaacgcttagaattggattaattactggccatggttacccggcgctcagaaatgaacttggagaacagttgccctggaagccatctcccgtagccactgcgtagtgggggccgcgtcttcttgagtgcaattcatcaaagtctctagtaggactcaaaatataaagtgacgagcaggattttcggagtcgagtacagtgtacttgggttgatcaccatgttataaagttagatccaaattaagaaatacatattcgtctctgagcagaattgggtcctttttttaattgctttgctttttttaaagaaatgtaaaaacagatgccggtttgattagtttgcaggttgtaatattggaagggacctaagattggacacagagttctgaattctgatctaggtctgtgatgttaggaaagtcagttgttctgattgccttattctgtaaaacggaaatgataatgattacagtttcctcacaggttctagtaaattctgtgtatagacagaatgtttgctttgtgagagatatgaagttattagtttttgtctgaagtacttaaataatttaaagttagtaagcccccatccccaatttagtgacaagaaatcttaaagtcatcacattttgtccgaaaagtacatagtgtatcttcatcttcaaattcagtggtcagaaaattttcacgttcacctaaattcaacttaaacctcctacgagcttttcaagggtaggagtaatatcttactcattgtaaatgatcgtaaatcatttacagttgtatggtgcttgtgtttgtgttgtattaggaggttagtccattttttaaagtttcagacggagt

SEQ ID NO: 72882 - DNA, 1046 bp, Homo sapiens
atttgtattatatttgatatacatgactattaaatatatatgtttagtgaaatgctttatgagaaaatacaaattaaaatctcagatataagaggctggtcagtcattgtacacatacatacgtgtgtgcacacacacatgttaagaagatattatttaaagctagaaaattgcttaagagattttaatcagtgacaaataccatgaagatatcctttttcacttcgtcatcaatgtatattagaaaacatgcataataaaggccagccagtataactcattgatcttgtatccccaacaaaggctaacagatgcttgcaaattcaataatctgtgtggtcattttcacttaaggtgcttgctgtaaatataattgtcaatccgtctatatctatctatctatctatctatctatctatctatctatctatctatctatctacagaattgtgcactttagcatatctcaaattatgctggtgacaactttaagagtttattttgcttctcagacagttgtcctataaataatggtgcaatctgctgtagtgtaatctatattattggcagaattcttcatgtttgtgcatcaagtatcagcaaaaatacattccacattttcatattgagtaaaacattaacctttgaatctcttaggatgcactttataaatataagcagaaataaaaaagaaatattcacaggttttacatatagacaaaatggggctcactagtacttcaaaattaaaagcactagatcatagacttaaagacatatggcaccattatttagtccttgtcaaaattttcaattaaattattgtaaaagtaatatatattctgtcacaagaactatgagttttgccttaacaaccttctttttattgttttgacaaaatttgccattgctttaatttgtctttatttgcgtaagtctctaagcccaccctttttaaaattatagatgtcaaaacctctttagttttaaataataaaaaaatgcatattgaatttggtgttatttttggttattaatttcataag

SEQ ID NO: 72883 - DNA, 1332 bp, Homo sapiens
caaagtgtgagtagctcggccgagatgggccttttggggccggacaagacggggctgggttggggatgatccgagcttttccaacaactaccccacgcagtcttcatctcttcacttcatctactttcctggctcgcgcccttccaggagcctttcccaccggagcctgcgaggagaggtccgtacttgctcgctaagtgtcagcttggcagcttggccccgtcacgagggtgtgggtgtgtttctgattagtgacctcccctcggaattcatttggtgggcaggtggcgcgggaggacaggtggaccaggttctggtaatttgttgggattcttaaacagtccccatctgctggatattagaaaagcgtttcaccgctttggccagctggttgaggaagttaaggaagacattccatcttgatagtcaagactttgaaattacttgaacatttgttattccgcggcttctgagtttcgttgtgtatgagtaactcagcagtcgggcatcacaaagtaatgagactcagatcacacccttcctatgctgggatttaatagagtatttggtaggaatgggaaatgcagataggggatagtttatccatgtggggcctttacttatccttcgcagttgagtgatagattttaagtaaacactcttgaggttattgcagttggaagtagcatgaaatgtagcaaagaacaggattacaatagaattttttgcataattaattagtaccttggcctacctagctgactgataaatttcaatgatttaccaatccatgatccgtacaacctctcagccttttcctcccttgatcttttcatctccaaaatatccctgttacactttatctcaggtgttcatggttgcagcctagaaccttaagattccaataattgctccatctctgagatgtcgtttacaggcactcttatggataaatacattctctcctacatgatttactataatttctcatctacaacgtttcatttaatccattaatcacagtgattttttatctgtagctatccccacttctattccttaccttactccttatatagttaagagtccattggtccacctttaaatcattctcatgcaaacaccctcaactctggtggccctgtctctcctctcagcatattttggttagtgaaacaccaactctgaaaccagctgtttgtattatctgtacatagctgactgcccctggagaaaataacagactggagggtttacattaaattcatgactacaattaatagtacctagtacttaatacattcttcaagtttgctcattttcctccttatt

SEQ ID NO: 72884 - DNA, 1119 bp, Homo sapiens
ggaagtattcatgattaaattattcacagttacttgatgaaagtattcgtcagagttttcatggctggtgttattttaaattttaagcgtatgttggattgtgaagataggagaataggaacaagacttaaaaagcttggaattggggtctcatgatgcttgagcttttgtacccattttactgtttactaaatcatttattatatttaataattgtcagaatattaagataacttgatttttagatatctaactttatgttttgtttgtttgtataggaaatgtttttctaaaacatggttcagaactgcggattattcctagagatcgtgttggaagttgttaatatctgctacttggaacatacgattgcctttcagaataaatattggtattttttgttgttgtaaaattgaaatcaggcatttaacatactatgaaaacaccaggagtcaatgattaatgaaaggtgactcatctgtccctttttgttgtccatactcttcctatgaagagggaatgcgtatgaattaaggctactactgtcacagaagatcatagtctttgatgctacctcacaacacaaacaggtagttcgttgggggcaaatgaattagccaactgttaactggaagcttttgataatttttttttttagaacaatttggaacattaaaatttactgaatcgtatatattcatctgagataaaaatataaaaagaattatggaccctggatggcaatttgcttgatagcatctgatttgcagactcataatttgatttttaattaaatatataggttgtgatgaagtgaatagacatatcagtgaacagttaactatattaaatttttatcatttactttttttaagattcagacctcagttatataaatttcagtttaatatcaaccaaaaaattaaaattttaatctaacccttatgtgtataaattggtgtcccataccagcttttaatggtggacctatagaatccagtacttttaatggtgggaatttacagtagaagcatcctttgctgagttatacattcctttatcaatctcttttgatacaacatttaaaacaagtagcttcaagaaaccactggtgttttg

SEQ ID NO: 72885 - DNA, 1083 bp, Homo sapiens
caccaggcttctattaaggaggaaagcaacagaggaaacagtgaaggggaacagaagggggtagcaaagtgttacagaaaagcggactggatagacaaaactgcagaaggtgtatgttggggagaactgaaagggaaaacaaaatacttgacatagtcttaagtagaagaaggcagttagagaaaacaaagtatctactggccttgtcaacatacagacttcaaaataccccttatgagaatccaaagaatgatgtgtgtaagggaagattttatttgcccttccggaagaaatcagtatctatgcaaatcttgaaagacgaaatcaaagcccattaatgattcagaatcagtgcttgacctcctgtattctgaatggtgaactctggaagcagggattgtgtctggctctttttagagctggaaatgtagtggctttcattaaatacttgctgtaaagtctttctaagaccaattattatcttagcatgtttcagtatcttctctatcataggccctaagttcattgggggaaaaaaaataagaagattcaacagaatcagcatttgaagtgtaccattggtagttgtttatgaaattaccagatattcataaatgtgacaaatgaacagcaggattatgaattatcaaaggaaaaagtatttgctgaggtgaaaaaatctgatgtttgaggaagtttttatttttatttatttgttttgtttttttttttttgaggcagactctctgtcgccaggcttctcctgcctcagcctcacgagtagctgggactacaggcatgcaccaccacgcccagctaatttttgtatttttagcagagacagggaggaagtttttatttttataaacaaaatctgatgttcagaggccccgtttcttacaataaatgttgagtcttagttaagcaggaatttatgaacacccatttcctgactttttgctttaatttagatttttctccatcctgtttctagcacaaaaatttgcctgctgtgttacaaaaataaatttatgttgtcctgtgccataaagtgatatatttaatatttttattctttggttt

SEQ ID NO: 72886 - DNA, 1125 bp, Homo sapiens
ggggtagtaatgcatacatcatattgattagtccccagtcatcagctcaagtttccaacagaggctgaaaggttgtgctctggagatttcttagccatgtatgttctatgtacacaaacacaccattcaaacaattgaagttgcttgcttacttatttctagtagccatattgctttccattgcctacactacttaacaaagatacaaagagttctgctcagcattcaataatccttttgatacagaaaagtgtgggcacctaaaataccttctaaaagaacaaagtgtaagcaggaagaagctattaacatagaggaaaatgggaaatggaagcagcagagccaattataggtacatttctgcctgttgaagagacctcaaaatagaagatttaaaaatctgtctccaaaagctttttttaaagtaaaaattttaaaaaggtatcataggccatatataaaaaagaatatccatcctgtctaccaaagtaagtgctttcttcctcttccttgattgaaggcacaagataattgtctcttcctgatgctttgtttaaggattctaaataaaccagtctcaggtggcccccttaagagcagtccccctaggaatctgccactgaatctcgaaactataatttgttccagacactctgtacaaaatacatttctttcccaatctctaaacttgataattagatgtgtttagtcagaattaaaaataaaatcaagtggaaagttattcaggtgcaagttattaacctacagtgatggcagaacagaaggggacttcaccaagtaaactcacatttttggtgcaagtcacatgttttaggtactttgctaagctctttattgaacataccgctttattcttgatgataatctattaatataatattttgattttgtagatgttgagagttaagaaatgacatatagaaataaatggtagaagtagattcaaacccatgtttgtttgactccaaagcttatatttcttcctctcagttccagaaactgaggcatagggaaagaatgctcagagcatgccaaactcatttcttaccttctcatcatatgccttagtatgtgtattgggccgctgtaacaaaatactatggg

SEQ ID NO: 72887 - DNA, 2115 bp, Homo sapiens
gcgtgggcatcctgtccggcttgggcgcgctgcctcgctatggagaactcctccactacccgcaggtccctggaggagccagagagggaggcgccccggagactctcctgatggactgcaaagctttccaggaactaggcgtgcgctatcgccacacagccgccagtcgctcaccaaacagggactggatacccatggtggtggagctgcgttcacgaggggctcctgtgggcagccctgctttgaaacgcgagcacttccaggttctggtgaggatccgaggaggggccgagaacactgcacccaagcccagtttcgtggccatgatgatgatggaggtggaccagtttgtactgacggccctgaccccagacatgctggcagccgaggatgctgagtctccctctgacctgttgatcttcaaccttacttctccattccagcctggccagggctacttggtgagcaccgatgatcgcagcctgcccctttcctccttcactcagagggatctgcggctcctgaagattgcctaccagcccccttctgaagactctgaccaggagcgcctctttgaactggaattggaggtagtggatctagaaggagcagcttcagacccttttgccttcatggtagtggtgaagcccatgaacacaatggctccggtggtcacccggaataccggtcttattctctatgagggtcagtctcggcccctcacaggccctgcaggcagtggtccgcaaaacttggtcatcagcgatgaggatgacctagaagcagtgcggctagaggtggtggctgggctccggcatggtcaccttgtcattctgggtgcttccagtggcagctctgctcccaagagctttacagtggctgagctggcagccggccaggtggtctaccagcatgatgacagagacggctcgctgagcgacaacctggtgcttcgcatggtggatggaggaggcaggcaccaggtacagtttctgttccccatcaccttagtgcctgtggatgaccagccacctgttctcaatgccaacacggggctgacactggcagagggtgaaacagtgcccatcctgcccctttccctgagtgcaactgacatggattcagatgattctctgctgctttttgtgctggagtcacccttcttaactacggggcatctgcttctccgccaaactcaccctccccatgagaagcaggaacttctcagaggcctttggaggaaggagggggcattttatgagcgaacagtgacagagtggcagcagcaggacataacagagggcaggctgttctatagacactctgggccccatagtcctgggccagtcacagaccagttcacatttagagtccaggataaccatgaccctcctaatcagtccgggctacagcggtttgtgattcgtatccatcctgtggatcgcctccctccggagctgggcagtggctgtccccttcgtatggtggtacaggaatcccagctcacaccactgaggaagaagtggctgcgctacactgacctggacacagatgaccgagaactacgttacacagtgactcagtcccccacagacacagacgaaaatcacctgccagccccactgggtaccttggtcttgactgacaacccctcagtcgtggtgacccattttacccaagcccagatcaaccatcataaaattgcttacagacccccgggtcaagaactgggcgtggctactcgagtggcccagttccagttccaggtggaagaccgagctgggaatgtggctccaggtacctttaccctttacttgcatcccgtggacaaccagccacctgagatcctcaacaccggcttcactattcaggagaagggtcaccacatcctgagtgagacagagttgcacgtgaatgatgtagacactgatgttgcccatatctctttcactctcactcaggcacccaaacatggccacatgagagtgtctggacagatcctgcatgtagggggtctcttccacttggaggacataaaacagggccgagtttcctatgcccataatggggacaagtccctgactgatagctgctccttggaagtcagtgacagac

SEQ ID NO: 72888 - DNA, 1318 bp, Homo sapiens
tggaacctgtggaggaccgatttgtatttcgttgttctgatggcattaacttttcagagagacagttcttccccattgtaatcattcccaccaatgatgaacagccagagatgtttatgagagaatttatggtgatggaaggcatgagtctggtaattgatacacccattctcaatgctgctgatgctgatgttcccctggatgatttaactttcactattacccaattccccactcatggtcacatcatgaatcagctgataaatggcacggttttggtcgaaagcttcaccttggatcagatcatagagagttccagcattatttatgagcatgatgactccgagacccaggaagacagttttgtgattaaactaacagatgggaagcactctgtggaaaagacggtcctcattatagttatccctgttgatgatgagacgcccagaatgactatcaataatggactagaaatagaaattggggataccaagattatcaacaacaaaatattaatggcaacagatttagattcagaagacaaatctttggtttatattattcgttatgggccaggacatggcttattacagagacgaaaacctactggtgcctttgaaaatatcacactgggcatgaattttacccaggatgaagtagacagaaacttaattcagtatgtccatttggggcaagagggcattcgggacctaattaaatttgatgtgactgatggaataaatcccctcatagatcgttacttttatgtgtccatcgggagcattgacattgtcttccctgatgtgataagtaagggagtgtccttgaaagaaggtggcaaagtcactcttacaacagacctactaagcactagtgacttgaacagtcctgatgaaaacttggtttttaccatcaccagggctcccatgcgaggtcacctggaatgcacggatcagcctggtgtgtccatcacgtctttcactcagctgcaactggctggaaacaaaatctactacatccacacagctgatgatgaagtgaaaatggacagttttgagtttcaagtcaccgatggacgtaaccctgtctttcggacattccgtatctccattagcgatgtggacaataaaaagccagtggtcaccatccacaagctggttgtcagtgaaagtgaaaacaagctgattactccttttgagctcactgtcgaagacagagatactcctgacaagctcctgaaattcactatcacccaggtgcctattcatggccatctcctattcaacaataccagacctgtcatggtttttaccaagca

SEQ ID NO: 72889 - DNA, 1989 bp, Homo sapiens
atgtcatttttgttgatttatatgaagaaacctcagcctcacgacactgtcccttttatgaagaattttatcatcatgctatatttaatgattagaaattgaatttcacccttatatagaaaatattaaaatcatcccgtttatagcaatcctcatattgcaaattataaatgtaccctttaggttagaaattatgtgattgagtttagatacatagaagcctatgacagaaacatgcacagccggtaatgtctatatttgaaagtgaagttcattaaagaaaggaattatctgctctcttttatggttctctctgattatatctgtgaaaaggataactactgctttgtcatttcagtttcaatttttattcttagtaaaaaaatcatttattgaaatagtaattacttgaattactttttatcatcacagcaggaaattatagcaagcgcttaaaaaaaatgcatactcaggaactacttaaaaaaacgtaaatggtttttgctgaaaagcttagcatacaataatgaggagtccaaaaatgtttttgttactcctaaaacagagtggcttttcaagtaggcctagcagctgaggttctgttgtctgaaatctgctccaggcagtgagcatgggaggagtcaggagtacctgcaagattagataataataatgactgtttcctctgcctccctatctgaggagccatcgccaccagtatttccaggcaattaatgtgggaataagcaggagttagttcaaatgactcctcacagtcacagaggtgctgttcgtgtaaaatctgacatccccatgtctttaggaaaaggaagagccttcagtggcagaaggaggagcataatcttccaggagggaggccttgtgcagaactgagatcccttaggctgtgcgaaagggcttcagtgtatcctaaccgcccctagacctagtagcacagtactagactagattgcgctgtttattcagcccagcttttctttgcctcagaggctcacttaatgatacaaggtatctcaaaccttgaaagataatttttaactagaaagtaacctatttgtaagaatgatttttagcaagtggttctaactggcatgtgttttctggccttagggagctacaaaattgtttcaaaaggaaacaaatggacctaaaaacaaatgactggtaattgtggctgagaggcttacgtatgaagggaacttgtttaaaagtgccatgattttattaactgatagatcatcaaaacctctctgtaaccatggaacaggtattgtttttaaaaagctagaaaaaaagtacttatatttcattataagattttatgttattttaacatgtgaaacctttttgacggtttacaacaaaatgtttctatttttacacacaaatgtttatttaatatggcattttctttctatccactgtcaggtatgcagcaagatcttatatagtaagactgttttgaacatgaggattatggaagaaggagacccacagttcatggttaaacctcatctattagaaaaataaagaaaaaattaatgggtagtcctagtttaaataaatactgaaaatcatcatgtaaagaaatttatattgatgctaaaaagtaaacatttccctttggtggaaatttaaattacccagcagacagtgttaacttttagtgaaagatgcacagatacataactcaaatgcaaaccgtttgttttttttttctgctttctttttttttctttctgttttcttctttaaagctcactttgagtggccttgcatttggcagtctccctggctcaaatgttcctaccccctttccctacttaaacgaatttctccatgtttggagacttggattgagcacattctcatcatgggaaccattactgactaatatgaagccacttcgtgctcccctacccaccagaatcctgtgagtgtatcatgtgtggggatttcagtagtgtg

SEQ ID NO: 72890 - DNA, 1080 bp, Homo sapiens
ttatgcttaagaacagtatttgagattacagcctgttaaatggaaagaccactaaaccaggagtgaaatccctgggaatttaaaatgctttgtaatcttattcacatcccaccctttctgaatcttagtgaaatggagcattgagaaaagatggaatccagcattcattctgctctaaaatgcttggcatccgtttatattattcacacacataatcatttcttgagttagtttgtgttcttatttagaatacagtgttatacttgcattttcaggaacaaataattctcagccactcatatcacagtgttaaaatgacaaaattagcttgtaatttagactccaaatgataatccaataacctgaatgttgtaaatgagagttcatgttgcagttatgtatttgctttgtcctttgtcctctgtaggtgtacacctgaattccttatcctaggcatgcataccagcagtacagacattcattccactaagtgtaagctcccaattaggaaagtacagtgttacccaattaaatcaggtttgatgaaggaaatatgcttaaactctaggtgaggggatgtaaattcatgtttcttccttccttttcccccctttttgttgcaggggatcaaaattaacacattctttttattttattttattttttattttattttattttatttttgaatggagctgggggagggggctgtgcttagagaaatgcagaggatccctgcaggctcaggcttgcagattcccattccaacctggctgtggcctgatgatgcacattagtcagcctggaaggaggattttccttctagcttccctggattttggctttggctccaaattaattcatcaaaccagagggtcttaaatcctagcttgcgttaattttttataaatccatctcaaatatttattaaccggctttcataccctttgctttgtcacataatacttatcatttgagggcctcactattcactagaatgagagctgatagtagagggaaactcactcggatgacagttttgcttctttccaatagcactaatttataaattaagttaag

SEQ ID NO: 72891 - DNA, 1030 bp, Homo sapiens
ccacttggccatttatgacttagattgtgagtcagagaattctttcatggaggagtttcttattggcttatattttatagttagagaatgtttcttattttttttataatatccaggaacacatgcaaaagtaaatgtgaagagttttaagattgtataacttgtaggagtaaggatattgaacaatgtgaatatacatttacttggtcttgtttgacaagaagttctaatccaaatgtagcttaaagcatatatagcaaaaccataattgaggcaaaagcagaacagaatcacaaactacccaacacctacagtgaaacactttcatcatcagacccattcccaattttccatttcatgaggtcaaagcaggatcaactttgcttttcaggataaaatgacatgcaaaaagttaacaaggaaaatcttaataatccaagcgaaaatgaaactaagaaaatgatattatgtttttgtgaaggtattggcacaagagacagaactgcagaaaaagacaaagacttcaagggcaaagcacagaaacaagtgcagttcaacccaggccagaccagggccacatggcgagtgcggatcctgagtgatggggagcatgagcagtctgaaacctttcaggtggtactctcagagcccgtgctggctgccttggaattccccacagtcgccactgttgagatcgttgatccaggagatggtaagagccatcgtcaactggtttatgttgttgctgttgggctgctatgacaaaataccttgtaggggtatagcttacagttttaaattcaatgtttgaaatttccatagagagaaccttctagattaatgattcattattctcagatgtgttgacaggaaaatggaaactaaaaagtaacgaaagaatgctatatatgtataatatgtataatatataaatatttatatagtatatataaattgtattaatagattttatgtatatataaacataattatattttccagctagtacaattttcatattaccagaaaa

SEQ ID NO: 72892 - DNA, 1036 bp, Homo sapiens
aaaactaaccattttgtataatttacactgaagaatgacctttctccccacaagaaagtgagcacagggagctgtggcaggacatagggctggttcacccagaaatgagccctcaaattcatggagtgtaaatttacagatatgtagtctgctagagtggttttaggatatcaaggttgtggtaccgattaggatcatgctgttcacaatattaaattaacttatgtctttattttttagggctttgtagatatcatatatttttatataatcatagctatcatgaacaccttccaagatgtgctaaatcttttacctgaattatttaatacacatatgcacatacacaaattatgagccaagttttattatgcctgggttttatcatctgtgagtggttggataacttgcccaaggtcaaacagccggtaagcatttagccagcctgactaaagagactatggcattaacaactacgcagcacacttcatattatactagcagtaagtatatttaatatacacaatgaccttctgattctacaatgtaatactcaaagttattattagttatcctaatagggaagtttacaagatgaaacaagctatatatacttttatagacatatagcacctgaatattgataattgaaatgtcatagataatagaataacttgtaaatgaactattcttgttgatcttttatcaattataactccccttggatctttagcaaagcttattagtgcagtctcaatctggtacttcaattggacaaggaatagcactgctttttccacatcatctagcaaatgacccggtgaaaatggttgcctttctgaaagattgcattttggctctcttgtcaagtcctcgtggataaatattgtcttgagtttgttttgtctttttcccagtaacactatctgcctgattcccatctcttccaaacagaaaagtgaatgctggccatgcaatactatcttacagacatcaaagaatacatatttctgatttattaccactaaaaccctgg

SEQ ID NO: 72893 - DNA, 1055 bp, Homo sapiens
ctgcattttactagccagcaggaaaacagagttaatagtgcacctcaaatgtaaatctactctcttaagtggattaaaacctatttatgctctgttcattttgttgttgtctttttttctccatgtttcattttgaatagtttctattttagagctatgtgacaggtaatatgataaccctgagttatgattccaaattatttcaaatgttttaagtccgtgtcttgttttagaagatgtatatttaagttaatcttaatgaggatttttctgtggttcccaacctccacataggatctcttgtttccatctgatttctggagccaaattttatcaaactgctaaatttcttgggaaagcttcagaggtttctttaagtctataaaattaggaataattctggataactcaaacctatttctatttacatgtccgaatctccatcattttgacaattttgtcatgcctctcaatttacagcttcatttttataaactcagattttaaaaaaacttggtctattgtaagtaatctgtgtatttcatagtgacttcactcatgttacttaataattcattttggctcccttttctgcttagaaaagaaaatgaagatacttctgcctctgttattcagaattcttctgataataccctttgcccagaatgtttaaagacaagtcaaacctgaattaatttttggaaggaatctgtacataaggggtctctggctacatatattttcattcttggtactctccccattataggttctctctatccaaccagcatgcgcatcggtgatgaggggcgcttggccgtgcacttcaagacagaggctcagttccatggcttatttgtgctgtcacatcccggtaagccccgttatcttttaacaaccactcctcacacaaaaaggaggtagattttccatcttcacacatttcagcgtgcttctctgttaccactgaagcccttaatctcaaatgaattgtacatgtgggattatctccatgagagcttgataattgttcagcttcacctcataatccacaa

SEQ ID NO: 72894 - DNA, 1058 bp, Homo sapiens
ttctaataaactgaatctttgtgtagccatgattgcaggcaatctaactaaaatcagactccattcataaattgggtttgcccagctgtgtggatactaatagactattttaagttcagctcgtaacttcagtgcacaataaatgcattcacatcaccctttattgtgctgctgtgactccccagaaagtagctctgaacaatttgagcatttctgtacaattatcttttgacaaaactatagagcagaaacagtactgaagtaggaatcagaaagtcacatcctagctgtgtgatctttggaaagtcacacagtcactcacagcccagtttcttcatctgccagaggaggataattatactaaccatgactgctttgcagccttcttataaaaacagaagcaaataatgtatgatcatttattttgaaaactctaaactgttatgcactcttttaattgaaccactatatcattattataattactggcactttcctagcatcctttacaagctcagtgatcatgtcagctgatcatccaggcctgacattttccctccgcctcataaggagtgaaccaacctataaccagccagtacagcagtggagctttgtctctgactttgccgtaagtgactaagactcttaattaattttcttctgctgctgccatctgattacacctcagatttttaaatgtaatatatcaatatcttctcctcaaaggtacgtgactactcagggacctatactgtgaagctggtgccatgcactgccccatcacatcaggaataccgcctgccagtcacctgcaaccccagagaacctgtcacctttgaccttgacatccgattccaacaggtgtggcttatagaattactatcttatgacttgcagaatcccactttgtttttcatttattagtaaaaaaaaaaaaaatccacacgtgaatgactttaattcttgcatgctgaaaagaaaagaaatcagacagttaaggaagctagggataaaagaatgaggagagatttgccctttatctgttgttagtacaggat

SEQ ID NO: 72895 - DNA, 1005 bp, Homo sapiens
ggatcacttgaagccaggatttcaagaccagcctgggcaacatagtgagaccccatctctacaaaaaattttaaaaaattagccgagcatcgtggcacatgcctggagtcccagctacttgggaggctgaggtgggaagattgcttaagtcaggaagttcaatctatgatcatgctactgcactctagcctgggtgacagagaaggtccccgtctcttaaaaaaaatagaaaaaccaacaaaatgatcatttttagtaaaccaaatggtgacattttatagtaatttgtacttgcacaaaacaaatagagaaacatgctgtcctggcaaaagccgtggcattatctacagcaatcaccactttccttactgcttaaaggacaaagctcagccagagacacaagcgaccagttttggaaatgtcctatttaatgccaaactagcagtggatgaccctgaagccattctcttagtgaatcagcctggatctgatggatttaaagtcgactcaacaccactctttcaggtaggccaaaaacaagctcatttgtagtagttgtgtacccacatgcaagttatggaacatttatatgcctcagatgtctcatatgtaaatagcagtaatagtaatattgcatacagttaatgggaacattgaataagatatggcaaataaactacataaccctatgctgggcatatggtgagcactccataaacccagcgtttattatttttgttagcaatatatctggctttcatagctcttatcacttttattaatgtattaatattattttaagactatgtgtaatgaagagtcttatttagcccagaatataaatctgtgtctgacagttgagtaatctgcttttcttattcaaaacttccttcctgctgacttttcaccaatatcttaattagagtgatcttgtgtgaactgctgaactcaggaaagcaattgtgcacagctccactctcaaagatttcagaaaccaagatacaa

SEQ ID NO: 72896 - DNA, 1702 bp, Homo sapiens
gatctatacagtgagatcgaaagacaatgccaatcgaggtattggcaaaagaagtgtggagtaccattctctggtgagtcaaggaaagccccaatccaccaccaagagccggaagaagagagagatcaggagcacaccctcactggcatgggagattggtgctgaaaacagtcgaggaacaaacatccagcacattgccctggaccgcaccaagaggcagatcccccatgggagagcacctccagatggcatcctcccctgggagctcaacagccccagctctgcagtcagcctggtcactgtggtgggaggcaccacggtagggttactcaccatctgcctcactgtcattgcagtgctgatgtgcaggggcaaggaaagtttcagggggaaggatgccccgaaaggctccagcagcagtgagcccatggtgcccccacagagccatcacaatgacagctcagaagtttgatgactgcaggtagaattcaaccttttccgtaagtgcctcggaaaagatcacaatggaaccttaaatacttctggtaaaccatagagaatggaggatggctgtgatgaagctgcttagagaatatgactgtactaatggagtttgatttgaattctccatactcttttttgcatcaaaggacaaattaaggcatctttcctcttgccccaaaggcagcaacaacgtactcatatgtacacagagccatgatgtgaggaatgtactcctcattttagacatattctctatgcagtggagataaatctattaaaaggtgctaacagactctcttacaagtgtaagaggaatctactgttgctatgttagtgtgaatgttgaaggtgcaattatcacattgtttattaattgtataacagattattactagaaaggtttttgttgctagtctggaaaactggtgaacacactgtttattatgacaagttttcaaataggtgaagacagcatagaattatgaccagggtggctcaacccacaaatcaactgatctactacttgggagacagtggaaggaaagatagagggaaggaagttcactcacttgaatttgaattgcttctcattctcatcagactctccttgttttgtttgcatatttaattttaaattaaaccaaagaatatgttaattctgaaagagatttttaagagatgctgctctgttttggcatatagtgagtaatggtagagctcttgcatggtaatataccttattggtgctcaacatttgtgggaaattagagggttggtgagattttggtgatgaataaatgccatagagttagagtcactacaagacaatgttctctaagaactgagcctagatgtttgcagtattgaacccataaatgataataagaaacattgttacagatggtgaagggagaaagtggtatttattaatataatgtgtataatcagagtgcctcttatacatactttatagaataaaggaacattttgacagatgaggttatccctcggagtagcgtaatcacacaataacatttagaacttaaattggctacaggacattttattagctttctatccagcatctggtccaaacgatgggactctctgcaactatcattccagaaatggtcttggaggtggccagaatcattgaccatatttttatttggttcaagaagacatcgctctggcatcc

SEQ ID NO: 72897 - DNA, 1130 bp, Homo sapiens
acttgagacccacagttattcttaatttctgatattaacaaccgtacatactgctgaatttaactcaaaatatttcaggtaagtgaaagtggtgcttaatgtagactatagaatgactttcaggtgttttcaactgaaagtatatatccagaactgcatccttatagaaatacaagtaagacttaggataatttgccttcaaaacagttttcctaatctcagcagtatccagtgagtgaagaacacttgactgactcttgggccacctctgttacttactgtactatggaagctcctggtgaatgtttacaattatgggatgtagtatttctatttgtactttaagtcaaatgcttatatgaaatatgtgacaacaaatagagaagactggctctgttagtaattatgcagtatgtactctatttaaggatctgtggtagtataacatgagtgaatgtcattaattttgaagtaataactgccacatgtgggaagtaggggagtaaggagaatgaattccaatctgtgattaaaagtgtaaactatagactctactgtagtacatttcaggatctagaagttttacttttataaagatggtgtccggaagatgttgctaatgtattttacttcaacatagggaacaaactttttaagtatattaataaacctgtatggttagtttttaacagttttttaaaataaactatggatatgacaaatattctgtgttttactaagtgcttggataggctttctaattttgtatacgtgctagagttaattattgaacatttttatccaaatttagttgtaactctgtttatactactgattgctcattcgtttaaatgatattttaatgtaaaagtcataaccaacatatgaacagacagatttatgtctttaaacacagaatgtaagctatagtttaatctgataccagttgctggaagttgccatttgtttttcttaaatctatacccataaaacttcttttaagattatattgtgttttttatatatgttgaccattcattcagaaaataattattgaatgagtagtcttgatacaatgtgatgccacaacaaggtgtatttctgctatcctatgagccccttgaaaagag

SEQ ID NO: 72898 - DNA, 2233 bp, Homo sapiens
cgcaagcttctcaaaacttcctgtgatttggagggctattttgagcagagtctagacgaaaactggatctgactggctccagagtaaagatctgagaaatggaacccagcaatttagatattacaagagcctgttatacttgtcattttttatttggtatttgttaaatattacaaaaatggttatgctttttaattcaaaatttgacgtttcagcatgatgatacattcttgccttttttcccccttccatatagcattttccaccccagcaagtcaactcttttctcctcatggttctaatccttcaacacctgctgcaactcctgttcctactgcatccccagtcaaggcaattaatcatccatcagcatcagcagctgccaccgtttctggaatgaacctgctgaatactgtccttcctgtgttcccagggcaggtctcctcagccgttcacacacctcagccatcaataccaaacccaacagttatcagaaccccttcattgcccactgcacctgttacatccatccacagtacaaccaccactcctgttccttccattttttctggcctagtgtcactgccaggtccttctgccactcctaccgcagccactcctaccccaggacctacaccacggtccactcttggttccagtgaagcatttgcttctacttctgcacctttcactagcctccccttttccaccagctcttctgctgcttctaccagcaacccaaattctgcttcattgtcatcagtttttgcagggctccctttgcccttaccaccaacatcccaaggcctatccaacccgactcctgtaattgctggtggctctactcccagcgttgccggtccacttggtgtgaacagtcctcttttgtctgcgttaaaaggttttctgacatccaatgacaccaatttaatcaactcctctgctttatcctctgctgtcacaagtgggctggcttcactatcttctcttactcttcagaactctgactcttctgcttcagcccctaacaagtgctatgccccatcagccatccctaccccacagaggacttccactccagggttggccctgttcccaggcctgccgtctcccgtggctaactcaacttccactcccctgacattgcctgtacagtctcctttagccactgctgcatcagcttccacgtcagtgccagttagctgtggctcctcagcctcccttttgcgtggcccccacccaggtacctcagatctgcatatttcatctacccctgctgcaacaactcttcctgttatgatcaaaactgagcccacaagtcctactccctcggccttcaaaggtccatctcattctgggaatccctctcatggcactttaggtttgtcagggacattgggccgtgcatatacttcaacatccgtgcccatcagtttatctgcttgccttaatcctgcattgtcaggtctctccagcttgagtactcctttaaatggttcaaatcctctttcctctatttcccttccaccacatggttcctccactcccattgcaccagtattcactgctcttccttcttttacttctttgaccaacaattttcctttaactggcaacccatctcttaatccgtcagtatctctcccagggtcattaatagccacctcatctaccgctgccacctccacatctctccctcatcctagctcaacggcagctgttctctcagggctttctgcttcagcaccagtctcagcagcacctttccccctcaacctgtccactgctgttccctcacttttctctgttactcaaggacctctgtcatcttcaaatccctcctatccaggcttttctgtctctaataccccaagcgttacccctgctcttccctcattcccggggctgcaggcgccctctacagtcgcagctgtcacaccactacctgtggctgccacagccccatccccagctccagtcctcccaggattcgcctcagcattcagttccaatttcaactccgctcttgttgcacaagccgggtatgtggatagtttggaaataggataaaattattcttcacctaacttgtagttcacatttcatttcaagtcatcaaaatgaatgtcaaaatctaaatgatgtttttctgggtgaaaactttagcactctgaaatgttttatgaaccatgttaagataaatgtataaaatattaatgcctgttgatacaat

SEQ ID NO: 72899 - DNA, 1495 bp, Homo sapiens
gtacctttgcatgtgatatgagagttccatagcataggaggattgaggaccttatcagggtcatgccgccagccagtgcagaactgaaatgggaatgcaagtctttacactcttaccaagtccttttcttcagtgtaatacagtgaggttggttattgttactggtttgagggttttttttttaagtttcaattaccttttttttttttttttaatagggaactcctttgaaaaaagatggtgaagaatgtactaacgaaggcaaaggaatagctgcacgaattcttgggccatccaaaccagtatgtttagaaaatgatgaaacaagcccaaactccttcctacataaagtttcctttttactcaaagcataaattttatttttgtgttgcaaagtttgaagtattctagaaattgtaggagagtgagagagtgaatggatgagggaaacataaatatttaacagtagtaagagcccctttgagattgagctttttattttaaagtagaatcagtgaaattgctttcagtttttttctcgagatgcattcagctgctcagttggagatacggagtgtggagagcttgttttaactaagtttgtagtttagctgaattagtgttagtgaaaccacagtgaagtcacaggttgaaagtatttacaagatagtgattataatgattgcaatgtaaacaggacaggagaagacaaccccatgggttgaaggatctttggagttgaagtactagaggcctgcatacaaccaccttgcaaaacctgcctgtccacatgacaagaactccagtggagttgtttatggcagaatagtaacagatcatggttcttgcacaagacttcagatagggccacaattatgggagctggaaagaatctggctcccttaccaccagtgggtcctttcccctgcctcacaggcatgcacatgctctctctgtaggtaaaaagtacagcatctggcttagcttcagatacttccagttttctaaagaccagtgctttgaatgctttttgttacttaggtaagctccatcaactgtaaaataagtattggtggatttatggatttcaaaaggcagaacaactaacatactgaattcctgattccagtctatgttctactggagttgtcagaatgccaaatgctaacgcaaacagtgcttttttcttctaaaaggaggaaagagggtgggaatgagaggatgaattcctatcagtttaggaggatgttgccattgggagttcttgcgtaatttgagattgtaaaacctagaaggtttcttgtctttgttatgtaggaggaaacaggaattcttggtttaacttaggctgggcctgggaggagtttgctgtttacaatgagatctaaccccttattggagatgattttaaaaatctctggccacctctatggccatctttggcaagatctgcatttggaatttaatagcaaccacatttattaaagcaaagaaa

SEQ ID NO: 72900 - DNA, 1139 bp, Homo sapiens
attcaggacttcttgcattcttatgtccctatagaaatactgagagcctcaactagaccttgtcttattcttgcttctctgtcacttagcacatagtagatattcaataattgatgaatgagtaacatctgatatgtttaatcttaaaaatgacaatttggatttggaatgttttgaaactctttaattacatatttaggaattctaaatgttgtgtatactgatgttgaatcatatctattacaattttattccctttctttgtagaagttggtagggaagcccagcagatcttcctgcttgctcagtgtgtccctcacagtatggaacctggaaagatggaaggaagggcctctcaccacagtgaccttagttcctctgaatgacagggctgaagtagacctgccactgttgagttgcttgggcagttttgatagatgtatattactgtgctgcttacgtatattaatgctgttttactctgtgtgtgtgtgttttttttttttaggctgttttgacagaatacaaattaaaagcaattgaatatgtgcatggatacttttctagtgaacaggtattcctcattatttgtttaaacaaagctttctttttataccaatgttctggttaatgtctgtctgctggccgaattcagaattggttttacctttttgctgtatttattcaagaactcgagaagctctcagttttggcagaaaactctacagaatttataattcagggactaagcacctctccactttcaccccaattcatgttttaaaatgattttaaatatagggtcttaaagcaattcaaagtgtttatggttctgggcacaatatcaaagatttagagactcgtaatggcaaatttacccaaatttttatagttacatgtaagacaattacaaaattcgtcatgtaatataaaagaaaatgtgaacaaataatgaaatatgtttttatatgaagccactaaataaaaatttcaacagtaagaaaaatacacagtgttatttaataagtagtttctgtaactgccagaatactaacattttaagcatgatagtttagtgaaaacttcattccaccttaggggcagtttgctaattaaaatatatgtgtgtcacacacaca

SEQ ID NO: 72901 - DNA, 1873 bp, Homo sapiens
ccttttttttttgagaaaattttttattggtagtcttttttgctagtttttagaaacttggaggcttatgtgttttttattgctatgaactttagctcaactgtctaaaagtgtaatagtaaataaattatttaacatagaattgtaatgcaagctgattcactttctttctggtaagctcaatgtatccagtttgtcttttgaatacctatcaattaatttggcatatgtaccttcaaattgatttctgttcactgctttatgatattcccttattagtagtctgctttatgctcttgcttgtaagataattttaacttaaagaaattttaacgtgagaaaataagatactcatgatttacaaagattattttcttcttagcaaagaaaagttgggttgaattttgaatgtctccacaaggtgaaaatgcagttaaaaaaaaaatctgtaccatagagaacgtttttgttgacttactgaaatttaaggtctgtatgtgagtgattgaaataacagtttcaaatataagttgttccctttacattttcttcttgatttcctttcataagcaatgcttattcaaggtcataagattaaaaaagaaaatggtgcaccaatactttgttagcattctgagtttcctgtataatgagtcaattatggggatgttatttatttgaatttagaatccgcttattttggactaatggagattttaattcgtgatcaaatttggctgtaatttacgaagaagctatagtgcttgtcaattatatgtaatttcctaagcctatcacctatttgttattatttacttctatcaaatttttgctcttagcttacttgaaaaatctgaatgtttgtatagtggttttatttgtgagatgtacatatctatctttataggattctttggtcatactgttaaaaaatacagttcttttggtgatcttgttcaagtcttgggtactccaggcaaaaaaggcactagtttgaatcctttgcagtttgataacccagcagaattatatgtagaggacacaggagatatttacattgtggatggagatggaggattgaataacagattgatcaaactgtcccaaggtacattacttgtttatggtattataaaaatattataaattgattttaatttgttcgatatttggtataatgttttaagtgttgtgtatgaagcggtgtgtaaagagctaagtgtattactacgagaaaactgaaaaacagatgggtatgattgcccacaataaatgatcctgataacaggcccacttattcttcaccaaaggccaggagattcctccaaaagtaactggcaacagtatgagaatttctagtgggctcaggagataagtgtgtatcctatttaattaagcatgtagaaattagaaacctagaatcccagactcaagtatcctacaggctgattaatcagcaagcattttattgagtgccctttctgtgtcctctctagtatcaggaggtgcagatctattatgtattgaaacaatgaaatgtagtctatgctattgattcttaaagcaaaatggacttaggaggagaaactaaattgcctggagaaatagaacaagatatcatgaaggaagtagttattgaactaaactagttttggtgggaggagaggggaggatggatggaacattcatggagggtttatcatgcatggtctacaggcatttattagcaggaaagaaggtgaagatgcactttttcagcagcagaaaatacaatttgggatgtttctgaagtcttatttgaggattattaaagccatgtttttgcctataacatttttgaggttttcctagtagaaaagtgatgttacaacag

SEQ ID NO: 72902 - DNA, 1289 bp, Homo sapiens
caacataaatttattctcacagttttggaatccagaagttagaaatctggtagactgtgctcactctaaaggtcctgccttgccgcttctagtttctggtggctcaagcattccttggcttgtggcagcaaaactctgatgtctgtctccatattcacatggcggccccttcttctctgtgtgtttttgtgcctccagtctttcccttctttctcttaataaggatttagggcccaccctaaatccaggatgatctcatgagatccctaatttaattttatctgcaaaaactatttccaaatagcatcacattcccaggtatcaggagttaggacttggacatctttttaaaggaccacagttgaacccaccgtagtgcgtaataaaggagatagacggtaaaatcataatgtgaatttttaaggtctgtggaatactaatatcaagtaacagataagttgggaaggggaaccagttttagggagaggatggcataaaccctaaacaatgattttgaagcagtcatgaaaaattcaagtggagataataattaaagaagtagattaattccctaaagcagagaaggaactttaaaaaaaaaactgtaagaaatgggcaaatgggcatatagacaggaaagccgagaaagcatagtcaagtgaaccagcggtgtaattaaatagttctttgtaacctgtttcataaaatatgcaaatgcatgagacattctatatgttgctctgactatatatttttaccgtttatagatttcatgatcctttggctgcatggagaaaatgggacagggcctgctaagttcaacatacctcacagtgttacacttgattcagctggtcgggtacaaatacagcgtcattgtgtctgggactttgtgtctgaatatgtttgtgtgtgtgtgtgtgtgtgtgtgtgtgtgtgtgtgtgtctgggcatgtatatatagattgtggtatacatgtgtgtctgggcatgtggatacatgtgtgttagtgggtatgtctgggtaattactctggggctgggtgtgcacacatactttcttacaagtgtttgagtcctatagtgagggggttccccaaacatttagaaaggagcaaaatggatttcctgtaccatttaaaaggatagaaggcacaaataatggatctgaacataaagttacctgaaagaaaaagttgccctcttactgggaaaactccactaaaagtgtttgaatatcttttcacttctcaagaaaaaaatgtgctgatctaaagtggagtgggaga

SEQ ID NO: 72903 - DNA, 2011 bp, Homo sapiens
tagctgaaagtttaaaatatttattgttaattttgaattaggggaaaatagaaatatacagagaaatttgatatccaagattttcagatgccaggtaaagtgaaaacaagaaataacatatgctagacctctcctctagcctttatttggtaaatgtttaaacaggacaaaaatcaaacccagcctaacatcaattcttcattaatttcattttgtggactatgatattgatacttttaacaaatttaagctaatctttggctttgcttaccatcatggacatcttattccttcataaacagaattagatcaaattaaaattcttcttaaaagaatcattcagcaagtaggtgcctactgttgtttggcacagtaggggattaaaatgttgaaaaaaaatacccttatgttttttcacagacatttattatgttaaatgtctttctccttaggtttactcctgatgggaagtacttgattgtggcccagctgaatcttagcaggctctcagtcgtagcagcacccccagtgggaagcattggggagtgttctgtgatcagcacaatccaactagcagatcaagttttgccacatctcctagaagtcgacagaaagactggagcagtctatgtagcagaaattggagcaaaacaagtacaaaaatatgtccctttgaatagctatgttccttcatttggttcataatgtttctttcctgggaatatttcaagtggcagttcagattctcaattcactaagtgcttaaaaatgatgttcaagcacaagaatttatttttctagtataaaagatctagtatcagaaagatttgtttttgtatcattaagaatcttatattttgttgccctcttgggacttagttttatttgtaagtgcataaggatattttaatgaaaggaaagtaactaaaaaatggggttgggaagagggactaaggtggtaacctcattatttgccctggtagactgattctccctgggtaaaaaaaatgggaataaaaatgagcttgcatgataatttattaaatttcatgtgaagaactccagacctccagattgtgcaactaacataaaatgagctgcttgagagattgtaaataagatgaactattgattaatttgagtacccacagagtgctgtgtcttgacgacttaaaaatgaaaaagcaggattgccttttgagtagcttgcagtctagtggggagacaagcaggcaaacagtcacaacacagcaaaagcgaccttggagcatagtgggacttttggagtaggagtgctgcatttgactgagggaatcatggatacttcgcaggagaagtgaatttgagctcagacttgaaaactgaggaggagcttaccaagggacaaggaggagaaaacaataatttccaagtaaagaaggtataaaaagttagaagtgtactgtaaactttgataggcttttaggccttttttaaagcccaacttggcttctgtccattacctataagatatttaatgtcagtcagcctttaaatgtaggaataaaatggctggcatctaagcactttagtaaaagaggtttttacaaataactaaggattgtagagcttccttctctttttttttctttttctttcttttgttttacatgaactcaacttattcctaacatttgtctacctcaaagaaatttcaagattatttagataacatggatatgtgccaaatcctttgagctgttaagatgataatttcctgctttcctcctacatcttctcctcccactccctcctttggtgtgaatattggcttcccaattaagacctttttttttttttttccagtttgttttagcttattataggttttggaggaactttgccattttgtaatctttcaaatcattcttcacccttcctcacatcagcttcctgcttttcccagtgttttactgtaaattgtgtagcatatgacaaatcttgagctgactttcctcttcacctgttatgg

SEQ ID NO: 72904 - DNA, 1009 bp, Homo sapiens
tctttgaagcaattcaggctaggtaaaccgattttgccatttcaaaacgttttattttactttgttttatatcagagtcttataaaacctgctgcaaatatttctgaatgtctttgtaaaagtgtttgttagtgtacctgtgattatagtacttcacttttttcctttggattaattggttaaatgaatgagaaatgtgttatgttttttactaaaaagtataaattaaaattttggaaagaaaaggcaatattatctggctccccaattaaagtttgattttattgtcacaaaagcagtctataactttttattcctttaaagaatttcagcaattatgaaatcacaagttgatgctgaaagaatatcccacttttcacacatatagcgtgtaagctgatgtgcataaatatgactagaagttgcttagaacatttaaagaatgtagcttgttttgaggtggtgggagggtacaactgacagtaataactagctaattgtctacatttctgcattaaaagtggaacatctttatacttctactttttaggtctattcttggagtggggaggggagaaagtgttctaaattagaaaaccaaaggctatagatttagctctatctttccctacctgtaccatcagattgggtctttcaagtggaatatttatcgatcagagaaaacttggatgaaatctgatggtgaacagagatttaccacgaatttttttttttttttttttttttgagacagagtctcgcttggtcgcccaggctggagcgcaggagtctcgctcgctcggtcgaccaggctggagtgcagtggcgccatctcggctcactgcaagccccgcctcccgggttcatgccattctcctgcctcagcctcccgagtagctgggactacaggcgcccgtcaccacacccggctaatttttttttttttgtatttttagcggaaatggggtttcaccgtgttagccaggatggtcttgatctcctgacctcg

SEQ ID NO: 72905 - DNA, 1457 bp, Homo sapiens
gtccttagggaagtgtgaaatcggctgggcctactactgcacgggagcaggtgccactgccgccatgctgctgtgcacgtggctggcttgcttttcgggcaagaaacagaagcactacccatactgagatggagctaccaagagcagacagaggagaagatgggccaaaggggcttggagaggtcaaaacatccacctaccttcaaaaggtgggatagtagttctaatccaatacaatgctaataaaatgaaacccgataaaatcaggaacatgatataggaaggaaggattgtaggagatttgtgggggaaaaaaaaggagagtatagaatgatggagaaaaatggaccaaaggctaaaaatattgcagggcatcgggtgtttctattccacagagtattgttaatgtacaacacacacacacacacacacacacacacacacacacacacacacacaacaaatctacatatacaaacaagggtttgggttttagttttttttttttaaggtgaggactcagaaaatcaaagggctagtagaaacagtgttatgttgggaagcagggtacccccaaagatgttccctgtaggtcacggcactcccaaaagcacacaagcacatacagacatatgcatccccacacacgcctatgcacaaacgtggattatcgcacagactgggaggtttagtggtgcatttctcctctgttttctttttaatatacatttaaaatacagtattatcactttataaaacatacattaagcctaataaatggaccaataagccaaactatcagtattttgtatatcctgcataaactctaatttagttcctcaacatattttcagtgtttatgcagacctttagagttaagcctttgtatttccatgttattccacaatatgcaatatttctctgagtagcttctgctatgatattcttatgaagaaaaggggcaactttctgtccactataggagagaattcagccgaagatatgagagtaatgagagacattttccagtcattggatcgtgttttcttttgtccattattgtactgtgctgtaccacatttatttctatattcattttgtaaaaaatttaaaagtgctattttgtttgtatttgaaaatctctgtgaataaattctctctttgatcaatagctagatgagtcatggagtgttaattcagtcatcggatttgcttctttaatttctccaatgtagctcttcaactactatagtcctgtaaaatttccttttctcttttaaggcctctcattaattcactcactaatcaaccaggcattgttctaggcacaagtgtattaaagatgagtaagacagtttctgctttcaacgtgaattctttgcaaccagaattctaacttcctgcttgttacatttcaatcataaccaaattctgaggacagaagaacttcaggtctg

SEQ ID NO: 72906 - DNA, 1059 bp, Homo sapiens
tattcaatcttagtttgaaattccttttttttttttttttgctactttcagaatcattgaactcttaaccattgaccttggatggacttggcaactgagtcacagatatcgtgactttaaatctttaggttaatagcactcagttttcagtgtgggctccagtggtatccacaataatgaaatcttaattgcttagatgatttggctcaatctgtatatcttatattctgtcctgaaaacaagttccatcatataaattaaaggtaaggcagtctgtttcgtcaatttaggctcattttaaatcccaaactttaaactgaatgttaactatttcacagttacaatatttttcaaatggcaaaattgtaaatctacttctgtaaataatattgtgggaaaatcataacaattgcaatgttggaaaatacttttcctatcaatactactttttcatattttcttatttcatatccattcacacccttgaccaggacaaatgaggacattttttattataacactaaccttttataaccgtataagtaaatattactttattaatttgtcagatttagaatcaggtgttaattctttggtttgccatttaagtacattttacacatatgtgtttagtgcatatttcaagtaactgtcgtgaaatgtagtgaggaatatcactggtcattcagaacagagggtcagtttacagttgatgtggacgtctgtatctgtgagtgctggaggcccatgcagccgagatgcagtggaaaagcttccctggcttgtgaggccagtagcacctcccttgccctattaaagctgcagactagcaataagtttccatttgtgcattgacatggttgaggcagttttagaaggtctgacagcattgggattagctccccagatcagatgacttctaatgcatctgctcacattgttttgccagctttcaattggccagtttccccagtaagttcctttcattgcaaatctaatcccctttacaaagtagaatattactcttagttttgtcctgaaataagcacattaagtaat

SEQ ID NO: 72907 - DNA, 1050 bp, Homo sapiens
aattaaattttgtaaggtaagttaagaaggggagggattaagatacaaagacatatatctttttttttaaagaaaagatcctcttactccacattctttgtaataattgtggaaatctagaagagttgtaaggtatgctaatatgtcaacaccagttaggatattttcaaacctatttttagtgatttcttacacatcaaaaccctgctaaaatgaggcacatttttctgaagttgtttatgtttcaggttgctggagtttttgttgttgccacaaatgattatccctaagttcacatgatcatgtttatagcttcaactttgcgggaccctcaggctgtcttgtcaggctgagttttaaaattccaaactgaattgcgaagacatgacattagggaatggggagataaataagagtgtataaccaagaaaaatgtcatatcccaaaggtttaaattcccatgggaaagaaagtcttgctttcaaggactaatattggaggatagaatggtcagtagttgtttctccttaatgttaaagtattgaaaattactgacgagtcagctaccttccagccagcccagatcctgagcagggtggaaccgcttgtggctttgtgtccctggcagctggcacagtgatcagcctgcagcatgttctcaggtttgttggaagggagaaaaagaagggaaggagagagaaaggaaaaaccatgaaatagaattaaggaaaggaaggaaaacaggaaagagtaaagaagaaagaaaagggagtgaaataagtggaactggaaaactggtttgttaacacacatacacaatacacacgaacacacacacacacacacacacacacacacacacacacacacacacattaaggaacttgtccagctattactgacagacctggaaccagaacacaggcaggtctttataatctatctccctcttgtccctgtgcttcatagtgggaagtcatttcatgggcattttgaaagccttgaagagaattattaaaatgtataaattaaaagtccttggaagggaaa

SEQ ID NO: 72908 - DNA, 1026 bp, Homo sapiens
ctggaataggtcatatactttatttctatagtaaccaaatattcaaaatgcaagtcaagacgttaggtcagacaaaaaaaaaaaaaaaagactgtgctttttcccccaatagttaaatttatctacattgagtctttcaaatgttataaaaataaaagtatatttagctacactgttagttaatagacttcatggaatagaataaaagaagtgcggatttgagcttctctacattttttgtagtggactggtattaaaatatgttttttacatgtgttctctcatggagagttaactactgtggttcattccaaattccatcttaattgtctttagtaactattcattttatgggtttatcttcagtttcatttgatttccttctctgtttagctgttttcactttgttggtctgggtcaaatatgaaatgattatcctttgctgttttatataggatctatttccatcagcacctcaatttattggtttgtatcaaaattatcattggaaagatttaattggcccccaaatatcacttctagtattatataatccacccatcctcatggagtttctatgctgtactgaagacttttttaactcatcactcttttgagtcctaattcatggactgtttaattgctgagcttatgaaaaagaaatgtaagtcacagacctacttgaaaactcacctttttgagtacctccttagtttacaatgccctctgtgccttgcatattttacttatgtagaatgtatgagttatggctccaaatttcaattctggcatagccttgtcaacagcaacacaagggctacctctgtataataagggctttcatttctaatcagcatcaatatgttaggtttgctcaatttgcatatctagaaacctgtagtgaggtgggcaggaatagcagactgtctgcagtgtgtcatatttgcagtctacaaatcagggcttgttaacttgcgtgcaaccaattatagcatgagtgtgctgcaacataatcctcagtaaatc

SEQ ID NO: 72909 - DNA, 1055 bp, Homo sapiens
cctggtcaacatggcaaaaccacgtctccacaaaaatacaaaaaaatttagccggacgtggtggtgcgctcctgtaatcccagctacctggggggctgagggaggagaatcagtcgaacctgggaggtggaggttgcagtgagctgagatcgcgtcactgcactccagcctggatggcagagcaaggctttgtctcacaaaagaaaagaaaaagaagtttggggaaaaggcaaagcctcacaatatcaccatgggaggtttttgtagttgctggtgggagatccaaggtgcatagttcatctctgtggacagagaggtagaactatggacttcactccttgcaccctttatccttgaattgttagcacagagagctggcagtgcctttttgttacctttgttaaattagatatttgggggcttgtttatctcttcctaatgtagctttacgctttgagagctgggctgtgttttggacttcccaaccacagctgcatacttgaattattcagactttcagtctctactgatcttctctccctgattttaaactttgtattaaataaatctgaacgagaaaaaggggccaatatgccttttagaattaaaaaggatcctgataccccctactgttctatgtgtagatagaaaacgtgcaaatcatttgaagtactttaacaaataggatgtgattagcttgtgtcagccaggtttagcacaaccctctacagagtaggtgcttggtaaatgctctttactttaatggagaaggtgactaggaaacaaaaaaggttttcagttgattctgagttgggcatggggtaagtccggtcttaggggaaagtcacttgttctctggaggtttaattagaaactggaccacttactttttgtggagtggtttgggagtaatcaccagaagcagagtaaaatacttggaaattaaagagatactaaaatgttaaatgtgccatatggtaataaagttttagagcaaaatggaaatgttcgatggtttttaatctcgtgactgatagggactctaggtggggtta

SEQ ID NO: 72910 - DNA, 1003 bp, Homo sapiens
tcttacacattcttggagcttgttttccaatatgtggcattacgtgggggatagagtccctgcctttagcacttcgctatttttcttctgggttttggctggctggaattaaagtttctacgtcaatcatgtccttggttggcttcttccactttgagaatattaaactctttcttttatatgtaagtgcagaaatgcattcacgttgaattcagtgttttgcttccctttccctgttcctgtttttggagctgtgctcaggttggggatgtaaccttgcccgcctctcatcccctggcactcagttaactttggctgggtaataatgcactgcccaggtggagtttggggctcacatttcttcagtgaattttgtgttcatgggtagcttggtgttcctgcctagattattgtggtgctcattcgtgactggatcagaatgataagctgcttttcagagcaggtacaatacctactgcctagggacctgtgttgatgccagagcacttttcctttattggtgtaaacagtgagtacactaatccctcatcatcaagagaacagacttccagtcattgcactgctgagctctggatgtggagaggggttggggctttcattgtgtgctttcggaagagacccttggacttagagctttgtcacttgtgaccccgcccttctctgcttgttaattcattcataaccagggaaataagaaggaattgtaaaattctgaagctctaagagactttagtcccttctgattatttagtttacatatgaagggagtgaacccagttactttagtttggccagtttaaatgatcagtagctgggactaaaccagaacatgggtctcgtgatcctcagctaaaaccttctttgactccatcactcaggttctccctgagatgagcacagtgaccaggagcagggattaggaataattgttgggtttccagagtcaagttgcagagtgggctgaggatgggctcatcaattt

SEQ ID NO: 72911 - DNA, 1036 bp, Homo sapiens
cttgctgcttgtgaacttggagctgtgacctggcaaacagatattttaccaactagataatgaaaacacattgaatgtataagttgaatggggtgaggttagtgtgtctcatttttcctttcctatgtagtgtcaaatagaaagctgaagcaggtaatcaaataggcttcatgagtggttgattacatttattctgatctctccttgcttgagttatttatttagaatgctaatggtctctgccagaccccatgctcatttatgtcctgagcttgattgtttattcactataataactaggaacaggtgattatgactctcaaaagaagaggtaaaatcacagcagaagaatgatggttttgtctctaacaaatcttcaagttaatttcttatttgctttaatttagctataaaatgtaatagcacacatgtctatgtaggtcaacttcaaccaggtaaaaaatgatagctagtaaagcagaatgtgtacactgtccctgaattcatagaacatcctggatcagtgcctgaaattcctgtttggtgatatgtgatgaccttgatttcctacaaaaatagccactttctgttcttttgaatttttatctaagtttcttccaccaaaaaatgcattttaattttttttacaatgccagccattaatctttaaaattgttgtacttaataatgtaatagttattccttaatgaaatttggaataagataagtgatcattgggatcacccagccactctgctgtgttgagcttggagcaaaaagaggagacagagaaacaagttctataaaatgttgtgtgtgatgatgtgggttatgttagtgttataggttgaattgcctctcacaaaaacatgttaaagtcctaccttcaggtacctgtgaatttgaccttgtttagatgtaatcaagttaagataaagtcattagggtgggcccttctccaatatatgatggatgtccttataagaagaaggaaatttggacagagatacgcagagaaaatgctgcatgaaaacag

SEQ ID NO: 72912 - DNA, 1034 bp, Homo sapiens
agcttgttaggcttgtagggtttggcagattgtttctgtagcattacttacagcatgggattagaataacattttccccccatgtgggatgctttaggattttacatgcagtcagattccagaaaaaactgtttcctcaagtctgtaagtaaaatgaagtgttagtacttttttcttgtattagcaagtcttaaagtaccacctttattcgtgtgttcacattactctatggccatgtgttgtcgtgcaaagcaaatgaacagaggatctggacagacagggttaaattctgctgttcatcagtttcctggttctggacaagttacagactcttggcctcaggtcctttgtttacaggatgtaatagtaatattaggtcctaatagtaatattaactctttgaatttttgtgaagtttaaaaacatgtaagttacctaatatcaggcatgataaagtagattcccaataaatggtcgctattaccaacagttggttacataaatatttattgaatcctgctctgtgccaggaaacattctagatattgggggtaacgtaatgaacagaagcagactaagaaagaacagtaaagaattataaagaactgtaaaggaagaactacaaagaaaggactttggttctattttcatctacttttagttttctattgctttcccactgcatttccttagctagctgatttttggacttgtaatattcttattagtaggtgacttcttattcaggacgtggtaaatatactgtgttactagatatatttgacctccacagatcataatttgagatgccatgcagatatccttatgcatgttctcagtgtctggacaagttttttttttaacacctgtcaccacataatgggttttcttacttctgatggcattttaaatatcatctgtcccttctgtgagaccccatctttaattccccatctctcttcccatatgctttcatgtgtttatagtctgattactacctgttcataaatttgtatttttatctcttttgcata

SEQ ID NO: 72913 - DNA, 1111 bp, Homo sapiens
atgattgcaatagaactgttggaatcaatgaatcaaaactgcagactcaaaataagtcatacacaggcattcttttacactagaagatgttaagactaaagaaattctgaaatgctgctgaatgagtacaaagagtgtctggtaatagttctgtactgtgggtgcctccgcagaccataatgcttgttaaatttatggtactctgcaattgtgaaaaattatcctaattagtttgtttggctcatgcagagagttaatgcacccttaaagggacatagaaaagttgcaacaaactatgagcatgaacttgcaagccaaaaaatggaaatcatggcatggttcattttattttaattgtttattgcccagtgaaagtgctacattacttttaatgtgagtatataatatatagaatgaattcattggcctgtcaaataaaaatcgggcgtttctttaagtaaatagctgtcagagttaatttggaaatatttacggaagataaagacatgaaaaagctttgagctggtttgacaaaaatcgagttatgaagctcatagagagaattagttcttcccacttttaaagtgttgaggcaagtctcaatgtttattaattgaaaattgtagactagctgaaacagtgttatcacttcttttaatgcctttaatttttaatgtttcctgttgttttaccagggaccatcatctttagtgcagaggatggaaagttgatgcccagtaagactgaagatccattctgcattacggaactgtggattatctgtgggtccctggtgatttcacaccttcattcactcctgcagtccctgaacacttacttggggtcctcattgccctatctggtgaaagatggcatccagcctgacttgtactggagtaatctgggctttgctgtcttttctttgtgctgccacctcctgcgtggggttctttatgccttactggctctggggatcacagctgggcaagcctgtgtccttcggtaccttccggaggtgctcatatcctgtgcatgatgagagtcggcagatgatggtgatggtggaggaatgtgggcgctatgcctccttccagggcatccccagcgcaga

SEQ ID NO: 72914 - DNA, 1032 bp, Homo sapiens
attatcagaagaaatgggattttccagaggctctggtgggtggaaataaaggggaaagattgctgttccttttccagtccacaccaaggcaaggaagcttctttcttggtccttcacccctccgaagaaggcaaggtttgggatgaaggttgctcctggtcagatgccccatgaggtggtggagacggggagggagagagagcatggggatgaggactgttagtagtgcttttgtgccaggcatgtgctttctagatgatttcccatctgcatggatcagaaagcagagatactgatgcagctgcctttcattattgggcagagagagattaagtgttggaaaaaaatccttccttatggctgggtggcagggagaggagacgtgggctttggaatcagacagctcccggttctcatgctggctgttcagctcctagcctccctcctcatctgtaaaatggtggtgatgaaggaattcgtagacttgaagtgtctggcacagacgctgtcatcaccttccccacatccaggatgagttcattttggtcttttcacttcagaccccctactttccaacagaaatctttggatgaccttggattatcagacatcctccagaactgctatccgcgtgccctccttatttctgcacagaatttctgaacctctgggctggcatggtccaggtggggctcacatagacagtgggttgtaaaggaagaacaggcacaggctaagaaaagaggtggaggaggaagtcgcggttccacgatgggggaggagaagaagaggcagcttttgaaggagctccatcgcccacccccagcatcgacccccgacggggcccctgtgcctctcttaggggtggattgtggagaggagagaggcggctggttcagtttgggatccccgatactctaggacagcccccatcttccctcgcttccgtgaacacagctcccaaggcggtctctgcatttggccacagcgttgcgtcttctaagctgctgcgccctctgggagccggtggtg

SEQ ID NO: 72915 - DNA, 3514 bp, Homo sapiens
gcttacacagaaggaagcttcctttaactgctttaaagatttctttttgacagttcgatggctgcatctttttagtagctcttcaataaatgaatacatttgatataaatcaaatgctgaagggttttttgtaaagtagaattttccccattgaatgattttagagctgtttgagaaagctctagctttttgcccctaagtatgtctgtcactcttaacatgttaagttgaattgattttaatttggctatattttcattgtgtgtgtatgtgtgtgtgcgtatgtatgtgttttttcctaggttacacttaaaagtacttcagattgtctgacagcaggaactgagagaagcagtccaaagatgtctttcaccaactcccttttagttttcttggttaaaaaaaaaaacaaaaaaaaaaaccctccttttttcctttcgtcagacttggcagcaaagacatttttcctgtacaggatgtttgcccaatgtgtgcaggttatgtgctgctgtagataaggactgtgccattggaaatttcattacaatgaagtgccaaactcactacaccatataattgcagaaaagattttcagatcctggtgtgctttcaagttttgtatataagcagtagatacagattgtatttgtgtgtgtttttggtttttctaaatatccaattggtccaaggaaagtttatactctttttgtaatactgtgatgggcctcatgtcttgataagttaaacttttgtttgtactacctgttttctgcggaactgacggatcacaaagaactgaatctccattctgcatctccattgaacagccttggacctgttcacgttgccacagaattcacatgagaaccaagtagcctgttatcaatctgctaaattaatggacttgttaaacttttggaaaaaaaaagattaaatgccagctttgtacaggtcttttctatttttttttgtttattttgttatttgcaaatttgtacaaacatttaaatggttctaatttccagataaatgatttttgatgttattgttgggacttaagaacatttttggaatagatattgaactgtaataatgttttcttaaaactagagtctactttgttacatagtcagcttgtaaattttgtggaaccacaggtatttggggcagcattcataattttcattttgtattctaactggattagtactaattttatacatgcttaactggtttgtacactttgggatgctacttagtgatgtttctgactaatcttaaatcattgtaattagtacttgcatattcaacgtttcaggccctggttgggcaggaaagtgatgtatagttatggacactttgcgtttcttatttaggataacttaatatgtttttatgtatgtattttaaagaaatttcatctgcttctactgaactatgcgtactgcatagcatcaagtcttctctagagacctctgtagtcctgggaggcctcataatgtttgtagatcagaaaagggagatctgcatctaaagcaatggtcctttgtcaaacgagggattttgatccacttcaccattttgagttgagctttagcaaaagtttcccctcataattctttgctcttgtttcagtccaggtggaggttggttttgtagttctgccttgaggaattatgtcaacactcatacttcatctcattctcccttctgccctgcagattagattacttagcacactgtggaagtttaagtggaaggagggaatttaaaaatgggacttgagtggtttgtagaatttgtgttcataagttcagatgggtagcaaatggaatagaacttacttaaaaattggggagatttatttgaaaaccagctgtaagttgtgcattgagattatgttaaaagccttggcttaagaatttgaaaatttctttagcctgtagcaacctaaactgtaattcctatcattatgttttattactttccaattacctgtaactgacagaccaaattaattggctttgtgtcctatttagtccatcagtattttcaagtcatgtggaaagcccaaagtcatcacaatgaagagaacaggtgcacagcactgttcctcttgtgttcttgagaaggatctaatttttctgtatatagcccacatcacacttgctttgtcttgtatgttaattgcatcttcattggcttggtatttcctaaatgtttaacaagaacacaagtgttcctgataagatttcctacagtaagccagctctattgtaagcttcccactgtgatgatcatttttttgaagattcattgaacagccaccactctatcatcctcattttggggcagtccaagacatagctggttttagaaacccaagttcctctaagcacagcctcccgggtatgtaactgaacttggtgccaaagtacttgtgtactaatttctattactacgtactgtcactttcctcccgtgccattactgcatcataatacaaggaacctcagagcccccatttgttcattaaagaggcaactacagccaaaatcactgttaaaatcttactacttcatggagtagctcttaggaaaatatatcttcctcctgagtctgggtaattatacctctcccaagcccccattgtgtgttgaaatcctgtcatgaatccttggtagctctctgagaacagtgaagtccagggaaaggcatctggtctgtctggaaagcaaacattatgtggcctctggtagtttttttcctgtaagaatactgactttctggagtaatgagtatatatcagttattgtacatgattgctttgtgaaatgtgcaaatgatatcacctatgcagccttgtttgatttattttctctggtttgtactgttattaaaagcatattgtattatagagctattcagatattttaaatataaagatgtattgtttccgtaatatagacgtatggaatatatttaggtaatagatgtattacttggaaagttctgctttgacaaactgacaaagtctaaatgagcacatgtatcccagtgagcagtaaatcaatggaacatcccaagaagaggataaggatgcttaaaatggaaatcattctccaacgatatacaaattggacttgttcaactgctggatatatgctaccaataaccccagccccaacttaaaattcttacattcaagctcctaagagttcttaatttataactaattttaaaagagaagtttcttttctggttttagtttgggaataatcattcattaaaaaaaatgtattgtggtttatgcgaacagaccaacctggcattacagttggcctctccttgaggtgggcacagcctggcagtgtggccaggggtggccatgtaagtcccatcaggacgtagtcatgcctcctgcatttcgctacccgagtttagtaacagtgcagattccacgttcttgttccgatactctgagaagtgcctgatgttgatgtacttacagaca

SEQ ID NO: 72916 - DNA, 1051 bp, Homo sapiens
aatgtcctcttagaaaaatatgtaatatgatgttttgataagtaggagactgctgtggcttttttttttttaaagtctaaattagtatatgtcccacctgagttagtgaacgcttcttgaatgttttaaagatttccttattatgtctcctgcagtctttttaaaaatgacccccagctgggcttgccagtgatctgacaggcttatcatgaatgttagagagcttcaccccctctccccaagtcaatgcaacaaccaggaagcttctatctgggaagatctttcttccccctttatcattaactaaatgtgacagggacaggagtcaagcttcctctcctccagagatttcatcggagcttatctgtgtgtctattgtgttcaaagaacaaaactgtcatgatggaatattgtgcaaatgcctggacttccagtgtatagaaaatgtcagggtcagactgcagggctgcattccagtgctaccccaagtgcgggcctgctgatcttaaggaggaattaagaactcggttcggctggggttggtgggtacagcagacaaggctgtggctctgtgagcatacatgtgtgtgtgtggcgccttcccataggaatttggggatcttaggggaatgcaataggatgggagggaaatgtactccctggcctcttttagggattcttgtacctactctaagcccctggccctcctcacagcgtgtctcgaggtgagggtagatcttgggtgtggaggaaggtggggattcttgggaacaggagacagtcactgccatcaccacacacctgctccgttccagccgggaatctggggctccggtggtgtcttccccgctctcacacttcactgtatgctctggcaggagggcttgtcacgtagctgctgtgttgaaatctttaggcggaatgcagtacagagagtcagagggcgttttgaaatgtggatttctcagccctgactgctgggccttaccctgacttttgcatctccctttagaaagtgagacccctccattttctctcttctaccaccttt

SEQ ID NO: 72917 - DNA, 1055 bp, Homo sapiens
gatgggggagttgtggctgtctgctgtggatttggcagtacctggcctctgtgcctccctggggaggagctggtgagtgggttaaagggtccccaggggtaactgcaggctgcatcaaaactaaatcaatcctaggggaaacaagctccactttgaaatccttggtagcctacagatctctttttttatttactttttttatagtactttaagttctagggtacatgtgcacaatgtgcaggcttgttacataggtatacatgtgccatgttagtgtgctgcacccatttactcgtcatttacattaggtatatctcctaatgctatccctcccccttccccccaccccatgacaggccccggtgtgtgatgttccccttccgcctacagatctcttcaaacaaggcatttagaagaattttagctagatgaaatttagtctctggatatccaccacagggaccttattagctagggttgatgacattcatttgagagctggccttgtttgggttgtgtggtatcattaaacccaagcgtatgacagtgtgagatagtttctgttttccaggctttgcttaaataggggtccacattagcacctgatacagaggggttatagaaggaaagtgattaagatgaatgccttgtgatctggagctggtgtctaaggggattgctcgtttctgcctcacctggattgttttgggatttgtctttttggggtagtttgtttctgatagtgcatagagcccatagtattgaatggtacaggagacttccatttcacttcctgaaaattaaagggctttgcccttcctttcacaaaactgtagattcctttaatacagggttctcatgtgggacacagtgaaattttgtagtgctgctttttaattactaccttctgaaatgcaaaagctttggtatggtgtaatatcattaagtacattttctgttctgtccctgaaggggttttcttcaatcctaaatgtatgaggttattggctgaaatgttactctgaaatatttagacctttggctaataaagatca

SEQ ID NO: 72918 - DNA, 1025 bp, Homo sapiens
ttgcacacttaataggctacaatataatgcataccttttatgcacagggaaacaaaaatttgtttttactttattgtgatatttgctttattgtggtattctggaagtgaacttgaggtatctctaaggtaggcctgtatttcatacatgaagaaaggcatagagaccaatataattagtacccatattctacctctctgttttagctataaatataattcttcccctccttgtcccagaggtagccactaattccagagtttgtgtgttgaagggcacctttcctgccagaagcccgtaccctggctgtgctgatagatggggtccacaaattctttgtaggatcccctttttaaaaaaagctttacataaatgttatcatttaaggtaaacaccattctgtaacttgattttctttaataaaagtcagcatgatatttttgagatgtattgttcttacatgaccagatatggccccatacttaatagttaaatcaggaaattgaagccagacagcttgaaaaccttcttaatggaaaaaaatgcaagaagtgggtgggatagagtttctgttgaatttttgtatagaacattgtcatttgtgggaaactagttgatttgaattctgtgttattttgaatagcctaataacagcttaatgaggattaattgcatgttgtatggaaagttaattgttttaatttactatgggtgtagttactgcagtttggttcaaacaggtgaaagttaagatttgtagcataaaacaggaagcagatgggggctaattaaagttctgttgatgataaaaggatgactgatcaaggagcgagcagctggtttctcaatttaaacacaatttgtactattgtatgaagacagccctctgcaagttctcatgagtatctttcaaaggtgaaggcatgtgttccagcaacaagtgtgaaggctgttgtggccctgtttgtgctcgctccccttttttgccttcaagcagtgtcacttcaggtttttccaaaaaaggg

SEQ ID NO: 72919 - DNA, 1934 bp, Homo sapiens
acgtgcctttgggaagaaggtggtggaaaaatatggaataatgagcccttctgactttggattcagcaatttaacattggtgcagtaggtggagttattcttggagtcccagtttgaagattgctgtgcagaaacccatctgtgctgctggttgccaacatttctggtacaaatattgtcatttgctcttgaggcaatctgctatttcagtcctagatgcagttttgtaatatgctgggtaaaatagcagacaaaaaatatcttaagtggtggtataatcttcagtttaaaaacactttagcaatgtttccagtagaggattgttcaacgtgtctcctttccttggctgtaaacataatctaaattcatttttcctcgtttgcctgagccacggttcccttgtgctgactttgcatgtcagtaacttccgtacccatcagagaggaaagacagaggggcagtcttgtgcaggtaaaaggtttaagtagtaacatttccttaagattgcaccctgtagaggtttagcattccatgatcattctgttgataagcaaatgagaaatgagtaacttgctcaaaagttacttggttacaaaaattgtcaaaactgatactacacactatttcccatttggtaccttttatccctacacactatttcccatttggtgccttttattccagactgcaagagtcatatcttctgtgcaggctgctgaacagcttcacaagggggtgcctctgttgcctgtgaggagtaggtgttcttgatgggattggggtctccctggaaacccggggatgggactgtgccaccattttattgggcttttgttattaagcccttcttagagagagaaagcatatcctgtaggaagtagtatgtttccttctgtttctgtggctttctcagtttcttcccatcttgatgcatagtgagaaatccattttacagtatgactcagtgcacatatgcacacaatgatagaagagttttacaaaatagtactgtgcttagccatttatgtaagactgttttgttattatttacagaaatgctagccacaatcctctcaattggtttcactattttatggattgtgatccagagttttagcctgagggctttcccacattctttcaagacctttgtgtcatggcagcagccttgaagttaggggaaacaggtagatgaatccatatatggagaattggccatatatgggaaatgaggagggagttcacaggtcagtcacttgaacacacaatgatttgggctgagccagtttttaagtagcccctctctggattggtctcaaacatggaactagttaaacttacgtactaaatcaaacagacccaaaagacaccgtttgttttttaagtcttgctggcacagactagctaggatagggtttttcatccatctggacatcttgtcgtttagcttttgtatacaacccttgaaaatgggcagctgctgggtccactttcctggatgaggtttcttgcttctttcttttgagattaacctgagtagggctcacctgaatcaattatttccgcagaagctttcatctcatgaaagcgcattccacttttcatgtcttcagggcaaatacgaattgcacttccaccctgaagtcagaactgtaaaggaattttaggtgttatcaatgtttgataagaagtgattaccctttctctgcagagctggaacagctgaagctggtgtgatctggctgggagaaggctgtgctctggaatagtgtcctttccactgagtccctgacttgcctgttggcatatggagcagtaatcttttcaaaactccattgtgaagttggctgtgtgtgtgtgtgtgtgtgtgtgtgtgtgcgcgcgcgcagaggaaatacttacatactaaaggggaaagcgggggaggaaaattc

SEQ ID NO: 72920 - DNA, 1701 bp, Homo sapiens
ggacagtaattgcctggagtctttatgtaagaagagaccgaagagtcttagcaaggagaaggtttctgtttgcggcatttggcccatagtatagtacacattcctgttgtgttgttttgtttgcatcattgggcttagatgttattagatattactagtctaatccaattccttgttcttggagaataggtttcttgtttatctgaatggcttttctttgcgtcactatgccagaatagtcattcttggacagaaatgatggttttaaaatctctcttacattttaagacctgctctaggggttgtaaaatagtactgctgttattgggaggagttgggtaggggccacagcagcagggagagagaggctcccatcgtacaaacttgcagacttttattaaaacgtatttattgattgcaaattatgtcaacagagtgaggctttggtaactcttcaagttactagtgtttccttctttgcatagttgtttcccatcaccctttaaacatctgctgcttctggtcttgtccagtcatgcttgagtgatcagccccagaagtctgacagctcttcctgtcttgactcaggacagtccaggacagctgagctccctgcactgaaacaatgggactcctgaaaactgctctgctgttgacatgagaagcacatttcctctttcttaacttccagaaagttactgtggtggctttgaaatttgttctgaaacaataagctcaaaggattctgttaatctattctgattaatttaggaggcagcagcattcattatttgacttatgttagtggttaattaaccaaagtagaacatgttcactttttataaattaaatgctgatagagtaacaaagacgaaatattttacaacacagatccttgaatttgactctgaaatattctgttattttgcagcagtttccggttttagtgacacttacatactgtttctattattagcaagttttgaatttaagtaacttgaaatggatatgaaagttgtttctataaataatacagactgtactcatgtgagagttttttttctttaatttcattgttggccttgattggggagaagatttatattttatgccagtcttttcttgtttagaattggcaagaattggattgagttgtattaaactgtttatgtgaatagatagttacttttgagatgtctttgaatgtagaatattcttgcagccatttcttgatggtctgccttgactgtcttatggacagttggcatcagtgacactttcatttatttacttatttatttttttttagacagagtctcgctctgtcgcccaggctggaatgcagtcgttcgatctcaggctcactgcaacctctgcctgctggattcaagtgattcttgtgcctcagcctccaaagtagccgggattacaggcatgcaccactatgcctggctaatttttgcatttttaatagagatggggttttaccatgttggccaggctggtcttgaactcctgacttccagcaatctgcccacctcggcctcccaaagtgctgggattacaggagtgagtcatcactcctggtcaatcagtgacacttttaaatcacttgtgtccttgactctttttatgttgtctttatgagggacaggccctttattctaccaaggagacctccatagttgctcattctgaatt

SEQ ID NO: 72921 - DNA, 1777 bp, Homo sapiens
gattgcttgaggaaagacccctgttgattggttgtaatcatctaagatttatgatgattaggaagtctaaataaaagtctgttagatccaatttggacataaattttgaatgcccagtttattggattgccttgaaattctaattggtaatatgcaaatcgagttagagtcttgactatcaaaatcaccttaggactaaattagacagtttggaagctccattaactctttcagagtactgaactactatttagtctacccaaacagtaatttactaagtttagcatacccagacagtaatttgcaaagtaatactttgaagatgctggaaggagttaatgaagcttctgaaatattgtgttttttgggagaatctgactcagcatttgcagtagttggagttgagaaagggcgtctttaaattttggatgcctaattggcaggaattgttgctaatgctacagtctttgatttttatcatactcctacgctcttcctgtcatgttgcagactccttttactaatctatgtgagtgccccccaaggtaaagcccctgtgcacttccgtggtgatgccttctgactggttcagcctgtcaccttgacacacacacagatggtttctggaggccgatttaattccagctatcttgttcttcacctctcgtgtccatttctctccatcttttctcctgagctttggtctaatttgtcaactcagtggggaccagttggctggctgttgccttgaacttgtcttcctctttgaaatgggtttctcctcctgaagtcatcaggttttgaatagcacttaccataattttttaggtgaggatagttttcagcgctgggtcagtgggaaaaactccagttcaactctgttgcctccacagtagagcatggagttgaagcttcttggagttttcctctttctcttcccctggttggctggaaccatttcatcatttcatacttgggtcactacactggtcttttcatcggcttgctgcctccagtttcctccttcactctgctgtgggcaagatgacacatcactttaattataacatttcacctcctgaagcatcttcagacactctgctactttgaggataaaatctaaatccttttgctgggcatcaagaccactcaccatctgaaaggcccatctttccagcttcctttcctacagattcctctaccacccctccgaggccggaggaggggcactccctccctttgaggtattttacacttttctgtgctcctagcagggcatcccttttccgtacccaccctatctagaaccactcaatgaaaaaagccaggctcacaaagacacatgccacacgattccatttgtataaatttcaataaacaaaacgaacataagtgctagtaagtgacagtacctgtgagtggtggtttcacagggtccacgtacaaaacttcgtccagctgtacacagcccatttgagcctttggctgtgtgtaaattagacctcagtaaaacagtgccaatcgtgtaaggctgtggtgaggcttaaattatatagtgtagtatataaaatgctgagggcaaggcctggcatgtgggggaaatcccatctcttttagacagaagcagtcgctctcattctgaattgtatagtagataaattcttccctgacaagactaactctgcaaacagaccttggaagctttttttttttttcagcgtgtttttcacttgacttttattgccatgttttgttcagttggtatctttggtttaat

SEQ ID NO: 72922 - DNA, 1052 bp, Homo sapiens
gttgtggagtgacgtagggagtgagtgtatgagcagagcatgtgtggtgttcattcccatccatccatcactcatcctacatgaagttgcctctggattgggaccttgaactctactaattttatggtagtgtaacttgcagaagacttaccaggtaggtgagcttggtagtatgttttgttttgttttgcatttgggaccatcttcacatgtgtcaactaagaaggatttgctgctaacctatacctaaatctctgacacaaatcctggaaaagccttaaatgattggcaggtagtgttgaaaggtgctgtatcagggttttgtaaatcatgccatctagatagaatgcattgtgttggaatgaaattaaaacaaccattttaaaaaatgtaaatgaccttgggtagaaaaacacgagcattaagctgtattagcaggtgaagataaatctctcccccttcatgtttgaaataatcttttacattgtttatgtgaatttctttctttttttcgggtacattgattatgtatcttcccccaccctccacatttaatcccctaagggatcggtattaatgagttttatgctttgaattttaaaattttcttgtcctcaaaagtgagactggggaaaaagagaaaagactttaaacattttctttgaaagcttttagttatctcatatacctattccttttgaaaatttctctgtggatagccggcttagtttcttgcaaatgactaatttaaatgccatagaacatgtttagattcactgtcacatggttgttcttgctacatttcttttgctcagattcatcttcagaaagtgagggagggggaaagcatattaagcatattattcctgcaattaaggcatagattggctacttaatttgtagttagtaaaaaactactgtgatggaactcaaaatattaataaattgagaaaaccagaatgcttgtcttttgctttagtgatgggactaaggtttacatgaatctttctatgtcatgtagtttcagctagtgcctcttggctctgaaagct

SEQ ID NO: 72923 - DNA, 1058 bp, Homo sapiens
tgaggctgggaactagaggaaagggtttgtgtctaataggaaccaattgaattttagaaaggatgttaacatatagctgttttactgtctataatgttaaatgaatacacttttggcctctgtctagaaaaaaataacatcttaatctagtgtgtgattcttatacataagactttttagggatgacagtaatatttacaaataggtaaaaaaatatagagttgtctggtttagactcctgttgtcatggcatgtttaaagaagaaagcttccagccgagaaaggcttgtgatgaagtagcatcacctttcagttagttctctgtagtatagattatgtgtatgtgtctgcctggtcatagatgctggtagctaggtgtccttgcctgatgccaatatgattctgggctgaatgcatatgaatccattctaatataagtgtaaatagcacatgggaagataaacctaccaagagaaccacatacagatcatatggtttattccagaggcaagaatgataaaaaaaaaaaaagatctgacaccagactaattatgagatagttgagtgcactcagtcatatgtatgctttaaataacatgtaggtacatgcacatacatatacagtatcactatctagatttttcaaaagattgacttgtaagaacaagtgacacacatttaaagtgttaatagtgcttctaggtggcatgtcttgtcttcttttttttttttccttagtggaaattgcaaaatttaggctaattctgtcacattcaatataaatcacacagttaaaaagccactctgtagttttcccagtctttgccccattttggcacataattgttcgggataaatttctgtggcgacaccatcatctgctccagctttctcacctgatctttgcttccccagcacaccacatcaaccccagttcttaattcccttgacaaaacacacttcatgattgtatatggcactctgactgctaaagctaagctctagtacagtagttgagttatagttttcttgaaactcagttgtgctttttcagatgt

SEQ ID NO: 72924 - DNA, 1910 bp, Homo sapiens
ttactgttgacagtactgtagctgtgatgggaggagggaaataacagggctcgtgagagagtgctgagcaccgtcctctctcccaaacacagcttccgtgtgttttagatgtgttctttccctatcatgccatccatgtttaggggcacaagaagagtcaggtgaggagggaatgggcatttaagtccacgtgaacccctctagcagggttcccctctgcatcactgtttcaaggagatgggatagaattatggcgtaactgttttaatgtacgaaatcagcagaagcgatgaatatttttatcttcaaatttgtattacacactgaggaccttatatatgattctaaatttattggtcatatcctgaaatacacactgtgtgtacctagtaaccttgtattggttacagtggtgctgtcttaagtttgtttatttgtttgtttgttttaaataatgtctgaacccaccataggggtagcactctagcacagttttgggtaacaaataagattgcattctgacatggtgtcataaatcatatctaaaagccgtgaggtcacatagaacttgtttatgtaacagggtagaacaaaactcattgttctgagaatatattgctcactcattttatcctcagtcacgatgagttttacagcctatgtgcagtattgatgccactgaataagcatttatttttgatgaagatacaacttttctcctcacgttcagttgagagtttgcaacaagtaagactttgcattctggaatttatgtagatgtatgtgtatagatacatgtggtttttaaggcctggcaaccttaatgaatactggtagaagattttggctgtcttttaacagcattaccatgtggttgaccatttaaataagcagcagtttatcttgatgtagtgaatgcatttaattggttatcctggcaaagcagggtattcgttggttacaagcataattttctgagtttatattatttttccttctagatatttgtgagctattgtttttatagcctatattgaaacatgctttttctttttaaaatggattgtagtatagagctttgttaataaaaaaatttaaaataaaaatggtaaggcagaatgacttagttatttttatattttcctgtaaaaacagcctcagttaagtgagccacaatgagccatgatgtatttcctccatcaggatggaaaataagccatttattatttcaggtctgactcacagtgaacctgctgacactgggatgttttaaaatcataatcataaggaacaggttagggcagaaacttggacgctgggcctaggattacctgcttattacaatgttttacaacttggatgctttaggttttctggcacaatgtcctaaacctcacacactaaacacccccttgttgtacaattattgcttgctggttttagatggtgccaaatagacagatgcctcatcataattaccattttttaaaatttcactgttatagacatatataaataggttgttatctcctctcccttccctcagtacagtatgctcatgcttccacaaaaagcaccccggatgtccttagttaataaaaacgggcagctgaggagtgagggtgtggcaggtggatgcagcgtgtcctcagtgtcgcagggtacataatattaaattacatgtgattgcaaaggaaagcagttacgtcgaatacagttgtgaaaattgtcgtagggtaatagatgtgcttctttatcaatacattaaataatatttagtggcgggtcaccataattttgaggtggagatgaataaacaatattttgagtttttgacagcaactgtaatgtgaaggcatccgatttctattggtgtcaaagtcacaggtactgccaatactgtgatgtgt

SEQ ID NO: 72925 - DNA, 2638 bp, Homo sapiens
cctcacatgcccggtatatgccatgcaccatcccttctgctgtatgtatgtatgtatgtatgtatgtatgtatgtatgtatgtatgtatttgagatggagtctcactctgtcacccagagtgcagtggtgcgatcttggctcactgcaacctccacctcctgggttcaagcagttctgcctcagcttcccaagtagctgggattataggcgcgcacccccatgcccggttaaattgtatttttagtagagatggggtttcaccatgttggccagtctggtctccaactcctgacctcaggtgatccgcctgcctcggcctcccagagtgctagggttacaggcgtgagccactgcgtctggccccctctgctttatttctcatagcacttgttgccacctacccccagtgtgtattcttgtccatctcccccaccatagagcagaggctccacaaggacaagcatcctctgttttgttcattatcttgaacccacacggtggtaggtgctcagcggttgtttgctgcatgaatgtgcattttatctacctctgcattcactgtgtgcttttctgccttactggagtgatgggagtgatcattgggaacttcgggttttttgcatacccacctatgccatgtcttctggagcttggcaaagacttcctcttactgtgtacattgatttgcctcctagctacttcagcatggttttcaagataggaagggatgagcctttcaggagaaactttataacaaagtgtgttaagtaactggccttattttatacacagtttaaatccagcgggccctggatgaggatttgagaggatctctgtgctctgtagttctgtggattagcacttggctttcattgttttcttttagccctgactttctggttcacatttgtttaaatagtctaagtgtttcagaggccgaggggttggaaggctggccaccagataaggggagcatcactatccttgtgctttcttctctgcagggccaagagatcttccactgtgcactgtgagaaagttgctggcgttgttctcagtaacaaaatcttctacgtgaagatttgctgtcccctcagttccttagttttcctctttacaaaatgaaacgtcattgaccatgttttcaggctgcttgcaactccagtgaccttgagtcctgtaggtccctcttgctaagtagaatgttcagatgaattaaatatggtgccattgtgttgcagaatcacactttgaaaagaggtcctattccctgcagtgctcttgactttctgaagaggactgagctcatggtcagcatgtttcctggtggttaaacatatctagctttaaaatttccagctgctagaggagacgaagacgatgagaagcaagcacacagcaaactgtttggcttttagatgcatcctggcctggccgggtggacttgcacagaactgctggtgccaggttagttccctgggacttttccaacatttgtctctgtattgagttttgtccttattcctgaaatagagtagccactgaaatcaggaaccagaacttctggaaaatacctttggaaaccactgtgttgcatggtagaagaaaggcaactgccagtagttaaaataccgggttgagtgctagttttttcaccctttattttttctttttaaggagaggtctgatttactttcttctgtctgttaaagctcttcacaggttcttagaaaaacaagccatttaatggtaccagccgtgaggatccaacttcagttccatgaaagctgcctggtagttctggtcacagggtcctgatgggagaccgtgtaactgctgctaggcagtcagctggagggctctggtgtggctcacgcttgtgtttgttcaagtgacctgaatgtgcttcctctttggggacctgtttcaaatgcacatgctgacgccgtaatcatccactaaaccaagtgagagtcaggaaattcaaattcgtagtgcctgtgacttggccacactccctgtacacataaaacaaggtcttaaatcagagaaactaccatctagattaacactcaaactgcagatggggaccggagctgctcttggtgtgggaactgcaactttgaagttccagactttgatgtgattaacatttcagacttaaagtcctttctgtgtggtaacttttttttttttaaacaccaaactgaaaataaaaattgattagattaggggtgtcggagaagcagattgtaaagggaggagccctcttgcaaaccacatgtaactatgtcacatccttatgtgcctcaggaagagagagatgacagactagtgacctttcaccatatctcttttacttatagctgttcttacagagaccctgccctccaacacacacaccacctccaaaaagaggacacttttgactttgctatctcttattgaccaagtgataatcctgatggagagatggggtttacaggcatgaggtgttcttttttacccagatttcaaggttcaaatactggagatcatcttacagccttcttcaaattgtggctgattaaagtttaattcttcacctctgtcttgctggtgaaaggaatacgagggcagggaaagtggagtttgtgg

SEQ ID NO: 72926 - DNA, 1049 bp, Homo sapiens
attttcattgtagtcttagcaggttatttgtttgacaagcagattataaagctgagtaaaagcaaaactgaccaggatgatgatattttgaaaactgactcagtgatgtaaacagtgcttctacctggtccccatggatgcagtattaaactggaaattaagtccttaaaagtccttaaccttcgtgggttaaagtgttctttatcaggaacagtttttttttcccctaaatgttaagcttgtaatgattctgtgatgctgcagaattacagcattacttgtagacttagtagcatatagcaaaaaatttatcttaaatttactcctgtgtttcttcgtaggaggaataaacagtgaatgggaaccagtatttttcaaaaatttttttggttaatgaagaactaggtattacgatttctttgtctgatatctaatactttgtttcaggcaataaagaacaatgccatatgccttaccaggtagatttttatataaatgattgcttatgaattgtaaatgatatgagttgggtttagaggtttagattttaatgaatgatgctaaattgatgttgaaattgtagagggttgtttgttttgtttttaaaaattggggctggacacggtggctcatgtctgtaatcccagcactttgggaggctgaggtgggtggatccatgaggtcaggagttcgagaccagcctggccaacatggtgaaaccctatctctactaaaaatacaaaaattagctgggcggggtggtgggcacctgtaatcccagctactcggggctgaggaaggagaattgcttgagcccaggaggtggaggttgcagtaagctgagattgcgccactgcgctccagcctgggcgacagagcaagactccgtctaaaaaaaaaaaaaaagtactaaagccacctttgttgctttctttttttgttgttgtcgagacagggtcttgccctgctgcccaggctggaatgcagtggcatgatgatggctcactacagccttggcctcccaggctgaagtgattgccctgccttaa

SEQ ID NO: 72927 - DNA, 1105 bp, Homo sapiens
atgtcattaactcatatttgacttttgggaggagagaactacaaactcatgcagaaataccaaggtgtgaggtaagaagtcatagccatttcagtattctagatgtgcatgtcaccagctgttgtcattgagctaaatgcctttgtgttttcagtgttgtctcgactctgtcgccagcagtagtctggtttagtctggtttagcaaattctgcagccttcctgcctcatctgtgttgaatgctaagattagtaactttgagatgagtagtgttggctgccttcacattctgaagttcttaattttaacttctggcttagagaatatgagaccatggactggatggagaagtctcttaacattagtaaaaggagttaaattctcagggtggtttcgcttttgtgcttgaatgaggatgggagagaatactgccattctctgtgttttgggtgaataatcccaaagacattttatatgttgagagtttagaggtttgacccaatcaaaccgggaattgtataactgggatgtccaataccaaggcctctaagctcctgaaaaacactttagaagttcctgagccatcattgtatgtgtgacctggtatatcccaccggactcacgtgcaggtcttaacattgtgattttttttctctggctctggttagatttggcttttactctatctctggcttctaatcggtcctcctttcattctcccaccctacttttctctcctagtaaatttttcctttctgttagaggcagtaaagtcctcactctccttgtcagtccacatggaagctttgcctacttggctccccttggggtgcggtgaggtgagaggaggagtctagtcctgtgctaatcgcagattgttggggacatgtgtttcaatttcctttgtctcagttttcccacctgtaattttggagcatgataatgggccatccagtgctagtgtctgcaaaacttgcttcgagatcactggacaaaaggtgctggttagatatatttactggcatgccctgggaggatgtctttagatcactacagtattccaaaactcacgttggggtcacgtcagaatgatcagaattccctct

SEQ ID NO: 72928 - DNA, 1012 bp, Homo sapiens
accttaaggtttgtgatgggctttttgcacaaaagcctacttctccaggggacgtccctgctctctcaggttgctatcttgttactctggcctgaaacaagttagcagccactttcccgcagacctgcacaaggcacatcacatcaacggctgttgattagagcataatgacttgttagatcatgtttattgtgcaaatgaacctgaatgttactaggacagcatatccatgtaggcttagaaaacttaatttttaatgccccttctatctttcatcaggctaaagcttttggatttatggttattcattctagctataaatatattaatagtattttgggctggtcagatatggggcatgacctttgacatcctgcttggctatgcctgggaatttgacatccttcaatttaggtggaattcccttgttttgtttcctgtgatagtgtggggaaatacacattttggctccttcggcagaggaagacaggaaaaaagtaaaattggaatgcactaagaaagtattaatgattttatttctgctgtgtatagttgaatgcacatgctttttatggaagcctgagcctatgaaaatagtgcacaataataagaaaatgctaacaatcatatttagtttttgcattttttaatttggatttattttttgactagtttgacatttttgggtttttgaactgttttgcatctaagtatacatggtggaaagaactttttgtgatgcctttactagtattatcagtacagagtatcaacagttgggaagagctacaaaagggaactcttagccggtgtgtattttgacctgaggaagggagtgttctgttgctaccaactaaaagtttatgagtgtgcttctgtttcctgaatgtaatcagcacctccatcaataattatccctgtaggggaacacaatatggctttcctctactgtaggttctttgactgagccaataattaaattgacataaggcagactaacaagataaaaaaa

SEQ ID NO: 72929 - DNA, 1001 bp, Homo sapiens
tagaagctcttattttggcagattcttgaggtagtaacggtcacaatgtggattttattgttctattttgacatgaaaaaggttttttctcttctctaaccttcaggatagagttgcataagtaacatcaagataggcatgttcagtcaccataattttgtatcagagatgatgtgccttcatgagctgtgaggtttaatttgcagaatcatcagtttgggccggcacggtggctcacgcctgtaatcccagtactttgggaggcctaggcgggtggataacctgaggttaggagttcgataccagcctgggccacatggcgaaacctcgtgtttactaaaaatgcaaaaattagccaggcgtgttggcggaccctggggagccagaggttgcagtgagcggagatcttgccgctacactccagcctgggcgacagagactccaactcaaaaaaaaaaaaaaaaaagaatcaccagtttgttacaccagtaggtttcagcctgccatcattcatactatactgtgatttgaatacaggagaaagtgggctctcttgaattacagttacctcatctgtttgcagcagaactctctctctgcagggctacctcctaaacggggagtggggagggaggagaggggaacttgcaaaacttgtaaatatcgattggggttgtttgtgtacttggcaccaagctggttgcattggaaacttttctctctggatgggtaggtatgtaggccatcatgaaatttacatgtggtgaatgggaaagcttcctgtggatcatcctaccctgagagttcttcaatctgtatgactgaattggtctctccccttcaaccttttaggatttaattttctcttcagtggcccattatgacatttacatacgttgaatttgaaagattcccatactcccagtctcttctgttaccggtgtgcctggagcagtttgttgaatttgtgaaattttgagatagaatgaattttgtaggac

SEQ ID NO: 72930 - DNA, 1114 bp, Homo sapiens
tcaccatgttggccagactggtctcgaaatcctgacctcaactgatccacccaccttggcctcccaaagtgctgggatcactggcatgagcccccacgccctgccgaccactattgatgtttgtagatccagtgaagttcagaattacagcacatctttggtcttttaatttttgtaagtaaagatattatataaaacatcttcatccttcaacttcattctcatcttggttctaattttgaagggagggttccctgagggttcttatctccctcagggaagggaggtagatcatttctttcaagatagcctatctctgctgaccttaagtcataggagttctttaattcttagagacctctgccttctcagaggccagtaccacctctaaagtgtcgtggccccttggtctacactgcagcacccctcatctgggaagtgctgttatctccagtaagccccactgtattctttatacatctctggccagccacatatagaaatttccaggctgtcaactttttcagtgtgacttggttccagcatcttgtatacagatcttcgagacctaaaaagaaaatcttttttttctgcgttgatgtatttttctccctagatgatgtttgtctttttctttttcttctttttttttttttttgtgacagagtctcgctctgtcgcccaggctggagtgcagtgacaccatctcggttcactgcaacctccgcctccagagttcaagtagttctccgtctcagcctcctgagtagctgggattacaggcggccaccaccacgcctggctaattttttttttttttttttttttttttttttagtatttttagtagagatgaggtttcactgtcttggctaggctggtcttgaactcctgaccttgtgacctgcccacctcagcctcccaaagtgctgagattacaggcatgagccaccgagcctggtcagatgatgtttgtcttaataaagatgtcattcattctttgagcagttccagttacagagctggtcctaatgatataccccatgagcttaacagccctggaacccctacctgtcttatctgataagggcaaaactgtgatgagaaagagggt

SEQ ID NO: 72931 - DNA, 1041 bp, Homo sapiens
tatgaaaatatgattacattaaacaattttaaaatgcaactacttaggaacacacttgtgtaaatatggagacctatggaatgcaatttatagccagtgtactgcagttgattttgaaactgacatacggaatttggcaatacatagaacagattatgtaattgacttaatgtgaatagttggcatttacaatgtatttagctttttgcttgatctgttctttaaaattaacttcagtgaggcccagtgtcctggtagcagagtgattcaaagaaagaaagattactattaaattaagtcttgcttttttgaaaaatgagaaattctgaattgaagtcagcaatttcaaaatatacttaaggcaattatgagggaaggttatattggcttgaaaagatacttcaaaatgtaaatgtcagttctaatattgccttagctaaatattagatatccttgatggctttcttattgcaataattatcttcccactaacccaaatgcaagaatgaagattataatgggatatttcaatagatccagaggaggttaaatttggataggccaaatgcaaaactgacaccattacagtccaataggactgaatgtattaactgttaagtgtacttggagtgagtctgactagctcatgttgaaccaaaaggtttatgcagtaaaaatggcattgtggcacatcagaaggcacagttgtagattaaataacactcatcagccatttagaaatggcaagtgttgaggagagctgtccgggcgcggtggctcacacctgtaatcccagcactttgggaggttgaggtgggtagatcactggaagccaggagttggcctggccaatatagtgaaatcccatctctactaaaaatacaaaaaattagccagtggtgatggtgcatgcctgtggtccctgctacttgggagactgaggcacgaaaatgcctcagacctgtgaggtggaggctgtagtgagctgagattatgccacgacactccggcctgagcctgggcgacagcaagactctgcca

SEQ ID NO: 72932 - DNA, 1269 bp, Homo sapiens
catttaaaaaaaaaatcctcccccctttttttgcattcaaagtacagtgtgtacttacaccattctttagtccttggaaatggatacaacctacttcaacttgctggagtgcctttctttaaagataaaggaagtgttttgggatatttttagttttgcgtctcaaatggcattgtcagagtgttagtcttaaactaggaatatgcttacactttttaagatttaggtttttaaaaaatagattctgatgttaaatcatctttacaaccatttttatcaggttcttgttctgatttttttaaaaatgcaagaataatttagtttttttttaaatttatttgccagagctaggagacctgttaagttatctgtctggaattggaggcccttgggcagctcccagtgggagcctaatggggctttgctttggagtaggctgcctttctcaaatgagtaagtgtttcaggtgtaatgtcagttggtttaagtctgattgcagcaagtacattttcagtttgagtaaaagggtattttaagaagaaaagaaacaacctgagctgttctaactcataactagtcttttggttagtttcataaaaatgagttacttgttaaaaccaagtttcactctcagatctgaaagactcctgttctaagagtcataaaagagaaattttactatgaattttaacttaaatccagtttttaaatgcaaagcaaccaaaacttaactgttttaggaccgaggagaggttgctttggcacaaaatatttcctgtgatttactactgggaattaggctgaatctttaattaaatagtttcttgtgtgctgcttcctggggcctgcctgaaagtttgagtcatttgcataggacaaactagttggaaaactgttaatgaattcaaaaacttttaatgtcattctttagatagttaagtgctggttatatttgaaggatatgcattttgtgtttgtggggatggtatgttaaatgtcttacacttgttgtaatattggctagaattgctataaggtcacacacaaagtggaacctaagacttttggaaaacccgggatcttctaaatctagtgcagtatttataaataatgaaacttcatttccatgacctgttttttcacatagaaagccttctaaagcttgggaagtggtagtttgaactctgattttttttaataaatggcagttttgagttgactcttttgatattattaggaacactttaggttaaaagaatgactttgact

SEQ ID NO: 72933 - DNA, 1343 bp, Homo sapiens
acccccggcccgcgccgactgcttcggctgccccttccctcccggacctccgcggggggagggcgggttctctccggccgcgccgcggagctgtttccgccgggcgcggcgggggagggcgcggcgaggggccccggagcctcgctgccccgggaccgggctgcaggtggaggggacaggcagggcgcgaccggccggggacggtgcagggcctgccgggcagtttctggaggcggtgcgcattttgctttgttttggttttctccggagtggcctcgagtgccgggggcccggcgtcccgagcccgaggtggtgcctccgacacgtgcgaaggggcggccaccgcctgcggagcgccggcgcctggccgcgcggggcgagctaaagttcaagtgtgaccctcggcgggggcgggcgcgggcggtggcggtggcggtggcggtggcgtgggaggggccccgggcgcaggaagcccgcgcctttaaagggccagcgcgtcggggccgggcgccgtggggccagcgtttctccatgcggggaagcgcccgaacttggtcttgcccctggtaggaggcttttagttagaaacacagaggctgccctgaggggccgggggctgggatgtgtgagtcttttcctgccttgccaccctattcttgagcatggaggaccaggcgggggggctttgcgaccaatgttttgagggagtcggagtggcggtgcgcgtcgagggagcggtgccttgaaggaggatttttgccatttttgcctttcagagcgtggccaggagagacttagcgtgggggcaggcacttcccgactccgaggagaaggcccgggggccctcggctccggggaggcttcccgggggcggggtccagtcgtggcgcggcctccccaagctgacagtttctcactgtcaccggtggcggaattgctgtaaaggctgtctagttgagctaaacacctccctcccctcctccgagacggagtctcgctctgtcgccaggctggagtaccgtggcgcgatctcggctcactgcaacctccgactctctggttcaagcgattctcctgtctcagcctcccgagtagctgggattacaggcacgagccaccacgtcgagctaatttttgtgtttttagtagagaccgggtttcaccatgttggccaggatgttctggatctcctgacctcgtgatcggcccgcctcggcctcccaaagtgctgggattacaggcgtgagccaccgttcccggccgagctaaacacctttttaaaacatacctttcttcgcctctcatattggactccacggcataataaagattggtctttgctg

SEQ ID NO: 72934 - DNA, 1044 bp, Homo sapiens
ccagcccaccgccgcctccccgtggaaaaccgggccccacccagcccggcgcccactggctgcccgggcggcggtgccgcatgcccattggccgcgcgggctgtcggtcaggggcgggccggcgcgcgcgccgccgcgggcggggggcggcggcagatcccgtaagtcgggcggcctggtagtcgcagcagccgctgccgcagccgccacattcaacaggcagcagcgcagcgggcgcgccgctggggagagcaagcggcccgcggcgtccgtccgtccttccgtccgcggccctgtcagctggagcgcggcgcaggctctgccccggcccggcggctctggccggccgtccagtccgtgcggcggaccccgaggagcctcgatgtggatggccccgcgaagttaagttctgggctcgcgcttccactccgccgcgccttcctcccagtttccgtccgctcgccgcaccggcttcgttcccccaaatctcggaccgtcccttcgcgccccctccccgtccgcccccagtgctgcgttctccccctcttggctctcctgcggctgggggaggggcgggggtcaccatggccgaggcgcctcaggtggtggagatcgacccggacttcgagccgctgccccggccgcgctcgtgcacctggccgctgcccaggccggagtttagccagtccaactcggccacctccagcccggcgccgtcgggcagcgcggctgccaaccccgacgccgcggcgggcctgccctcggcctcggctgccgctgtcagcgccgacttcatgagcaacctgagcttgctggaggagagcgaggacttcccgcaggcgcccggctccgtggcggcggcggtggcggcggcggccgccgcggccgccaccggggggctgtgcggggacttccagggcccggaggcgggctgcctgcacccagcgccaccgcagcccccgccgcccgggccgctgtcgcagcacccgccggtgccccccgccgccgctgggccgctcgcggggcagccgcgcaagagcagct

SEQ ID NO: 72935 - DNA, 1048 bp, Homo sapiens
gtgccgcgggactcggagaatctcggggttgtcggcctccttcctgcagtgcccacctggtgggaacttttgtccttgtttgcccccaagtcctgtcatttggctgcggggctccgcgcctcaggggcgccagtgctgggcagcatggagccgcttgtgaatggagacttgctggctgcccaggagtgggcggctgggcaggggcggtgaacgtttagggtccggccaagaaagttggaagtcgtctccctgacctgttccttgcgaggcccgggaggagacgcgcctggccggtccttggcggcgaaactgatttgcatctccacgctttacctaaagcccgggctctggggactggatggcgagctggcctgcggctcctttagccagaagctgggatcttcccgcagcagttcgtgttccctggtggaaaatgcagcctcatctactgactctcccttccaaaaaaaagttattttccccaagggtcgagaaaagtgggtggtcggcactgttgttcctcagttgcaccctggtgtaatttgagagaggggtcaaaggcgctgaaaagattcttttttctattccaagtgctacagcaagctcataaatcaattttaattcatgctgaacagtcttgcctcctccaagccctgtgtcttctccaagccagagctacacataatgtgaattagctgcccactccttctgagtgaatctgttagtacccatcatcgttttctatcctaataattctaatggctatttgtagaatttatttgtttgtttatttttttgagacggagtttcgctcttgttgcccaggctggagtgcaatggggcgatctcggctcaccgcaacctccgcctcctgggttcaagctattctcctccctcagcctcccgagtagctgggattacaagcatggcccaccacgccaggctaattttgtatttttaatagagacgggggtttctcatgttggtcaggctggtctcgaactcccgacctcaggtgatccgcccgccttggcctcccaaagtgctg

SEQ ID NO: 72936 - DNA, 1117 bp, Homo sapiens
gtttaccttttcctatttatgtgcatacaggtatttgggtaccacatttataatttacaagttagtttgaaagatagaaattgcaacagtatggttgggagcctggtatgtaaggcatttgctggtgggcatgttttgaacatgtattgatcccttatgtatactgacacactgtccccatcactgttggacaggtatttccccctgtgctggcgacacagggacgcccctcaccgaggtagagatgctgtgggtagtcttaacttctgaggacaacgaagcccattcctggggggacaggatagggagggggagcgagacatggtctataggttgggggctgggcagaggaggtgcctagcagtgacacagaaacctctgttctgctgtgaggcctatggaatgcaaatggaacccacttttgaggatcttggagtcttggagtgctggagctagagagacctttagacattgttggctccaatgctcgttggatatgtagaaaaaggcccacagaggagcagtagatttgttcaaggttacacagcaagatggtgtgaagacagggcaggactgtgatccctgggtcccttgtctggtgtcgttgctgtctctgctttagtactccgtaatgcatctgcagcacactggaggggagggttagtttggagcctttgggccctgcctttctggatgtggaacttgctgggctttgggaattttctgccagccattgataggagcagaggacctgttgtgttttgtggcagaggtcacccacggaagcgatccatctgtaagcacagagccagctgcagcccgaggtgatgtggatggagcttaaatgtggtgttgtgtgtgtctcttcttttcctttaaacaacgttttccccaccacacaggtttttagccagcttatctactctaaagtgctgggaagttcccatttccctatctgcaatggctgtaagacatctagatccctaaacagctaggataaaggaggatttcaagaacttaggtgattaggtaattattgaaatgggggtgcgtggatcccaaaagttaaatagccttaaagagaaacttggtaccactttaatagtcattcagcaac

SEQ ID NO: 72937 - DNA, 1035 bp, Homo sapiens
gttgttgctagcatttgtacattcattagcctcccccttctccctgttggaaatgtaactgtcccagctacacagcaaatgtgtattctagtaacctgtgatgcctgaactgttcaagatgatcaagttaaaatatgaatgtgctgaattaaatgctttattcagcttatctgcatctaggctctctgaattacgcacccacttaaaacattctgtcaccttttctcttggaataattaaattattttaatgtaattcagatttctttttatcctagcccagcattacctgggagagaatgactcaggattaatcataataaaatcatattaaattatattccactaattcagaattggggataatttggcaattaaaggcggaagtgtgtcattcctctcctgtaagaaatgaacagtaatgatgggctcacagagatcatattgcttgttgcttaaaaaagagatcaagcagttttcagactctggaattgttggcttatttgccaataaataattgagaattattcttaatgtcccttcccccaactccactttccagagtttagatggaataactgtgtataacatcaaattcaggaagttgcatttcttaaatattttctgtaagccttcttttgcattttgatgaagctttaagagctcctctcaggtccagaaggagacggtaaacactaaccactggcagttcccacgacgccaaccctactacagggtgtggggatgttgtagggtggttacagttcattcttctcttctgtttagaatttttactaaaatgatttcacgtggctgggcatggtggcttatgcctcccagcattttgggaggccaaggcaggaggatcatttgaggccaggagttagagaccaccctggccaacatggtgaaaccccatctctatgaaaagtacaaaaattagccaggcgtggtggtgggtgcctgtaatcccagctacttgggaagctgaggcacaggaattccttgaacctgggaggtggagtttgcagtgagc

SEQ ID NO: 72938 - DNA, 1076 bp, Homo sapiens
agcctgggcaacacagcaagatcctcatctctacaaaaaaataaaaattaaaaaaaatctactgttgtatggtcacaattttactggtgccttatgtggaagaacatttccttttttaaaaataactgctttccttttatttatgaagttatacattgtcatcatataaaacttagaaaccacatatgcacaccacagaggagacctgctcatcatccaccactgagaatgaaccgcccttctgtttcagttttctccaggagaatgctgttcagatgcagctggcagtgctacctctcgtcagcagacatgctgcactgaaactgtagatgctgcttatgatccaagatttagcttttctttcattagcaaaaagcagagtattggaagaggttgtctgagccagatgaacttgaggagttttaggaagggtcggaaatgtctgcgaagatgcaagggaacccacctttctctgtccaaatcttcccaaaacatcagactttgcctctttgttggtcttgccttgggtatttattatatagagactaaacagaatttggaaaccactgggatgtttagctatccctgctttgaatgttgatttattttataccacttaaaattattatataagcttcaagattgcaaagggcagtcttagttatttcagtaggagtttgaaacctgattgcagctgcaggtcccacacaactgaattcggtttcttgtgcacagcactgttctctggaggtgcctggaggtctgaaggtgtgcccttttatagacaggaattccaccatgatgggtagagcttgttttttaaaaaggcttgggactagatacgattgcccaagaagacagtgtagacagcgaggagggctgagcatgaatgggatgagcctccagcacagaaagggcaggcaggaaggcagtaaagaaacaagcagggcacaaaccaggagagtatggcatgccatgatggagactgaacagaagcaaaaactacaggcaactgtagttttgttccctgttgaaggagagacactctattagagaagacctggaattcagttcag

SEQ ID NO: 72939 - DNA, 1053 bp, Homo sapiens
tgggtgtccttaagaaagggttgggaaattacgtcacagtgtctctctcgtgaagaatcactctgggtacatttatttcatatagtgtatgtgttatttagttcattaaagatgcgtaaggctgggcacagtggctcacgcctgtagtcccagcactttgagaggctgaggtgggcagattacttgagcccaggagtttgagaccaacctgagcaacatggcaaaaccccgtcactacaaaaaatacaaaacttagctgagtgtggtagcacatgtctgtggtcccagctaccagggaggctgaggtgggaggattgcttgagctcaggaggcagaggttgcagtgagatgatgccactgcactccagcctgggcaacagagcgagactgtgtctctcaaaaaaaaaaaaaaaagaaaagaaaagaaaccatcctgattaaccttgtctaatccagcactcatcttttttgagcttgggcccgttttttttttccatcctgaggaacagtgtttgcctcttacctgttggggaaatgctctcttagagtctacaaagctctgacatgtatatcatgtctctatagccctcaccgtgatcctgtgagaagagcaaggcagatgttacctctcttagggatggaaaactgaggtgccgatgttgacctgctcaaggtcaccccgctaaggacttgaaattgtgtcctctgagctcctgcccagtctcctttccatcagaccacagttgggggtctggaatattttataagggtcagttctagagagaagattaatcaggagcagtgaaaggaaagaactgcttgtgagagcctgtggtgaatttctgcaatcacattgtaaatatttgtctgttcccggtttcaacatgacccagaatgttctagtttgacgtttggctggacagggtcttacatagcaggagtgctcaggtacatgtttgttgaacatatgacaaatggatgattcttacaaaatcccatcctatacctattactgtttcaattccagttctacacattcatactacatgcaga

SEQ ID NO: 72940 - DNA, 1034 bp, Homo sapiens
atcagtccccactcagtgagaatggggtttggaaaagtgccctattttctgcacccttgagattcattacagccaacttgaatctaatattcattgcctagaagtccaagagtgtaagtctttaaaactttttattgaaataatacacatagtatcatgaatgcacattgaagtcacagtatgcagctctataaatagtgacacaatttatgtgcctttgtaacctgtgtccagattaacaaatagaacattaacaacacccagaaagctgccctcatgttccttggaagtaattcaaggtaattaaaagatagtaatagttatatccaaaggacttaggcagatcaacaccttgaattatcagttgactttgtatttgaggtctagcagtgttcacacaaggcatggtatggtagcttggggctaagactcggattggaagggaggttaattgtgttgagctggattactttgttacattccatgtagcagtgctgcaggaagggctggctgatggggaatacctgacagtgtcttctgaagctctcagaaggaaaatagtttttaaatgtctgtggcctttattaccttgggacttgatccttcatctgtccaagccaagtctccttcttgctgagaacaaagtgaggagagagggattcactaagttgcactgagtatgtgatttcttggcctgttcttagcagggataaacctgccctggttgccctcaatcatgaaggggagtcagacaaagagtgtcctgtgttctggctgctacaggagcagggctgcttagaagaaattctcccgcatccctggtgctctgagaaataaattcttggtgcttctgcataacaggagctatataacttgttctcagaatttgtcttgtcttcagacaacatttactccttcactcatttctctgcactaaaaacagatcctgtaaacacctgaacaaatttcccaaaaacacaccagaaagattgaggaaataggaatcacagcgataagggactgggcaatacaat

SEQ ID NO: 72941 - DNA, 1050 bp, Homo sapiens
tgttactcatagtaatcctcccttacatttgtataacatgtaaagttttacaaagtacttacacctcccttatctaattcaatcttcataaccaccctgggcagtactaatactatacacaggtctccaacttcaaggttggtgttcctgccactgcccaggtgaagctgcaaagctgctgccacctctatctccatggttgcctctgtctggccatctcaggcctcagctctgccccatccatatactaagagttaaccaagcgtggaattggggtatgttacctgagcatcagtcagttttgccaggagacctgatacttgtccttgtttccattagtctatttaggaaaagctgggaatgcatccttctatgacttgttggtttttagcactgttgtctgggtttgcatgtgtaaatatacctatgctatgcagctgcgtgggtatccccaaaggagggattgttgcagtctttgaccgcccttttatttgctaggaataacggccttatattctggactgaaacctactatgattcgagcattccctgccaatggagcactctttttggcctacgaatatagcaggaagttgatgatgaaccagttggaagcatactgaagtgtcttggtgggcctgagccaagcacaggtgtttgaggactacagttcatctcagggtttcttggagtacaagaccagtgtgaagttattctgatttcttgggaattttgctttttgtcttcccttctaccctacatcttaaactttatggaagaacctctattttgcatcatatcatttctgtccataattgtactgaaatagaaaagtgaccgctcttgctcttggtaaaatatagagtggtcagtagccttatgcacctaattcaaaaggtggaatatagttctgtcagggcttttacgtaaacctccacttgtacatgcaatttggacagttatgtgttgagggaaatacagtttggtaccttgtttatttcaaatatcagaaaaacccagaggtgatcatttctcatgaagatgcttata

SEQ ID NO: 72942 - DNA, 1082 bp, Homo sapiens
attcactgaccaaaaattcactgaccaaccaaccaaactccacacttcatctgatcccccatagacttggggatggacagctgttctttggccatatggtataagaggatcattcttgtcactacttaagttagcctcatcattttgtgctgctccaacaccagcagggtatctcccaataaagtgttcctaagcagcctgtatactgagtgcaagcaggctatcaattttaataatagtccataccatgtatgtgtttctgtcagcagaatgtacatgttgtacaaaacctccaggttccttaagctttttgctgtccatgaatcctctgtggcaactgtaatcacagagccagaagccagagggccagggatatgagaggctgacaaacatcaggggacatctggggaggagatccctgtcatgtctcttgtgccatggagctattatggctggtcttccatttgctttttctttaagtgaaaaccatttttctactttgcttttctctccatacttaaatggtcagtagctactgagtggtgctttatctgaataggcctggatcgaagtaaaatagaaatgggactggctttccacaggaagtaaactgcttcagagcccacagtcccctgctcagtgtccggaaagaagtcagtcatccctgttggcagtaaatcttcccacaggccgtccattagagatttaactagatatgttcaatagaaagagtctgaggcaagtggaaatgaggaacggaaacttaggttgggagaatattttttttttattcattctgtttgcttaattcagagtacagtttgtgctatttcatatctgtactccaggcagaaatataacttgaaaatactgtgtctaaagaaatttcagtgttctatcattaaattatttacttaatatttgagtctgatgaatttcattgaagttctttacatccatgttgggaaacaactgtcaggaatgttaaagagttatgtatagtagtgtttcaaggcagtggttttattgcaacaagcattgttttctgtcagcaagacacctcatgtaaaataatttcacca

SEQ ID NO: 72943 - DNA, 1117 bp, Homo sapiens
ttatgtaccacattttatttttttatttttttaagtgttaaataatctttatttgatattacacataaaccacactaaaataccattcaataagtaaaaggaaccattttaaatacagggaattctaattagattggcatagttaaggccaaaaatataaagtaaacattgctaccttatcttcaaccctggcctttaagaagcaaataaacacaaaatatatgtgaatcttgcatggttttgagacagtgaaggaatttccccagtatttaaatatattcacataaccagttatataaatctaaatataaaaccactctccaataagttttaagatggcactcaccatctttgtgaaaagttgaacattattaacaaagtctaatcatatctttagaaggggtaaacagtgatagcatttactgaattaaaattacttattaaaattcaaaaaccaaactaccaaacttattcatttaatcacaagccagtcttagttttaaatcaggactgtccaacaaaatatgctctcagtcattcatgatctgaagtctggtgtatgagatctattaaattatggtacacacaaaaaagtcaggagacatttctgttttttaataaataaggcagtggaaaattgttacccactaatagcttttttgagataagctatcaagtctgcctttctgccttcttaatgccggcaaagatcatttttgttccagggatgtacttcttgggattctccacatactccatcagtgtatcctccccccaggtgatgcctttgttcttattggcatctgtgtaagagaatccaatggcctgacctgtctcctgcctgaagagaccatggagattaggcccagtcttgtgcttgcctccctttccacggtgtggcactgggcacacttctgaacaaaaatcttcttgcctttctcaacatcacccgtatttaattatctctttcatcgctggcactacaaaggtttctgctcggaagccagatgtcccattctctctatgtaccacattttcattatccaatctatcattgatggcatttagattgattccatgtctatgcatgcatgcatgtatctttataagacaatga

SEQ ID NO: 72944 - DNA, 1005 bp, Homo sapiens
gggctttagttcctctcataaaaggaagagatgtattggattagactagatgatcaccactttctcttctagttctaatttttttaattctaatacctatattttcaagttatgtcaattaaatcattatcaggttatttcctaatgtaagaatagctaaaatgttgcagagaaataagtgacccaacaaaatttattcatctgttatgggtaagatctgccataaattcttcctaaataatttgtttactaactctttaggccactgtgctttgcggtccattagtaaacttgtgttgctaagtgctaaacagaatactgctattttgagagagtcaagactctttcttaagggccaagaaagcaacttgagccttgggctaatctggctgagtagtcagttataaaagcataattgctttatattttggatcattttttactgggggcggacttggggggggttgcatacaaagataacatatatatccaactttctgaaatgaaatgtttttagattactttttcaactgtaaataatgtacatttaatgtcacaagaaaaaaatgtcttctgcaaattttctagtataacagaaatttttgtagatgaaaaaaatcattatgtttagaggtctaatgctatgttttcatattacagagtgaatttgtatttaaacaaaaatttaaattttggaatcctctaaacatttttgtatctttaattggtttattattaaataaatcatataaaaattctcagtgtctgttttcaggcaaaagtttcttaaagaataagtgtgcagagaatattactagaacatcagcattacttaatgtttataaataaatttcattagtcagaattgcagaatatcatcctttcacttttcctttctagcaggccaaatggcaatttctaaacatcacacaatggattaccaagttgtaaaaattagacaacaataaaatattcccagcaataatattaaacacacttttgttt

SEQ ID NO: 72945 - DNA, 1136 bp, Homo sapiens
tgtctcactttaatttcatcatctcaataggactatacaggctccaacccaagttccagtggttgtgtctcctaggaatcagcagttgcatacagtaacactccaaacagtgccactcacaacagttatagccagcacagatccatcagcaggtactggatctcagaagtttattttacaagccattccatcatcacagcccatgacagtactgaaagaaaatgtcatgctgcagtcacaaaaggcgggctctcctccttcaattgtcttgggccctgcccaggttcagcaggtccttactagcaatgttcagaccatttgcaatggaaccgtcagtgtggcttcctctccatccttcagtgctactgcacctgtggtgaccttttctcctcgcagttcacagctggttgctcacccacctggcactgtaatcacttcagttatcaaaactcaagaaacaaaaactcttacacaggaagtagagaaaaaggaatctgaagatcatttgaaagagaacactgagaaaacggagcagcagccacagccttatgtgatggtagtgtccagttccaatggatttacttctcaggtagctatgaaacaaaacgaactgctggaacccaactctttttagttaatataccaaagcttatgaataattgtttgttaattgaacattttcaattatatgcagactgactgattctaagataaattctaaggaggtttctaattttgtaattgttaaaaatagagttaattttgactttgttagatgagggaggaaaactcaactgtttctctttgttatctaaatgtttcagaattcaatcgtgaaggaacaggcattttacactatgaagacattcttttgagatttttatttcagttgctatatcataagcatttttaaagtttcttttctaattttacattgtattagattttctgattcttttgtaaatacagaacttaaatagaaggcaacaggaaatttatataggaactattttcattccacttgtgtaagttaagtcttgactctttcaaatgcaaaaaacctattttatgctttgttaaaattatggtgtcacttagattgactttagttgactgcactatataatatagaacta

SEQ ID NO: 72946 - DNA, 1051 bp, Homo sapiens
gcatgagcttcttaaaattaggaatttaaaagcaaatctgtttgattcattcctgcttttttttttttttttttttttttagatggagtttcactcttgttgctcaggctggagtacagtggcgtgatcttggctcactgtagcttctgcctcctgggttcaagccattctcctgtcagcctcccgagtagctgggattatagtcacgtgccaccacgcccggctaatttttgtagttttaattgagatggggttttctatgttggtcaggctggtctcaaagtcctgacctcaggtgatccacccgcctcggcctcccaaagtgctgggattataggcatgagccactgtgcccggcctgctattttaatatttgagagataatgttaccaacatgctcatccacaataattaccaaaattcatataattgtattcaacctgtttttacatataaagggagaagtgcttaattaacctaaacaaaaaacctacctcagtcttaaccatatgacagaattcttagaattttaatagctcacatttcatgtcatatttagatgaaacaagccatgattataattaacctgtcagggctcttggactggtagagaaaatatggctaagctttggaaaaatacatagaagcatgttttagcagttttccaggttcaaataattttcacaaattttggtcataaagctacagtttaacataaaatcctttaatgcaaaatctagtttatgtaggttgttaatcccactcattgaagagaaagttacataaatgatattatgagtcaatctaatttaaaaagttcacagctctgaaatttatagttaaggttattgttaatatagtataaaacaaatggtgttgaaaaatctcagtatctggatgtcaactgtttcctttgaattctgtaaagttatttaatgaaagatacttgctatttcaaacagctgacagctagactagtctccataaaccaagcgttaaatattaccactagattattaaagctacattttgaaagttagttatgcagtct

SEQ ID NO: 72947 - DNA, 1030 bp, Homo sapiens
aaggtgtagtatttgacagaataatgccagtaatgtcaaaatgtaaataaagggaccagtggcataatcagaggactgacataatagtaactgctcctgaaaaatctggtaaccaagaattctagcttgaaacctttatacttttattttcatttctgaatcttgacccacttaacaaataatgtctctggtcagaaacatattgaagtgataagcatcagtagtttggttttctcacctaatactctgaacggaagaatttaatgtttcatcctgcatggtactggttctagctgcttctccctctgggacagcctgtactggctgtactacatgaacagtccggaagagctgggtaggatatggagactgcgtgggctgcactgtcctcaaaacttctgatggttgtgcaacttccacaggatctttgggttttgcagctttagaattccctggttttagaactgtagtggctcctccttttacccctggacttgaagatactctcgaccggctggtttgattcctatttgaagtggctgatgaagatagcgatggatctgaagactctatgctggaacttggatcctcatcatttatatatataagatcttttggcatttctttaaactgatacaccaagcgctgaccttccacttttgccagaatacccctttggtaatagtacctattcaaagcagacaatttcatcaatcaatcaaacatcaattaaaatattcaacaaaatcaaatttccctaatcataaacaaaactttaaagttggaatcaaactaatgagaaaagaatttctaaataaagggctgttattttatatgagataaacatacatttatgcacagatagagataagttcttattaccaactaaatctaaaactaatgctgattgggggactgttgataaactatgtggaatcctctggtctttcacttttcttcctctttctgctaacttatttacttatttatttggagacagagtcttgctctgttgcccaggctggagtgc

SEQ ID NO: 72948 - DNA, 1053 bp, Homo sapiens
taatcatcaaaacattttatttattgcttactatatgccatgcattatcacaaatgatttatttacacattattcttacaacaattccagaagatactattattcttattttgaatagatgtaggaactaaagcttagagaggctggataacttgcatgagttcaaatacccaggccatggtggagtcctaccttaaataagaacctgagtttttactgttacaccctgttcaccatgtgtgtatgtagtgcatttgctgcatggtaaggtactgtcagatcgtgttgtaatagagtaaggtgctgggtttttgttttttaaatcaaatgtaaaaggaagtgatttcaagaataattcagaagtcctcaaagcagtgtcttcataggataaggctttggggcctcagtctgatttgaaggctgggcacagggatttgtctcaaagatgtgttttcatagcaagtgcagtgtttaatttgtgtgcttattggacaggctttggagtcaggggagctgttgaagactgtgggaggagtaaggcaccagacccctcttggtgttttcttgccttgatgcaaagatgttgcgtgaactactcgaaggtgtgctcattttgcacctgtctttaaaaagtagtgtctgctttggaaaaatgctagagactaaatttaacttgctttttgttttgggaaaatattttgtaggtatttcattttaagctattttagagaggattttgatgggatgtttcacaatcaccatataccagattgagttctgctattagagaaacttggtaaacaagttatatgaaagttcttgtgctttttgatacccaaaaacttgatgaacaaaattattaatgaagttggaataatgattcatggtttctgaaatatccacataggaccttggattgtggtatgtggaacaagcaagcctagttaggggagtcacataatgtcctgcttacattggtcgctttccttctctttttaacttgatggtattgccacatacgtgatcaaccacaagtggaaactatatcgtgga

SEQ ID NO: 72949 - DNA, 1034 bp, Homo sapiens
aaagatttaaaaatacttcttactaaactttaaatgtatttgattttaaatccttatataaatcctcttaaaggtgaaaatatatacgttgtgaaattactcattgggtagcagtttctatgtatgtgctttgctgagttggtgaaaagaaggaaattgtttatatatcctttattgcgattacaaccctcattattgctggggttttttgaccttttttttttttttaatattgagtacttttaacagtagtttaactggagagtgggggagagaggcataattttcagtagtgacagatgatcttagcaggagcaaactgttcaaataaaatatgtaacttttaaaaaagagcgtatgtgcattagtcgtgtcgattttatttaaaaacgttaataataaaaaaatgctttagcgatactgccctctgtatcagttattatatcctaagtgggtgattgctttttcataactaatctgagcttttgttttttaggccaagaagcttgagagaagaaaaatttcagaaaaattgtctcaatttgactagaatatcaatgaaccaggaaaactgaagcaccttccctaaagaaaacttgggtatacaattactccacagacagagctgagggttttttacccaaatcagtcactggattttgctgcctgatacgtgaatcttcttggaatttttctcatgtggatctaaggggaatgctttattatggctgctgttgtccaacagaacgacctagtatttgaatttgctagtaacgtcatggaggatgaacgacaggtatgagattcagagaaaatttcattttaatgactttattatgatttttctattcatatcagaaaattatttcctttaaaagacaatgagagaaactttattgaaagtaaaaatttatagatgaaatatttggaggaaatattatactatgttttaagcaccagttaattcatgaagaataagtcttatccttagctttgatatggtaacaaggaagtaatacctttgggattcagct

SEQ ID NO: 72950 - DNA, 1038 bp, Homo sapiens
gttactttataaagactgacactttgaaaaaaacatgtttgagaactattaatacagcagagtgcttcctgactataatagataattaaggatgggtaaatttaaacaagttttaaatttactgaggacctttcaatttgttaggttagaacagaagccttttttctaatccgagtgcccatattttttttccatctaagaccgtatttgaggaattagatgatgcatttagttttggacatgttttttacacactgacttcaaggggcactgatgtagacttgtcttatagtttagtgactggatttggagctcagaagctgaacctagagatggagattttaaaaattttttacatatgcgtttacttaatctgtgttataaactgttatagcagaaaggactttggtggattttagaggcccagctgtatattacagttttagagagagtcctgatttaggaaacaagaattctagttttagttctgttttgcttgtagaccgtgagaacttgaccaccccaatttactaattaaaaatggaatcattgatttagatcttcagtcttgtctgttactgaaaaaattgtaagatacctgggctttgtaatcaaagattataagaatctttgatatctacaggtgctccctctggatcaggtatcagaaaatgtattctcaagaatcaccttgatgcagaagagtatataagtacacaggggagaggaagaggagcaggaaagatgacagagaatcaaagacatgattgagccagtaaaatgcttttctttgcttacacattttcagtttgtggacttctctatagaaataagcaaaagctacatgccagagcaaaagtgtctttttctgctgcaataagtggcttagtgattgtggggagccatttcagttttgatttattactgttagttgttagtatgtataaggtgtgggtatgttggttgcttatcctgattttttagatttctgaaagacaactgttaaagcacagtagcagtgtggaagtgctggtacga

SEQ ID NO: 72951 - DNA, 1062 bp, Homo sapiens
caagtgttacttatgtaaacagttgggtaaaatagtttgagggcctgttctgttgtttagacacttggttttttactcagtcattgtggttttcaaatcttaatttgtgtggtgtttgctcctaagaatacttcttcaaaagactataaatgagtctttgcgtgcatattgaatcttagatcccaagaccaaaatacttttttattggctctgtttgcataaacactcttcaccatttatatgtttgtgctactgtactttcatatattttcacacaaactattggactatttataaaacaagacataaagatgtaacagagaaggcaggaaatacttgacatttgtgtgccatatcttactctgtgcttcctgtcagttaaaccacgatgagaggaacagagacacagatgtacaattgctgctttaatttgccactggggagaccagttaagcataaagctagttttattaaacttttgtcacttgttgattcgagggacgttgtaggcttgtttggtattatatggattgtatgcatcatgtggtggcaattagatgtttgctacagcacctaataggaacatatatcttttacatatttaaaaggtatttacttttgtgacattttttaggccataaaaaaattggcatttgaattcatatatttgatataaattcactatgaaatattaggctaatattttgatcttgaaattttagtatctaattattaacttttatgtattagtatatcaggattctgtaaaactttcaaagcattttgtagtttaccaagtaaattcttacttggtacaacttcaagatgaaagatgaaatggaaagttatagaggttgacttatctaagaaaatacagttagtaaatgatgttcaactacaacttgaatgcaggtgttctgatggtagatcctgtatccctaatgttagggaaaaggtttgttttcattaaattcctattctacctgtttctcagtgattttaacttttagggtcacctttgcttattcttcccagaatatcccccaccccctttcctttcat

SEQ ID NO: 72952 - DNA, 1030 bp, Homo sapiens
gtcttccacaaaactgtccctggtaccgaaatggttgggcactgctgttttagttgaccatcattgcatatactgaaatgtagatcatgcatatataagtattatgtgatcacatactgttttgtaacttttatatttcacttaaatatgtcctggagatttttccatacctgtaccattttatttagacaatagcagtatggtacattccatataatgggatatagtttctgtgacgtttcccgatttacataatagtttgtttctagtttcttactactttgaacaatatcgtgctgaatatatatctacatctttgcacgtgtatttattttgttagaataaatcccaaggactgaaactgctagataaaaagatagaggcattaaagtcttttggttgtgaagttgccttctggaatgatactctttggactctcataaataaaatatgaaaacatttttttccatgtaccctctctaatcatttgaatctttgctaatttaatttagtaggtgaaaaatggcattgtttttctgctctgaggttatgagaatgaacatcttttcctgtatgactacatttcttttgtgaagtgcctattcatgccttatgcctgtttttctattagggtatttgtttcaattaacaatagctttttccctccatattttattatgaaagttttaaaacacacagcaaagttgaaattttataatgagtactcatacacccactacctaagtttttattaaattgcagatattagtacattttcacttaaatattttagcatgcatgtcattgagcagtgtttcagtattttagtttttttcttttgagataaaaaactgtcttagaactaaatacatatatctctttaccttaaacactttattttaacttaaaacctagaattggatgttaattggtcaatcttttgatgaagggtccaagaccattttctttgagagtgagcccactgtcacagttctgtattgtatcgtcttaactgcacatccacaatata

SEQ ID NO: 72953 - DNA, 1041 bp, Homo sapiens
aagagttttgttgcaccacaatgtgaatgtactaaagactattgaactgtatacttaaaaaggattaagataatacgttttgttctactttaccccaattaaataattttaaaaagcaaatttcagtttgtatgtggatactctatgcacattatttatgaatgtaaacagcatctgtaatgatgcagtttcttatttcaccaatatgtgagtgttagatgctgggataaaacaatgataaaagctgacaagatcctcatgaagcttgcagtttagtgggagagacggacatggattgaacaagtaaaaagtgtgcttaagtgtacacgcatggcagggagacccctaacatagtgtagggaagggctggattgagaaggcttccctaaggacatgacgtttctgtagagatccaaaggatgactaagccttatgtaagagaaagggagaaaagggaagagagagtagattgagggagtagcattttgcaaatggtctgcaaggaggaaagagtgtattttgggaaatgaaaggcctggtgggctgtcatgtagaaagtgagatgcaatgggagatgaggctgcaaggtatcaaatcatataagacattctaggccatgttagatattttgaattttatcttcagcagagtgggcagatattgatgggttttaaatgagggattatggaggtggaatggcataggagcaagaaaaatgatgtacttttttgtacacttggtctttaactgtaaactacctgtttagtatggtgcttgaatgttggaggggattgtatattggccaccattgtgagctgttcatatggtaaagtgtacttaaagggtgaacttaagagaattgtcaagggtaattgaggataagtgattttcaccttgatactgtgatttggtagtttgaagccctagaaattgatacttgacttgggagagtctggagtaagaagaagactttgagcttttaggacctctagtggtaagtggtgaggaggtggggcagagaaaactgagaaagagtagtcc

SEQ ID NO: 72954 - DNA, 1032 bp, Homo sapiens
tgaggtggtaggattgcttgaacctggggggttgaggctgcagtgagctatgatcgcaccactgaactccagcctgggcaacagggtgagaccctctctctagaaaataaaaattaaaataataatggaataatttaatggggaaacttcagctcctagttagttccacaaatgtggtaagtgcttattaaataactgatggaggaggttaggtaagtatacagataattatgatacaatacatagtttgataaatgctcagaggggactaagccaggggtcataagtgtttgatagtgttcaaaatccatatctgagtttgtgtgaggggaatgaggaaaggcctcctgtaggaggcagcattcgagataagctttgaaggctggttaggcttttgctggtagagacagggatggggacaaggcattgagaggaagcaagcaggagcagaggcatgtcaacagttactagcacattttaatggagctgagggtgcaggtaggataggaatgggaaataaggctgcgaaaatagattagggtctgtagtggacaatgtgtttttactatcctcctgatgcctagtgtgcctccaatggctcatacttaggaagaacgatacctcttacctgcagagagctggaagtgtctggggacatatcctcctcccgctcacagaccactgtcaggagtgtaactttggagcaggggctttgacttgtttccctctgtatcatcagacttgaagcagggcttggcacctggtaaacattcagaaaacatttgaatgaatgaatgaaaatcaagaagtggcaagcaaggtctatttaaagcaaagcaaagtttattttacgaagccccttgacaaggagattttggaagcctcttggatttggagctaaggagtttagttaggaaaagagatttctggtaatacgaggaatgttttaatgaaatgaatttggtagtaacgtgcaggttgaactggtggatggaaggattatgtctgtgctccccatctccactgtccctt

SEQ ID NO: 72955 - DNA, 1357 bp, Homo sapiens
cctcccagcgcccccgtccggcccacaccctcttcagccgctcttgcgactcttcctatgcaggacgggctgacccccctgccctgggcgccccagagcccgcgcccggaccagtagctctagtggttctctggccgcagggtatttacgaggccccacggaacacagtgtgccttccgcgccctcccggggggacgcgctttcccggccgcgcagccgcccggcgcccctttccgccgcgtgtgcgctcgcgtctccacccgcggcgcctgagcaagcgcgaggccggcctgcgaggtcttcccaacttgacttaaggggcgctggtcgcagtcacggaaagtaccctcgaaaaaaggcctttgggaacgagaatcttttttctttccctttaaaaatacacaccacgagctatggaggagaaaaataccactctgatgagatggctttaaataagtatatcgactttccaaagggtctaacattttgagcgcggttgatttaaagaaaaaaattgattaaaacaacggcaaaacatcctggggtggaggtggggcttgggaaagagaaaattggctggagactggggaggggacgttaaaacaaagtttcactgtatttttaaatatagaagccctgtgtttattacaaagaagggacagctgtgtcagcagcatgtgagctgtaaatgaaacaaaagcgttatcttaaatgcaagctgaaattagaaaatagggtcggctataatgtttattgggcctctgggaacaaacgaagaaggaaaaagtgactcttgtagatgggtttctggtcagtgccattactgaaagcagatgttttggttgttagtatgtgtgttcccagactattttgtagctttaactgcacagtaaatttgttaatgtgatctgcgtgattaaggattaattaggcttaccttgttaaaaagaaagaaaaagcctaagtattttaaatcgtcttcattaattcaaatatttgtgtgtttgctacacaccaagcaccaccacatgcttttgaagttactgatgtttgtattctttatgttagctagtggatagaatactgaatggaataatattttggtctttgtgattagctgtgtgatgagacttttcaccttctctgttctctggctttagagccatacatttttgataacacgtatcactcacaaattttaaatagagttacaagaattgttgagcgattcctgaatagataatgaaagtggaattttcatttaaataagtaatagtgtgtcattattaagaagcagttactaaagaattacagtagttgaaaatttggaaagaaggaaagataactcggataactc

SEQ ID NO: 72956 - DNA, 1057 bp, Homo sapiens
ggtgtttaggatttggatttttttttgatgttttggtctttttggatagttgctaaagttcttcactattttacctaggctatccttataaataaataccatgaatttttaaaaccacacaggtcacttaaagtctctctttcttggaggtacctaggctgtaaaatgaattttgtgagttatctagagtaagtaatcccttccagtgtagtctgtctttatcttcttgagttggtaatacacattgatttaacctttaattagaaacaaaattaatttaattttgaatggtcctttaatattgtattctttgtgtagtgtaatcaactttaggaaacgcaatgtatgaaaaacaggaggattatctgctttacaaagtcacactttaaagatgaattcatggtagtattttaaaatagctcagttaatgcatcatgtaagatttgattgacagaacttattttgcagagcttgtgaggaatttcttactgcatttaactagaaacttgtaatttagggagcatttctgattgtttaaatagataattgcgctcactcaccagcccctgtccccagtcatctagtggccatcactccccataggttatcatttttttttttcattttcttgcctatccttccattgtttctacatgcatgtagacacaagttcttattccagcatacataaaaggtaatgtactgtatatattattctgcactagttttaaaaaatttaacagtatgtaactggagctccctttgtatccatacataaagagcttctttctctctgttacagtagactatgagaatgtaccatagtttaaccagtcagtcccttagagatggataccgtattgttattgcaaacagtgctgcagtcagtaagcttgtgtatatcatgattttgtacatgtgcaggtatatctatagaataaattaccagaaatgaaattgctgtgtcaaagggtaaatgtatttgtagtcttgatagatattgccaaattatcctccatagaagttgtacattttgaaccattaccacattgtataa

SEQ ID NO: 72957 - DNA, 1097 bp, Homo sapiens
acaaatactccactccctccacccccaaactgtgtccttttttttcccataatgcttttgttagaaggctggatggagatgaaatagtgatatctggctgggtgcagtggctcatgcctgtaatcccagcactttgggaggctgaggcatgtggatcacaaggtcaggagttaaagaccagcctggccaagatggtgaaaccctatctctcctaaaaactacaaaaaaattagccaggcgcagtcgcagttgcctgtaatcccagctactcaggaggctgagtcaggggaatcactgggacctggggcggcagaggttaacagtgagccgagattgcaccaccgcactccagcctggataacaaagtaagactccgtctcaaaaaaaaaaaaaaaaaaaaaagtactgatatctatccaaaaactgcattcagggcaaatattagttggtttgccgtcagttgccattcacatgttcctgtccatttggaaggaattgttcctggctttcaaaggtgagacatccactgcttgaaagttggttctttattagcaaaaaccaagcttcctggccatgattagtactaccacccctaatacccaggtgtattagtcagttcttgcattgctataaagaaatacttctgaaactaggtaatttatcaagaaaagaggtttaattgactcacagttatgcaggctgtacaggaagcatggtggcatgagcttctggagaggcttcaggaaacttacaatcatagcagaaggccaagggaaaacagtcacatcttacatggccagaccaggagcaaagggaggtgccacacacttttcaatgaccagatctcagggtagcttgctcactatttcaacaacagcaccaaaggtggatggtgttgaaaccatgagaaaccacccctgtgatgcagtcacctcccacaaggccccatctccaacttggaggattacaagtctacatgagatttgggtggggatgcagatcgagatgatatcaccaggtgtcaggaggagaggcaagggtggctgactgtctgagttattcaatagaaaatcatggttatccttagtttatgctgg

SEQ ID NO: 72958 - DNA, 1181 bp, Homo sapiens
agactggagtgcagtggcacaatcatgattcactgcagcctctatttcctgggctcaagcagtcttcccgcctcagcctcctgagtagtgggtactgcaggaatatggcatgatgcctgctaactttttaattgtttgtagagacaggttctcgctatgttgcccgggctggtctcacactcctgagttcaagcaatcctcctacctcgccttttcaaagtgttggaattacaagcataagccagcacactggggccaggaaaggaaatctctgtgataagcaagtttcaggaaatctcttgtttgctcattatcaatacgtttcctgaaattggtgtcagataaattgtgaaccgttagaaatatcacccagttcttaggtctctcattccattggagttatagtttacacatctagtaaatccgggctgtttgaaatcaatttctgaaagatacaagagcaagaggtttgagaactctgttatcttcttgatcaagagatagtatgaaatacatacagtattgtcatttaataattgtaagtgataaatgttatgttgaaattacatctgaatagaattaataactaaataacatgactttaaaatgtgttgagcagaatccagatgggagaaacctgatgatttcattccacacactagtgatctgccttctagtaaggtcaatgaaaattcacttggcaccctagatgaatccaaatcatcagattcgcatagtgattctgatggggaacaggaagcagaagaaggaggggtctctacagagacagaaaagccaaaaataaagtttaaggtaggtttttaaattttactcttcacatcaaattttttttttttttttttttttttttttgagatggagtcttgttctgtccccaggctggagtacagtggcactgtcttggctcactgtaacctccaccttccgggttcaagcaattctcctgcctcagcctcccgagtagctgggactacaggtgtgtgccaccaaacccggctaattttttttattgttagtagagacagggttttaccatgttaataaccaggatggtcttgatctcctgacctcgtgatctacttgcctcggcgtcccaaagtgctgggattacaggcgtgcgtcaccacgcccagctgacatcaatttttgaaaagctctac

SEQ ID NO: 72959 - DNA, 1044 bp, Homo sapiens
cttagataatgcatcctttgtgcaacaggaataaattaatacatagaacttctcccagcatttatccacctgaataagtgttcagtatcttaaataatattgtaaagtcagtattttaaagtagttcctactccaaaatgagcaacttctaatgtcattagaaagctgatcttggggcattggttatatgaaaacgtttgtcttaccctgtcaaatagagttttactttaactctatttccagtgaggaggtagatttggaacttccaagcactgaaaatgagtatgtatcaacttcagaagctgatggtggcggagaacccaaagtggtatttaaagaaaaaacagtcacttctcttggagttatggcagatggagtggccccagtcttcaaaaagagaagaactgaaaatggaaaatctagaaatttaaggcaacgaggtgatgatcaatagttgcaggagagctttttgtacatgcttttaggacagaatggagacttatacacccaaagtttatctgtgtttgtttgtaagtattatgatgctaaaaatttagatttattctaaatgtatttgatgtgaattaaaataaatattttttcatgtgaaatttattttggttcctaaaatggaagcctaccacattgcattgtaatacagtgtattatgttcagtgtctaaaaactgctaattaagtcataatttaagatgctatgtatctgttatttaaaacatggagaaacagggcctttattccattcatattcataagagcatatttatcctgcattgaaaatgcattacttttgcacattgatattaactgttgtccaacaaataagtatcggagtacgtgagaatattcccagcccagtgatgatttggttctgaggctgatgtgagaaagctgatgtaaaaaatgtatgcatattggcttaccttactcaatttaaagtcaaaagccaacagccaggagcagctcaggtacttcagatgtgcttaatatggagtgaaaactggaccagaggtggaaagatgtattt

SEQ ID NO: 72960 - DNA, 1086 bp, Homo sapiens
cctacaaatgacattatagaaagcatttgctaaacgatgtgctgattaattggaaaacttagaaaagggttcttgtcatgaagatatttcaacactgctagttcactgcacagcaagaattttgtacatttagcagaaccattgaattagaaagtcaggaaacctgggttctagtaccagttttatttataactaaccatgtacaaatcacttatctataaaataatggttaacatctactccttaattcacaaatagatcacaaaaccaagatccttcccaagaaaaccttactgtaaaccaagacattcccactatttagactaggttttaactcaaaggttaagaactcaaaggttgagaaagacaaactggagcatttgtcttttatttaccagttgcataccttaattctgcagatggataatctggttgagataagcattgccatctctcaatttttacaaaacaaaaagctaccaacaagaagttaatggtgaagaaaaatttgtctcaaaaataacacaattgagaaatagctttgtattaagtgcagtacttataacatccctgatgtcaaatgtacaaaatttagctttaggtcactaaagcatgtttacccttttgaagaaacatgtattgctaggtcagccatcctacttcactggaaataacgttaaacttgtagactgttcaaatggccaatcaaaatgactaagaaacattatcgtgtgtttttttgtttgtttgttttttcatcctttctctttccttttcgttcaaaaattcagttccccatcctagaccagactcctctgtcctctgccagggtataagaaaagttagcattctgtcactatagaacatagaagaggaattagcatgttattgaataaagaatcaggaagataattctaattgggtatagaaaaatttatacaccataaacatctgtatatgtacaccatttatcatatatacgtattgtgacaaccatatgtattaataaaccttcaaaaggtaagcacctatattttcttgtaattaacaattttagttttgtgcaatgtagtctatatttgtgga

SEQ ID NO: 72961 - DNA, 1032 bp, Homo sapiens
agttaagttgaaggaagtggaatgctacagtgttcagagaaaccagtgggcattggtggctcctgtccctcattccttctattcctttgaactcatagtggttcagaactatctttatgctgtcaacagtaagcgcatgctttgctatgatcctagccacaatatgtggctgaactgtgcttctcttaaacgtagtgactttcaggaagcatgtgtcttcaatgatgaaatctattgtatctgtgacatcccagtcatgaaggtctacaacccagctaggggagaatggaggcggattagtaatattcctttggattcagagacccacaactaccagattgtcaatcatgaccaaaagttgcttctcatcacttctacaaccccacaatggaaaaagaaccgagtgacagtgtatgagtatgatactagggaagatcagtggattaatataggtaccatgttaggccttttgcagtttgactctggctttatttgcctttgtgctcgtgtttatccttcctgccttgaacctggtcagagttttattactgaggaagatgatgcacggagtgagtctagtactgaatgggacttagatggattcagtgagctggactctgagtcaggaagttcaagttctttttcagatgatgaagtctgggtgcaagtagcacctcagcgaaatgcacaggatcagcagggttctttgtaaatagtattttgagacactaagatgtttctactgctacggaatgtattttaaacacatatcgtttctttttcttggaaaaaaagttgattaggaccacagatttggtttagaaagggtaatattttgaaatactacaaggtttagacagtccatgaaatcgacctgtttaataatttaccatcctgaaagtccagaattaaaatatggaagcaagaactatataattgattaggatgcttggtaggtttttttcattgttcaaatattcattgcacagtggattgttttgattagttagtatgctttttttttaattaatt

SEQ ID NO: 72962 - DNA, 1053 bp, Homo sapiens
taaagatggtttgagagcctagaatggtgttgtcataaaagccaatcagtggaattttaaagggagggaggtggtcagtttcaaaagtccatctagatctctttgttttgttgtctctggagttgttaggaaaatccaaatctcagaagatttattttaaaataaaatgctaactgaattcttctacagagtggggatcttcccaagttagcgattgtgttcattgtattacagaacattagtaatcctttattgttattaaataatgactgcaaagaaattaaataaataaacactaaagtctttgcttatatttctaatcattaggtttcataatagctctctcttttaccaggaatttttatgtggtgggaagggcctggatcagctaattcagagactgcttcaatcagcagatgaagaagccattgctgaacttttggatgaacaccttaaatcagcaaaataaatactaacttattattatttatgattatataaatgaaatggacctatatcaagaggcagactgaagcttggaaatcattatgaatatttgtaaattacagctttaagaacacattacacataaatatatgttttgtaattaatcgaagtcacatttcctgacctaagaatttattttaggtttcctgtaaagtacaatccaactcatcaagtagaaaataagcatgcatcattgaaaagagaaagtattgagaattgattgtgtcatttaggacaagtcacttgttctctttatatgccttttttccccagccatctatgaattaatttaaatatatttttaatctactacttcaggaaaatatggtaaaatttagtaaaatatgaattttagacttccttataaaccttttatttaaatacaaagtaccttggcctatagtggatgcttatgcctgtaatcccagtgctttgaagggccaaagggggaagatctcttgaggtaagaatttgagaccagcctgggcaaaatagaccccatgtctacaaaaaaactcaaaacataaagaaaaaccataatactgt

SEQ ID NO: 72963 - DNA, 1102 bp, Homo sapiens
aaaagtgacagcaattgacacagggtgctgtgtatatcgggtgttggggaggtggaggagatgagcagactaagaagaatgcaaataactgtagcatgagacaaactgtggtgtgccatgaagaacattccaagtacagtggatttcagggaagaagagaatgtatttcaattgctggggccagaaaggcagaaatggtaggagagtattagagaagggcatcccttgagatgatgttttatagcagagataaccgacacacacataataatgacatagtattattagtggcattatggagattaacgtaattttcagaaataacactgggaagattggccacgttacaaagtaccttgaatgctgagttgagttgtgtctgctcagtagacaagaaggaaccaaagaaaatttatcagaaaactgtactgtaggaagagtaagcagggcagcacaatgtgagcaaaaaaattggagattaatcaggagatttttgcagaattgtaggtgaaagtaatgagtccatgagtgagaggagaaatggaaagggcaggatataataagagacccatgaaaccaattggaaatgggcagttggagaatgggatgaactgaagatggtctctcccgccgtgtgcatctttgtcaaagcctggcatagtaaactcagacccacaaaatgtttgataaattgcagaatgtcagaattttctacttggataaaagagaatacatggtactgtcatttatagaaaccaggagggggaactgattggagtggaaagatgattaatttgattttaaggatttggagtttgaaatatcaaagaaacattccttcttattctataaccgagctctacaaacctgtagtattaaacattaagttctgcccattctttttctttgtcattttgtatatatgtcttttagaaagtatctaaattgttgaaatggtcatttgccaagtgctttttccattgtaatgaagacatttataaaggtaaaatataaattgctttttgttatggcacaggtgggaacaagagcccagtcagagcgaattcggacatataatttcacccaggatagagtcagtgac

SEQ ID NO: 72964 - DNA, 1269 bp, Homo sapiens
aacgttggtatcttggtagaactgataaaagggacagaatcaaacatttatcttgcttttcctatgtaattgtatcaccatgtaatcaaatggtagacaaggggaagtgtctctttattagtgtattttaactaataagtgagaaaggaatgatagaattagacttatcaccattttgtaaccccagtgatgcattcagtgtcaaagcctgtcaagactgtaaaaagagagacatccagacaccgtatacctcctgtcgtcttgccaaagggctcgagctggtgtctgatccagtgtctgcatccagctgcctaattgctgccgatacagagggcagcagaacagggtgacttgcaccaagaatatgcagtctgcaaaaacagactgttggaaattctacaggtcagcagcccaagttcttcaccagatcatttgtaggaaatgaaagcaatggatgatgagcatgtggactaatagactaaaaagatacatcaaacatttttaaatgggcaggactaaactgtagcgcctagggctacacgtttaggtaatgaagttatgataaagaaaggaataaaagtcaggataatgattactcatagggaagagagaggattatgtctggaaatggcatttgggagggcttatgaagtgactagcaccgttctttttcttgacctgagtggtggactctaaaccacatatttgatttgtgtgtttttctgtctttcatatattattgtatcataaaaaagatttttaaaaaaacattagataagaacaagtggccgggcatggtggctcacgcttgtaatcccagcactttgggaccccaacgcaggcagatcatgaggtcaggagttcgaggccatcctggccaacatagtgaaaccccgcctctactaaaaatacaaaaaattagccggacgtggtggtgggtgcctgtaatcctagccactcaagagaacgaggcaggagaatcacttgaacccaggaggcagaggttgtagcgagccgagattgcaccactgcacaccagccccagtgacagtgcaagactctgtctcaacaacaacaaaaaaagaacaagctagcctaggtgttaagattctttgtgatactcttcccactccatagataagcaagagctgactttcaataaattcttgaaaatttgggaggatctgtagagttattcaacagtatgaaattattctcctattgagcattcttttatatatgataccctattagcctaagactacacag

SEQ ID NO: 72965 - DNA, 1131 bp, Homo sapiens
atgaaacaagatttcttgatgttccttccaggtttattatgcatgtatctttagagatgatttttttttaaagactgtgtttattgtatttcagatgctgagatgaatcgtcacctgtgtgtttggctttttagacatccatctcttaatggttacctccagtgtcacatccagctccattctcatcaatttagacagatacatcttgatacaaggctgcaagtttttagacaaaacaggaattgcattcttcatctgttaagtaagaattggtccaggagatattgccatcaagacaccaagatgctctggaagcataaagcactacagaaatatatggagaacctgagtaaggagtaccaaacacttgagcaatgtctgcagcatatccctgtgaatgaggaaaaccgaaggtccttgaacagaaggcatgctgagttggcacctcttgcagccatttaccaagaaattcaggagactgaacaagcaattgaagaattagaatcaatgtgtaaaagtaggtaaaagatacttatgtgtcctgcataagggctatgaaaaaaaaaaccacacacttatatgcgtgtgtgtaagtacagatttgattttctaagttaaagctttattgaacttagtctttgttttttttttcccacagaagcaggttctcacttgttgcccaggcaggagtgcagtgactcaatcgtagctcactgtaacctgtaagtcctggccccccacttcagcatcctgagtagctaggactattgtgccagggctttccaaagcgatatgattatagccaccgagccactgaggctggcctgaactcagtcttttaaaaaaacctacaagtaataagctcaacacttggaaagaacaggactctgtacccagagtatttgacacactttagctactaaagatcaatgtactaagtaaacaggctcctcgtggtacttcccgtggtctcaaggtctgggagacaaaatgttggtcttttcagaagctttattttattgagcagacctttattgaacactgtacctacatactagggctacacatacagttcctaccccatcagtgggcttctatggtccagtgagagaaacttatttaagtattgtt

SEQ ID NO: 72966 - DNA, 1018 bp, Homo sapiens
aattatcttattgcttataaatctctttgtgaattatgcaggatattattttagaaagataaactatacccagatcctatttgcttgcttattgttgtttcagagtaacatgtagtttatgtatagatacatcctttatgtggtactataaaattaggtgtctcttgggtgggaagatacaactttctgttagaagtgtaatttatatcttttggaaggataatggagtttcattgaagattttaagtgttaaagttaacatggaagtttagtttatcttcttatattttaaacatttgcaatcgtaatcctaaaactgttgctcctttgaggcttttatggggatatatgtaggtttctttgattcagcgtgtttacgtaggttatgttattagacctacgttataaaaagattttcttttccatgagttgtatgctaaaggaatatagagaagtgcagcatatcttgagtctgtgatggcttgtatatgtgatttgggttgtatttagaatcttgcaatgagagaagttttggatttttctggagatgagtttaaaacagtgacttaactgattatagtattttgccaccacagagttttaaatgtcatttttaccaaaattgaaagcagctttaatattgttaatgcagttttatttataacaaaattttagaagtttgttagcattttaccatagataaaagttttgatgctatgaatctcacccatatttactgataataggcactttagaagagaggcttcaaatttatgaagaaattagtaagcagcaccccaaagcaattacacccagaagattacctttgactcttgtcccaggtaatattaagatgtcttttataatattaattatttgtcagaattactcaatgttatttatattttagaaacgtgtttctggtatagagtttatgtttacagcagtcttggagttgggagtgaacagttatgagtttatatgttaagagtgtgatacttcaatgtgtagttaaatg

SEQ ID NO: 72967 - DNA, 1035 bp, Homo sapiens
ttttgtttctaggtgaaagatttagagaactaatggataagttcctgagggttaacttcagtaaaggctgcccacccttgtttactactttgaaatctttatattacaatacagaaaaggtaaaatttggtatttattcagatttgctatagtcttttttactaaactgtagaaagatgtccatgtaaataatgtgctattacttaatcattttctttgtttcagtaatgttaccttactttcagtcatgtactgaaattacatgcctgtagtataagtaatatcaaagtaaagggtttatgaaagcactaagattataaaggttgtttatttttaataggtatacttttttttagtaggattttaaatttgacattgttaccaaaggtatatatttattttgtgattattattttatggtacagttatggatttttaaattagttatgcatgcttttaaagttagagcttggataattgagttagtgcaacagtaaaatgcaatttggtcaaattactggtacaaattactaggtttaatcagtaggctacattttaataaatacaggtttagctagttcttgaataaagaattgtctttctgctttttaaaattagaaaataggccaggtgtggtggctcatgcctgtaatcctagcactttgggaggctgaggtaggcagatcgcgaggtcaggaaattgagactatcctggcgaacacggtgaaaccccatctctagtaagaatacaaaaaattagccgggcgtggtggtgggcgcctgtagtcccagctacccggaagcttgaggcaggagaatggtgtgaacctgggaggcagagcttgaagtgagccgagatcgcgccactgcactccagcctgagtgacagagcgagactccgtctcaaaaaaaaaaaaaaaaatttcgaaaataggcacttaaatcttggtcttaaattagaaagataattaaaagttaatagaaagcaagttatacttttatttccaagtgttgcttcttattaaagtctaaaat

SEQ ID NO: 72968 - DNA, 1158 bp, Homo sapiens
acacgcgggggtttgggggaggtttctagaggtgggattttgccatgttgtccaggctgatcttgaactcctgagctctagcaatctgcctgtctcagcctccgaaagtgctgggattacaggtgtgagctgccacaccctctatgagtttttttaaggcacattccagacttactgtttcatctgtaaatatcttagtgtgcatctctatttaaaacacgtaaacagaagaagtcatcgcagtgccatgtcacacaaaacctcataacataatatctgatacccaatcttagtgtgcatctctatttaaaacacgtaaacagaagaagtcatcgcagtgccatgtcacacaaaacctcataacataatatctgatacccagtccgcattcacatttcccccattatccaaaagaagtctttgtgtttggtttatttgagtatagatccagttaaggttcacaccaaataattggttgttatatctccataagttgatggttatgtctcattattttaatctagaacaataactctcccctccctttcaaaaaaacagtcatttgttgaaaggtcatttgtcttacatatcccatattctagatttggttgattgcctttctcatggtatcatttgctgtatttcactgtcattcatacttgtaagttatagttaggtttacttgctggattagattcaggttctgtttaaatacgggtggtgctttgtgcttcctgttgtgtcatgtcaggaagcttgagacattctggttttctctcttttttgatgttaagattgataaagattcagatgttgtcagcctgttatactcattaaaaaggtccatgacggcgtgggggcacggtggctccacacctgtgatcccaacacttttggggatgctgaggcagaaagatctcttgaagccaggatttggaggccagcctgggcaacaaagtgagaccctgtccctacaaaaaattaaaatattagccacgttcggtggttctcacctgtagtcccagctacttgtgaagctgaggcatgaggatcactggagcctaggagttccaggctacagttagttatgatcatgccactgcactccagtgttggtgatagaacaagacaaaaattcctcattggcctctcagcaat

SEQ ID NO: 72969 - DNA, 1022 bp, Homo sapiens
ttcttgcctctgctgaaatcttgcagtggtagttaggaaatctctttgccaagtttttttccttgacttttcctggtcttgctgcccttttgctttcaggctgagagttcacagaattagtttgacgtatatcttttccccagcattgtttctttggagtgagattggggttagaagcctgtcaaagtacaatcttatttctctacatggctgccactttttgaactttatgaagtcatacctctttcttttgaaattagtagtttttgctgagtctttcttgcttattattattgcaatagtcatttcattatgaattaggagagagaaaatatgtgatttgctttacattctttctataataatttaatatttgtttgattgcagagaatggggagaaggaacccccgacaacactactctgggttcagtatttcctggcacagcactttgataaacttggacagtattctttggctttggattatattaatgctgcaattgctagtactccaactctaatagaattattctatatgaaagcaaaaatttacaaggtaaaatctgaatcctgttttttgagtagttgaagaattcagctactttaagaatccttggagttttttctttgtggaaacaagttctagggcaccctgataatctttttctaataatcctgtgtagtttcatgttatattaattgtataatcaatgtgtaattagatgtgtaatcatttgagctcttagtaaatgtgaactgtaattttgatttctaaataaatttgacagaaatggtgacagatttcttttttgtctgtgtaaattattttccattttattgtactcatattctcttgattataaattgtggttcctttaattatcttttatagcatataggtaatctcaaagaagctgcaaagtggatggatgaagcacagtctttggacacagctgatagattcatcaattccaaatgtgcaaaatacatgcttcgagcaaatatgataaaagaagcagag

SEQ ID NO: 72970 - DNA, 2336 bp, Homo sapiens
cctaagtgacagttaggtagcagacagtgtggatgtactagacaaagggatgattcacgttccgggtgggatagagtgggatggtgcaagattttatcacagtattcagaatggcatgcagttgaaaacgtatgaattgtttatttctgcaattttccctttaatatctttagaccatggtcgactgtgggtaactgaaaccatggaaggtgaaaccttggataaggagagactattgtagtataaaaccatgtttggaaacatactgatatatttgctaattgctgctattgtcataatagtactgtagccctagttgtaaagaggaaatgatttttaggatctctttcattgtttgctctctatagttttgaatgcttccatttcaggaaggaacatctgccatggaaaatctaaatgaaatgcagtgtatgtggtttcagacagaatgcatttcagcttatcagcgtctggggagatacggggatgccttgaaaaaatgtcatgaagtagaaagggtaagttgttagaatttcgacttcagttttcactgtaaggtgataaaaagcaggtagatttctacacaggatcatctgcctcttctaacttctctgggagcttcattgtgaaaaaaattcttgatctttaacctttacattcagaagttgtaaacaatggattgctttactgatcctcaagtgattatgcttttgacatgtctatatatttttgtctgaaggaaaaagattgttagtaaacaattattgctattaacataaattcaaaatttatgttccctaattaggccattattttgatattcatcaccaccctaagaggacacacagctgatggcaacctctttcccctttaaaacatcaggatctggtccgcagtcagcctctctccagtttgtcttcccaggatatttgctctcacattcagtattctgtataacaatctatggccagtttgcaggcttattttattgcttgcttttaggattatttgtgtgatgtgccttagtgaggggacttttcttttcctttgtgtgaatttttgttttcctgttctttgtcatctctgaagcactctccttccacatggaccacaggaggaaaagagccgcaaatgcacccctgaggcagtcctcagcagccctcagttgtgggggcaatcggcaccactgttcccatcctgacgcagtatagaaccacaggcatcgtagtcaggtgagcctgatgtctgcaccgtggcagtcactttggcctttttcccacgtgaaatttctgagattacccacaaggaaggctaaattttagggggtggcttttgatggggactggaactagaattatacccaagcatttttagaaataacctaatttttgctctgtttttgttttttgtttgtttgtttttcatgcccttttaagcctgggcttgatggctgtatctctggggaaaatcctcctcatcttctccttgaaaaatataaagcccttgggatgataggtgaaatacccaagcattctagtttaaatcaggctcttgtttccttcataaaaccacagatcactagcttgttacactccctagaggaccattattttaagagcattctgcttgttattaaggaaagatacatttttattaactaggacattctcagtgagaggtaaattgtttcccttatgaagaggctgctaggcacttacgaattagtaatttcagcaagaccataactagaaacttaccaaattttctgtttaaatgaaatttgaatatcctaaggatcattatagttctgaacttcttgaacttaaattccatttcttctaacattgatgactatattgctttgttttttaaaattttgagaatttttagaatatgataagtggatcttccattactgagtttcatttagattatactttcccttaaatttttagtgattttggctgagttgcatggaaaaaaattctgtaatgtcagaaaatctactgacatagttcaagaaattaattggtaaaaagcatttttgaagaaagaaactacaggaaaatcattggttgtcacagattaaaatggcagaaatcatcaccctctggtcatgttacataattattatcgctagaaactttagggtttactattaacatttgagattagaaagaagtagaaacataaacaagaaaagaacctactcttataccagttgtaagctagtcttcagtgaatatatctatactaaaagcaaataagacaactcttttatagttattatgtatattctacatgtgtggttatatgtagaaatgtgtttcgtataa

SEQ ID NO: 72971 - DNA, 1658 bp, Homo sapiens
tttagggtttatattttaaggttttgtagtccaacccaatctgatgtttgaaacttgacttttattaaaacaaacagaacaaccttcttcaaaatattagatttaaacttgtgttcagaataacattttaatctattttatctttcaagaattgagttttctttctttccatttttttcttttactattagactgctggtgattggattatcattattttagaatactgacttagatatgaaacagggcaacgatacatatatttctaactctttgataagacctaggacttctgatagatacaaactataggaagatcataactttatcttctattgtatcttaatctttatcaaattgataacatgctttataacaacagattctctattaagtaaattgagttgctaattttcctagttgacctagttattattttttaaatccagaggtttttgttgcctttctctgtataagctcttactagtcacatccgggaactctgagaggtagtgggaaggagaatctggtctagaagagagggcctaataaggagttccttaaaaaaataaaaacactacactctaaagctgtgaacggcttttcttaattcttgcttagggggagagagttaagggcatgagctgtatgttaagatttgaatacgtacttttctgcagtgagctaagtgatttttgtcatgctcttcatgtttggccaaaaggtacagggaaactaactttatctgttggtgttgtgtagcatatttttgtgttttacaaatttagagactaaaaaatcaacccaagggggagcttcttggtgatggagtagttctgtgtttcttagggtagtggttacatgaatctacaaatgataaatcacatagaactatatacacattgtaccaatgtcagtttcttggttttgatactgtattgtagttatgtaggctgtaaccttcgggggaaactgagggaagggtatacaggacctttgctacttcctctgtatctataacccaaaacaaaaagttaaaaaaaaattcaacccgagattatttagttgtttctatatagtattctgcaatacactgttttttccaaaagcaaatattacaatcagctgtagctgcagtatcccacttgtttttaatttagccatattctgtctatcaccattagtttattatggagtgattaacaagccaggtttgcttgaggctgagtgggttcgcaagacacagtgctttcagtggaaaaactgagagagcctctggcaaactaggataagttggtcacccaatttatggaagacattaactggagagaggcagcctatgggctgttactgataaagaggtggcttaaatatttgtggttacatatggccccctccaagacttgacttaaaatctctgtctattaatgctgctaggaatatctcttgaagtttgtcatctgccttttttcagatgtttctcaacctaaaagaatgtcctgtaatctcttagatgttttcatctgattatgtgttccaggacttttagcgccaccatttttccttagttaactgtattgaatttttaaaatattcttgtgctagttataacttgatttacattaagagaaaccactaacaactttatgaaatatgta

SEQ ID NO: 72972 - DNA, 1528 bp, Homo sapiens
aacagtataagtataagattgttttgttgggggaggggcagagggttagtgttcacctttcatggaagggattagttcttaacctcttttggccatggatccattgaaaattggatgaaagctttgagctctctccttaggaagaagtttttatgcttgtttatacatagactccagtttcagaacttctgctaaaatggaatgtaggtagagtaagagaaaacaataaagttctgtatttatataacagtttactgttgaaaatgaactttaaaatacattatttgatcctttaacaaccttaagaaattggctgtatggatttctttattcttaacttagattaaataattgtctaggaaattaaaaggcttattcagggtcgcatccctaataagaagcttatctcttgagtgggcaaatactgtgcttactgaatgtctgctatgtattaggccctgtggcaggcggtgggtaaggattgcccttgaaaatggtagagttgagtagagcagtcagatttgtaaatatttagtgtgaacctacacatatttagtcttcattcagagctctgtttaactgtgccatgctggtttttagggaatatggaggaagagtatttcattaaaactaaaatattaatatatactaactttcaggtttaaaaaataacctgatcttttgacttatatagaagttgagtatcatcacaaaacatgatttgtagggaatgggcatggtttgtaggaagagaaagttcaagttgaatgccaaaaataattcatatcctttatagtgtaaaacattggagagggcagctaagtgaaaattgtgactgtttaaattgttttttgggctttttacaattttttttttctaaaggtagacattattgacataaatgtaaaggttaattttgtgatttttgtttttaagcatttttttgagataactgatgaccaattcgacttccatacatactgcatgagaaagatgacccttcgtgcctatgttgaccttttgagattagaagatatactcagaagacatgccttttatttcaaggctgctagatcagcgattgaaatatacttgaaattgtatgataatcccttaaccaatgaaagcaaacaacaagaaataaactcaggtaactgaataggaacttaaaagattttaaaaggacactaaatttcagaatgccattagcgtaaacaatacctagaaaaatattaatatattgtctgttggagttgaagacaaacattagataactcatatgccaaaaaacaaaaatgttgcagagagagttaaaaaaagtgggatgatattctgtagctgatggttctaaattactttaatggaacaacttagaattttttttatttttgtcttcagaaagaccaatttaagaactgggtatggtggttcacgcctgtaatcacagcattttgggaggccaaggcaggcagatcatttgaggccaggagttcaagaccagtctgggcaacatagcatgacccctgtc

SEQ ID NO: 72973 - DNA, 1050 bp, Homo sapiens
gctggccctccatttttgtgggttccacatgggtggaacaaatcataaatatgtttttttaaattgcatctgtactgaacatgtccagactttttttcttgtcattattagtatttcctgaacaatgcagtgtaacaactatttacatagcatttacattattttaggcatacctatagaccataatataatttatgaaaaagtgaagtcattatatgcaacttaaagcaaaaggaaggtgaaagatttaaagctgatctaattaaaagtatacaggaggatgtacataggttgtatggaaatactgtgtcattttatatcacaggcttgagtatcagtggactttgtgggggtgggggtcatgaaccaatcccccactgataccaagggacaaccatactaacagtatgtattacagaagaatatgaagaaaatgcaaacattggctcagaattttgttcatttggatatttatagaaaacttgtcagccaaagaattgaagaaaatgcttagcaagcagagaagagctcagaaaaaggctaaactagaagaagaaagaaagcatgcagaaagagaacgtcaacagaaaaatcaaaagaaaaaaagagatgaagaagaagaagaagccagtggccttaaggaagaacttatacctgaaaaattagaaagggtgagatgggttttactatctttgttatttggtaaaatttatgctatttggttccgttctgacagttaacatgatttatttaaatctgtaagaagccatttgaaatatttcaaggtttttataatagccgtcaattatctttgagtgacagtatacaaattttggctaatgcaagttatacatagaattgcaattgtggtaggcagagtaatggccctgcaaaggtgtctgtgttctggtccccccagcctgtgaatatgtaaccttacatggcaagggagaattaaggtgggagatggaatttatggttgtaatgaattgacctcaagatagattagcctggattgtccatgtggtcctaatatcgtcaaaaggggcc

SEQ ID NO: 72974 - DNA, 2798 bp, Homo sapiens
gttgtgttttttgtttttttttttgagacagtcttgctctgttgtctaggctggagtgcagtagcacgatcttggctcactgcaacctccacctcccgggttcaagtgattctcctgactcagcctcttgagtagctgggactacagttgtgtaccaccatgcccggctaatttttgtatttttagtagagacggggtttcaccatgttggccaggctggtctcaaactcctgacctcaagtgatctgcctgcctcagcctcccaaagtgctgggattacaggcgtgagccaccgcgcccagccataaagggttttcagtaggttttttttttttcaaaggacagatcaaaaacaaaaaatccaaatgtttttgtttttatagtgtctaatcatagtaatcttccagacattgtgagcaaagttctatctcaagaaatgcagaaaatatttgtcaaaaaggatttggaaagttttaatgaggattttctgaaacgtaacgctacctctcttcagcatctactttcaggtttgtttgtagcccccagggttaaaatacttatggaaaaagcgaacaaagagaaagctttgacacccccaaaatgtaaagcaaatgaacagtactgtgtgtaagtatggggagagaaatgtggacaaatttaagttatgttcaataataggggaaacagggatggattcacaggatgtaataccagatttaaagtgatgtttattcaaagggtttgtgataacgggcaaatacttttataataaatgtgcgggattgaacatacaatataatctcaactatgcatgggaaaaaggctgaaaggaagtgtctacgaaagctttaatgttgatttggggtgtgtggttataaattatttttcttttttttttttttctttgaaatggagcctcactctgtcgcccaggctggagtatgttttttcttctaatttataggagaaatataaactgtgtttcattttttaaaattttactttctttttgaatatgcaaacattttcctgttttccccgcccctactctcctcctctgtgacagtaatttattccttagatgttttattttagaatatcttttttcatagttttggctgaaatactgattgatgccacagggcagtccatatttacattctcaattttatttctaaggggaggaagttgttgagtcactgtccatctgataaatgtttaataaccatcattttgtgaaggaagaagctctgatttgtagtgtattttcatgatataaatactctgatcatggcctatcaatgggatgctactgaataggaggtagggaagaaatgtcacacttggctctcttgagctggtaggagccagctccagcttaccactgattaaacacttaaaaccatatttgaagtcactggccagttgatatcacataaaatgtaaagtataggtgtttattcattttgaaatgccttggtatttcaggtgctaaaatgatgtattttctggacaagtcaaggcaggagaaagcaattgctatagccactagactagatgaaactataaaagataaagatgtaaaggtaagttttttttctttggctgatttatgcttacacagtgatctaacaaaacgtgtctttacagcataattcttgagtaggccttcagaattatgcctggatgttaatcccagctctatcaattatgagatgcgtaactttaggcaggttatgtctcttagcttctttttcctcatttttaagatgagggtgaaaatactagtgctgtcacagaatccatgtgagagttaactgaaataataaaacgtgaagtccttagtgcctggcacgttgttaagtactcagtaaatgtgggctatttttgttagtaaaggacactttgatttttagtgatcacagttttaaaatgttctcttttgcagttattagaattttactgcctttttcggggttgaatttttaatgtgccttttttgaggtgattgcttactgtgtagattgtaaggcattattttagactgaggcagctttctcaatttaacacattgcatcttttgattaaagtggttattaactgcgagcttattatttttaaataatttgtgttttccttttgtttcactagacattaataaaggtttctgaagcactgcttgatggcagctttgggaactgtagttcccaatatgaagaatataggatggcctgtcataacctgcttccttttacatctgccttcttgcctgctgtgaatgaagtcgacaatcctaatgtggcactgaaccatacagctaattatgatgtcttggcaaatgaaatttgaaatcttctagaaagtagactcctatagactcaaagctgaattgagatcagggtttcttttccagggtgcattttaatatacgtatgaaatgaaatatttggttaggatttttaaatggcatattctgtaagcttattttgttctttacccgacctgccaatttacataaccatctgttaaaattacctgtttattcttacacagttttgtggtagctccgatcgcttctgtataattataatttcttactaagctaagttgtatacaaccccactgtattattttctttagattctgatttcaggatctgtgctttgattccttgtctgttttatcgtatatttgcttgctttttaattaaagcacatcagttttaaagtgttaactatatgttaacaatatggaggctgggcgtggtggctcacacctgtaatcccagcactttggga

SEQ ID NO: 72975 - DNA, 1034 bp, Homo sapiens
aaatacacctccttttcaaaggctcttaatggcttaattttttttcaaagtactcaataataccaaagttaggtaactatttctccactaagcactcaaatagtgggaccagaaaagagatttatttcattattcagaagttgcacttggaaaaaaaaaaagaaacttaaacgtattgtttctgtgaaggcatataaaccatatcctagggcagtggttttctaacagtgtaacaagaacctttgaaggatgtttggcagtggaggggggcagtgagtaggcagcactttgtgccccattgccctccatccccaattcaactacaacaatttcacatgtatagataatgcaggatgtttcataagctgggcttttgtgcagtatttcatttgaaggaagggttccactgctaacaaatttttaaaggaaaggaagaattagaaagccattgtgttagggattatgtaatgtactggattattatttctcacaggctctgagggctttctttctggaaaaggtgccattgaccctctgatttagatgactcactctcggccgggcgcggtggctcacgcctgtaatcccagcactttgggaggccgaggcgggcggatcacgaggtcaggagatcgagaccatcctgggtaacacggtgaaaccccgtctctactaaaaaaatacaaaaaattagccgggcgaggtggcgggcgcctgtagtcccagctactccggaggctgaggcaggagaatggcgtgaactccagggggcggagcctgcagtgagccgagattgcgccactgcactccagcctggacgacagcgagactccgtctcaaaaaaaaataaaataaaataaaataaaataaaataaaatagatgactcactctcccttgacagaagaaaacaaggcattaggtgttcctaaaactaagagaagcaggctttctcattacaattcttaaacataccattaagtttatatagaatttggggggtaggaatggccttggaaattattttcaccaacct

SEQ ID NO: 72976 - DNA, 1006 bp, Homo sapiens
gaaaccagtatgtataattttctacatttgatagatgaggaaacatacattgtgtcaattctcataatcctgtgaaatattggttccatttttgccatcttttgcccccgctttataaatgagagaccagaagattagaaagatggtgtaacctgtcctgggctgtatggctagcgaggcaggtgcggcccaaagctcagttcattattgtttgttagggtctcttttctctttttccaactcaacaattccataaaaagcatatgcttacatatactcataaaacattttgcatcattatccaaatgccaacacagcatttttcaagtgttttccttattgaatctatttttaatccataggggagttattctcaggtgggccttctagtcctccatttaggaagatagggctagtttaaaacctagctactcaccaagcatggacacggccttgtgtagaatatggaactttagattgaaaacaaagcaaggaacctttgatttggtcccattttgccatcttctgccagtcctgtgtggctccagttgactaatatcttccagctgttttgaggttgctatgtaatccaagtaaccatgggtgtttccttggtgaacggcacaaagtttggccaggaactagcaaatcatcacttgagatgactttccaaagcacagcctcaggcccactcattgattccaggtgggatttgaggagcaggaaatgctgttgccacccatgttaatgtctgctttaacatgtgcctatgttgcagtacatgtctttcctctcgattaagatagctatcaccggtgactttccttggcttctttgagttattgaaccttttcccttttgtgaatcgattgcatgaatcttctcatcagtccataaatacttcaattatacttggttcagaatctcaatctcttattgcaccatgcatgctctaacaaaagaaaacatccattcttacaaaaaaccacttgattttaatcatatc

SEQ ID NO: 72977 - DNA, 1059 bp, Homo sapiens
ttagaatgaaagttctctgcatttcttatgaattataaagtacccatttagaaaaagaactaaacaattggaaatgtgtcattctcccctccgcaattaatgagttctgttgttgccacccttaaaacctgccaagtaattgttcagtctaattttttgcccaagtggacaggtagataagagtgttctggcacacacatagttcacagggaggcagaaaggtaacagtgcctggccacaagtatgtacgcccttctcctgttgccataataggagtaaggagtgtggttctcttcaggacaattgccctacaggggaagaagtaaggggcatctgtgcccttaacgcaaatgaatttagcggatgtaagagaggaaagagaggacatggggaagggatgaggaaaatgtacacctctagtaaatgctgcagagaagagtctcagttgaagtaaaagagaataccgtaaggtggttgaaagacagaggagttggccaagcgtgtgagaaaggagagaaagaaatagaaacacatggagatcctgagaaagatggggcacagcaaaacaccaagagaaagatgttgctttctactttcatgtagaaatgggactttcatcccatttggtgaatatttcatttaatgctgctgaaaatttttcaaccttttactaggaacttttcaaacataaaagttgagaggaacatataatgaatgcgatggacccgaccccccaacttcaagaggaaaactctggctctactcctagtcttctctgctggcttgttttgaagctaatccaagacttctatcatttcattgtcaatatttccaagtgtatctgcataatataaaaacaaaaaaatacaaactcacaatactattattaagtctttaaaaagtaataattcctcgctatcatcaaataataggttttaaaacggttttgccacttaggcatatgcagaatgaggtcggttcccaccattgatgcttttatggcatcctgtaccttttctccacaactcttatcactctttcccgttatgtgatttgtgt

SEQ ID NO: 72978 - DNA, 1037 bp, Homo sapiens
cagcacctaggaagctttcagctcaaattcatgatccacccatactcaggataccctcctgtaggaaaggagttagatcccagaaacaccttttcctcctatagctcattgtcactgtccagttactgtacccctctgcctattggctggccatgagtaagaaatgggagtcacacacatcccagaaggaattttccaccacccatttctaaataaaagtgaaatatgttccaatcaaaagattaaagtagtgtaattaataggcagttctcatggtatttcccaaaaggaaatgacctacctggactttcataaggaaagcagttcatattgagttcttggttttagttttgttagaccagttaaagctcagtggtaaggtggaggtgggggtggtgatggtgaaagaaaaatgtaacataatttacccaaagtctaaaagccttcaaattttccactttataaaactagaaattgcctaattctgtgtaactaggctttgtttaataataatagtaaaagcagtccattatatggcttttattatgtgccagatactgctctaagcattttagcttcatgacaatcccatgaagtaaataatattagtatccccactttataaagaggagcctgagacacagagaagttaagtagttccccaaagataaatggctggtgggttggagccaggattcaaacccaggcagtctggtttaactatatcataatatactctacaatagcagtgtattatactatactgcccctccaatattggattcccttctaagttctcaagttatacgtgaatgaacaaaagaaacaggttactagtattctaatctacccctaaataggggtaacaatcttatagcccaaaggccaaatctagccaacagatgtgtttttttctctggtccatgtagtgttttaaaataatttcaattttcatgtatttagacaaggtaaatcctaagttagccaatgtccccaccactttttatcatatgacctacctggccttacaggcattt

SEQ ID NO: 72979 - DNA, 1056 bp, Homo sapiens
cctattcaacatcacatgtatacctatgtaacaaacctgcacgttgtgcacatgtaccctaaaacttaaagtataatcataataaaataaaaaaatttaaaaaagaaaaggagcaataagaaaagaaaaataaataaaagatatccagattaggaaggaagaaataaaactgtccctatttgcaaacaacataattgcctacctagaaaatcccacagaatctattaaaaaaaaaaaagacaaaacaaacaagcaaaagaaactactcttagaactaataaatgagtttatcgaagccaaaaatcaattatatttctatatactaacaattgataactaacaattaaaatttaaaaatacatctaccatttacaaacaactttctctaaaaatgaaattttttatttaggtataaatcaataagacttgtgcaggatgtgtatgctgaatactgtaaaacattaatgaaagaaatcaaagacctaaataaatggagagatatactgagttcatggattagaaaactcaacctaataatgatgtcagttctctccaaattggcctacagatttaacacaattccaattcaatctctgcaggattttgtttatagctataaacaagccaactctaaaatttatatgggaagataaatgaactaaatgaaccaaaataatttttaaaagaagaataaagttggagaaatcatgctacctaattttaagatttactataaaactacaataatcaagacagtgcaatgttcgcaaaaaaattaaatcaatgaaacagaatagactgtccaaaattagacccacagacatattgccaacagttttcaacaaagatgccacaacagtttaatggagaaaggatagtcaacaaatggtgctttgacaattggacatccatatgcaaaacaagcacatgtttaaaaccttgttgatttttcaatatgcaaataaaattacacaatagttacaagcccaggaataataataggatacaatagtaataatagtatacaatgccatgtatacaataataatagtatcc

SEQ ID NO: 72980 - DNA, 1907 bp, Homo sapiens
atgaataataattctcttagatccttaaaagcttgtaggaacattttgaaaacctcaaactcaaatctttttgaaggggtataaatatattaatttaattaagctaaaacaaatgtgtgactctaaaataaacatgtgattaagtaagtgccatggactgattacagcaacagactgaatgttggttactactcataacaatatttagaaagccaattaattatggtctgtttcatttattattctaaacattagtttcttctctttttgaattaagctcttgttctcattacagtcattggtgcctaatagtaaatactattgtgtttgaatttctatattttatatgtggtagagatcaaaggtcatgttttccatctggtcaagattaaatttatttttcacgatagaactttacaaaggacttttactaatcatttaataattgtgcttgactgctacaaaaatgaatttgtatttgttttttaatcatgtaggccttctcttccagttacttctctggctatatatacatctttgtactcctagcttgtagcacaatgattggtgcaataagcaattaatatgtttgtttgtgctcacactcctatatactaaaatgtactggtaattgaaactatttgataacaaatggaatttttcttttaaactgtcacaaattatttgtttagatgtaactgaataaatatttattgaatgaggatatatagttattaagttagaaatgaacagaattatggatctaacatctcaagaataatcaaaatattcagctacattacacagtgaaatatctgaactttccctaaaccaaacattttccaggacatgtgtaactttatgtctccagtttaaagttcagctataagctgggcatggtggcacatgcctgtaatcccagctacttgggaggctgaggcacaagaattgcttgaacctgggaggtggaggttgcaggagctgagatcgagccactgccccccagcctgggcaacaaaacaagaccctgtctctaaaaaaaaataaaataaagctcagctattacagaaatgagacatatttagtaataaagttgtataattcagaattgaatgatagtttcatttggaaaattagaatagatgttatctgacattctcctttgatccctaagttcccttgatccattttggttgatattaaaaatgcatacttatatacatactcaaacatgagtctgtattcttatgttcaaacagacaagactaattgtcttaataatctatcattgttttaattttttgtcatatctctcttcttccctgcttggtaaataatgagacagcttatttaattgttcttatttagaccagctcatcttattaattacaagtggtttatacaaccaaacctaaatagaagtcattccaggggcaacagtaataacaagcaaatgtttgtcttttacagttccctttctgtttgatctttcaagctattcttcatttatatactctttattcagcacagatctgctcctaacttcagagcttggaaaatgcctttcatagaagtattgaaaaaagagaataggttctccataccctgcttacttaacacttgctggctgcaagcagcttccccatcactgacagagtaacctgatctccatctagtggccagatggacttactttttacatcatggaaattaacaggcctgctggcaatgaaaggcttatacactcttgtcttgtatggttcctgttgagcaagataggcgcctttaggtcagcagtgagggctgggcaaataacctgccatgccatccaccacaaaagatccccatgcctcctgattcctctgcatcatagcaaaggaactgtccatattgagataaacagtata

SEQ ID NO: 72981 - DNA, 1069 bp, Homo sapiens
aagaagttgttcaaaaattccttgctaaaataaaatcttaagtaaggaaagggaaactttgccatgcctaaaaataaagaccctccccttcccccactccccatgagattatttattacatctgtacaaagtttagaatttcagatttagggacattgaggtcatccagaggttacttttctcccagttaaatacaaacataataaaattgctcactcgcgtctcctccctgccccccttaaaggagtgccaaagccacagttacatgtactcatgtgtgacgcaaaattctatttttaaacccagacagaatctatcattagtcatttacagaaggaaaccattaacatctaaaaggatggagcaacagaactccttcatgttgccaattgcttataaactaattctaaatacagcagtggctggaaatacatgttttctgtcacttagaaagatacagtttttcagttcacttatgccatgttatgaatatgtaagtattagaccctaaaaaggtaggaaaatggaagacgatactaacttctttttctgcttgatcatatttgtttaatcaactgcttattcttatgcttactcatttttgggcatgaaacatttttaggacttcctttgcttacaaaggctaatattatcccaaattgcttaagtgctaagaattcattttaacgttgtacatatttattatacaagaaatattttttccatcaaaaagtactcattcaaaaaatatttaatctagaatagagattataaatttttaacttaattttatttttttcttaaggaaaactctaagatatcattaccattttcaaaactgtcaagtagtggtgaatgacacttcttatatgttaatttttaaaagaatatttctaacacacattcttaatggagaattatatcttatacagaatgatacattctaagggtgatgtttatgaaagaaatttaagcttggttaacatgcttagtaaaattttttaatacaaataaaattcagagtatatggtgtgaagtgagttatatggtgcaaatactattttaattc

SEQ ID NO: 72982 - DNA, 1889 bp, Homo sapiens
aagagtttctaggagttttgtatgtataaatttatgtggaaacccagaagtgtaaggaattcatttttcccagaaaggaatataggggagtggggagtaatgcaagggggagtgacatttgaattggcacttgggaataagaaggatttcaccaaggaggccagagcagaaaggaattctaggcagaggtaatggcctcctggaagcatgaaaatgcatagcatattcaggaatagcaactaatagtttgaggtggctgagactgaaaggaagggataagcacaaagccagaattattagtcagggctattccatgaaaggctccagtgaactttgttggacaactcaacttaatttttgccagaaattagatttaaaacatcaggaatgagtgaggcctgctaaaattggagttgttatttttcttctcaaagatggtagtaattgttgaatttttgagagttgttggaacagccctgaagggttccattattcccatgaaaattagtagttcttgtggtaaggaaatgttttcggaattgttgataataggtatgtcaacaacttccaattgcataatgcccctagaaagatccaaatcttttgcatgtgttttctttcatattccaaaaatagtattggcaaatgttcagagaaggcagaaatttgccagaacatactctttaaaacccagctcacctctttatggaagcaatcttagacaaatctgttgcatgtcattcagactatatagtacttggctttggtgtccatatgcatcatgttatgaattgtatgtgtgttttttaaaaaaagaaaaccttttttgttctttctgtaacttgctcaaatactataatttgacctgagtcataattatgatactcacctttcttttagtccaaacttttacttccagatccttattatcatttccacaagggattaagaaatgacaaacataggaactgaaatatttcactgttttaaaaaaacataaattcatgaatgacattgcagataaaaagtagtgctatttatgggccttaagttccttctccttccccatgaaatcaaatccacacatctttccagctaggactttaacaaagttaaacaatacaagtgacaaagtcttaaagccatggaaaatgccattattgttttaatcaaatcagatattaaaacttaagtctggtcagagttggatgacatagttcactaagggaatagagggccttttgctagctggttatttagagtttcccctaaattaatgttgattatgtttcaaattccaaagcttgctcatttaccgaaatataatacaatgcttcccctttcccctgactactaacttaccaagggagagaaagttagtaatggtcaaattttcccacagcttattcagaggtcttagtagtggaaaataaatgagggtcttgggtttacctcagtttggccagcctagagcctacagtaaaagtccggaaacaataataccccatgttaccaagggacaggatggagtcagtttgattgtgtaactccaggacaccctgtgttatgtgtctttcagtttagttattactgccaaatagcatcatgttatgtggttctgaaatagattctgtatagggtacctggaggtccttcccataccctgccaaccaaacagccagtgctatttttatatagagccagacaacatataatttccatgacttacttagaatgagttggcaagttcaaaccagattttatgaacatgcctggcattgtcagtaaaatctgaaagttgagcaaagttactttttctcaaatggatgaaggttttttatttttttaaagcatttatatgattgtttggtacggtttatgaaagaata

SEQ ID NO: 72983 - DNA, 1060 bp, Homo sapiens
tatgctttatatgggggttgaatttaattctgtgacatttgtcctatagagaaacaactgtatgtcatctatgaatcaagaaaagatgatcatccccacactcaagatggggatttggcctatagagaaacaagacaattgatgctatatgtgtgtgttgcatgtactaatgtcattttgtcagtattgtagggagagataggaggatttatgttaaaattgaaactcttgaattttaaatgttgttattggaaatatctttgtaacatatatattttaagagaattaggtccaaacatccaaccaaaggcatagattatctgctatacttcagtatagacaactataaatataaactttaaagcaaagtttgcctgttttttcctcaagtgaacttttatgtctgaactttcttttatttgggaataaacatactgctagcacattagcacttccaaattaaaaagtgtgtttcagaataatttatgaaatctgctatactgggaaaacatttgttttaaagaaagaaaaaaatgctatctttttcatgagatttccattttaagaaacttatacactattttatcttaaatttatatgtcgctctaactttccagttcttaagatgagaaaattgtcatttcatagatcaacaatgaaatgtaaatacttctaaatataattataacaacaacaatgttatgattatatttcataataatggtaataatgatggtagtacaataatattgatgatggtaatagaaacatttatagataactacgtaccagacatatttccaagcactttctttacataaatgtatataattctcccaacggacctatggcatatatataatattattgcatcttgtagatgaggaatttgaggcacagagaagttatgtaacttgctggaggttagaaagcaggggtacagctgggctatatgtaatattaattccaattctaaggatgatataaacagattgatatgtagattgcagggaatttctagatcagagtagttatttagatactgaaaattatcaatagt

SEQ ID NO: 72984 - DNA, 2048 bp, Homo sapiens
gatgggctttctatgctttgatgagcaaccagtggctctttaaacaaccattccattttttcctgtgacatcgtaatggatttgttgcatactgaatgtgaatcttttctctcctttaggtgatatttttagctgccatgcagttgataaccccaaaccccactcggagctcgagatgctcagacagtatggaccaaatgtgcctgagcccatccttcagaagcttgtggctgcctttggagagctgaggagtttggctgaccaagggattattaactatccttattctaccagagaagttgtcaacatagtcaaacatttacaggtaggtatggcacacacctgtacctaagagccatcactctcttttttattttttcagactgtacagtttgtaccagagtttttaatttccataaatacaataatgagtcagattacatgatttgaaatgtgtataatctaagttataaatatggtaggccaatgaacattattatctgttcagcttttgaattaactttggcaaagtctgtaatcattaccaaggagttaggaaatttggtgggaggctgttagagggcaggtgaagcaagagagtgagtcagtggggaaaccttcctgttctgttctttggctttttacaacaagcatgtggtatgcaggtaaaaaatattttcattttgaagcaaatcacatggagacaacagtaaacagagtaggaactaaccgtactgattaaatacctgtaaataccgcaaggaagtttcacaagatagagtaggcaggagaatgaaatttcctgcgaccatgtacaatgtgtactccaccttagtaaagaaaacaaacaaataaaaaataatataaatcttacttacagaacaaataagggtctccaagctaacagtcacaacccaacaactcttgacctctgccttatccccaaccctccaagaaaaccctagaaagaaaagtagaaaggtggggcagggagaatacacacaggggaagatgttgatccaaggatacaaagttccagttagacaggagaaataagtttttgagatctattgcacagcctggtaactatagttaatatcaatgtaatgtatattttgaaattgctgagaaagtagattttaagtaatggttgtaccataaataaaggtgtgttaaatgatagatatattaattagtgtgatttaaccattctgtaaggcatacatacattggaatatcacattgtaccccataaatatatacagttattatttgtcaattaaaaatatatggaaagaaatcaagattaaaaataacagctttgttctgcctataaaaccgtaagtccaattcagccagctcagaacccatcacctaaagaaaatcaaagcagacccaggaaaggactcagaggacatgagcagtgtaaattcagttgtagtcatacttgttttcttgccctctactgctccctgtttctctgttgtttgcactttttatgttctttccttcttttcttgttgctttatcttttcttcttcatttattcatagactgacttttctgaaaacttcagtatagatatttaacacgctcctttacataactagcatttttaaactgttcgatctggtactcatattaaaggcaggagatttcagaaagcagtggcaatcactgacaccaggatctaggcactgctctaacatttgagaggaggaactctttcccctcaaattctggcatttatttaaaaaggaaaatattgttaagtcatctgagcaaacactgaaagggaaaaatgtctacattcctactacctgcttatttgacaaggccagtaaatttctgctgtagttcatttgatcattattgtcctatccatttcataaatctttataatgttgtatattttatcacatgcataataagggaatttttttttaatacagaaatttccgactgaaggtctctccagtgtagttcgaaatgtgtttgactttgattcctacaacaatgacatgagggagatattgattaacacttta

SEQ ID NO: 72985 - DNA, 1145 bp, Homo sapiens
ttaagagttttctctagctttcatctttcttttcatgatgtcaccatcaacccagtcaccttaaacctaagacttatttttcctttttcctcttcccacctaagcagttgccaagactatagattctgtccctacaaaaccttcaaatcaatctaatgccttttatttccattttttcatacctccctcaaatcagattcccaaaccactttttggccaaactattccgcatattgtcaccagattaaatgtcctgaagtgtagctccaagctccacttctgtcatgtgtgaactcataaccattaaattgcatcccattacttaatgaggcagtacctatttcttggtctgacagttaaacccttagtggtagacacccagtctacccttccagtcacttttctcacatttaacttctaattcagccagcatagactgttcatagtcactcatttctagatatgccccaggatttcttgagtttgaccattgattctctttgtcttgagtaactaccttttctccactatccatttgggtctattaaaattgtatactcttttaagagctttaacaaattcagtgttctaatatccacagtgattgtgatgtctcactcctcataactcccatggcactttctctatttgttatgcttgttttacatctctcctactcttgggtgtgagatgttgttgggtatcactaccatgggaataattttaatactaaaatgaaataaaaagataactgtagagttggcagtttagctacatgaagcttttggtagaaatcccaaaattttgtttccagctctgctatagatgtgtgtgtgtgtgtgtgtgtgtgtgtgtgtgtgtgtgtgtgtgtctacgtgtatacttgtaacttaaataaagccagctgttataagtccaaagcagtaagtaatgaagttttaataatggctgtcttcatttaattgtttatgataaattttctgtcgtcaaaggttaaagcagtaaagttgggtcatattctggtagtagatgaggctgacaaagctccaacaaatgtcacgtgtattttaaaaactctagtagaaaatggagaaatgattctagcagatggaagacgcattgttgcaagtgagtattttagaaag

SEQ ID NO: 72986 - DNA, 1022 bp, Homo sapiens
acttgaaaaatatcttttgacagcatttacttctctcagtcaatgatgttaggcttatgtcttactggtaaaaattgccatttaattctcttttcataattaaacttctgtttgaaatgttgagcagctgggcatggtggctcacgcctttaatcccagcattttgggaggctgaggtgggtggatcacctgaggtcgggagttcaagaccagcctggcctggtagagatggtgaatacaaaaatcagccaagtgtggtggtgcatgcctctaatcccacctcttctggaggctgaggcaggagaatcacttgaacctgggaagcggaggttgcagcgagccaagatcatgccattgcgctccagcataggtgacaaagcgagactctgtcaaaaaaaaaaaaaaaaaaagaaaagaaaaaatatcgagcaaacattttttcagtgctgtctttgttccatattctgtctttcctttctcatgtttggctcgtattattgcgtggaccattcctataggcatttctgttttaatgaactataaagacagagaagattttcatcagctcttatgaaactcttatgtgtcttctttcttcctttactcttatgtttaactattattgtttttcttaaaaaatctaactataaatcagttaagatacaacttattaaaatatcatccttaaagtaaacatcgctattttgagatcttctgctcctcaataaattagaagatactaacttaatgtacctttataagcaatatttcagaacagattgtgcttgctctctagaggccagttttctttccttattttgataaaaacttggtctttacacaatttaattgcttttattacatgtggaataattttaaattactattgaaatataactctaatttttaaaaagactttaaagtgccaaagttaagaatagagtttagtacaatatttctttgagcagcgcctttattgacacaggctttagttgatagatgctgtagtctgtaagatagta

SEQ ID NO: 72987 - DNA, 1023 bp, Homo sapiens
aacagaatgacagacaaggtcactgctatcatgaagctttctttctagtggtgagaagataggcaatgaacaaataatttaataaacaggaaaatattgatgctattaataaagtgaaaatgatataaatatttttaaagggtaatgtgataaggaataaatgggagactacttgaggagaactcaaacgctgatatgtttggcagcaattattaatttcataattgtagtttatttgtggtgagacattctggcatttcagcaactttgtctattctggagagttggtggatgaattgacccaatgcagatttgatctgtaagcgaagtaatagccaacctttcacattacagcaattagagggttgtaagaatttggtcaagtgacagtttggaataggactacagccaacagctaatgggaccaagccaagttaaggtctctcactaggggaatagaatcattcgtgacagcatgcttgtagcagtgagaaccagtccattgctcatcttttcttgcctgaactattgcagtagcctcctggttaagaactcagcctctgatctctcctttccatgccttacatgtttctactaataaagttgattacttgctcttctgctcagaaccctgcaatgactcccgttgccactatctgtttcacttgtcttccaccaacctttctctcccacgtatgcttaagccatatgagctgcctgtggttcccaggtatcacataccatatctattactccccaacttgttctgtgcagctcttgctgcctggaattccctgtcaagtctacctggaaaactcatactttatcttcaaaatgaaaatcaaagtgttttcctctaagaaaatatcttagatcctttcctcttcttctccacaagcagatgttgattcctttctttgtgccaccataagcataaagtggggtgcaaaagagcctttctatgtttgataaatgagattgaaaaatgcatgttgaactacagggaatgcagtcagtattgca

SEQ ID NO: 72988 - DNA, 1008 bp, Homo sapiens
cacagtgtctggcacctttagatacctaaacatttaggcaacataataagtgttagcttcttgccgtataccctactttcttatcaaacattggtttgcactgtagtagtttctatgtcttatttccatcccctcctctttgcccagtcatgcctctccaactaaatagggaactttttgagggcaagaacctggtttattcactgtatgttaattcattcgcctaatatctattcattttgtttggcagtgtctgttttaggcactggatgacgtatagatgatgatatccatcttgacctagtacagcttgcttgtcagtggtgaaaatgcatcaacatttatggtacagttattgtatataagctatgatagagcatgtgcaggtgtcgtgggagccttgaggagggacactgaactctcagaatacatgtctgtgatatggtagaaggtgatgtggagaaggtagcactcaaactgagtcttaaggggtaagtaggagttttctaagtggagcacagagaaagcagcattatggttattgaaaacaggcaggacttgaatcacagaaaacactaggaggtgatccagatcatactgttggtgctgagcaaacatattgacaatgagagtggaaagaaggaacatattgaaataggtttacagggctaattttagcctttataactatgtggagggtggggggaaaagagaagttaacagtaactcctgtgtgtgatctaccaatcatgaggcaggtacttggtgtggttcttaattcacagtggatgtccagtaagtatttgtttaaatgacttgatatgtgctaatttcatctgaaacttccaggtcaagctcccctgtggtcagtcatgcttaccgaggagcactgacgcttgttttagaattaaggttaattctatgtatataatagatctttaactgttatgtaagtgttctaaccaactgaggtcattaaaatattgcattttggatggttattgttaa

SEQ ID NO: 72989 - DNA, 1481 bp, Homo sapiens
ttacagttccatgtggctggagaggcctcacaatcatggcagaaggcaaacagcatgtctcacatggtggcagacaagagaagagagcttgtgcagggaaactcccctttttaaaaccatcagatctcttgagacttactatcacgagaatagcacaggaaagacctgccaccatgattcaattagctcccactgggtccctcccgcaacatgtgggagttcaagatgagatttggatgggttcacagccaaacagtatcggtacctacaaaaattcaaaataaaaaaaaatacatacactgaagattttttactgactagactgacactcctactaatttcagtgtggggaattttttatttattatatacagttttagggctacatttgccataacattttacatacagctttagggctacatttgctataacattttagctcataaaattgccttaagagaaacatatgtctaaaagacctaaaaaaggcagtctataaagaatgtttaagacttctctaatctatggataatccacttaagatctttactttgtttattttagattcctttcaatggatttgtgatgttaccatctaaataatcagtcacacttagtttatgaatgtcatttgaacaaattagttataagggccattcaaaacatagtattgataagtaaaactgtcagcaaacatacacaaaacacaaccagtgtacttttaaatatggccatgttatgttttgatgatcagatttcataatgccagcaagctgggcaattcatggatttagttaaaatcaagatgtctggagagaatgatatatgtaatttaaaagattaatgaaagtaattacttttgaaagtatacatttaaaacagaagagaatatatggctcccatttgtgaagtgaatctatttacttgtttttctatgatgttatgttaatttgacattaagaggacacttgaatatgttaacttctgtagctgtatttcctccttggttaaaaatacatgtctaaaattaaaattttagacaagattaaagtcagacttattttagggctctgaaatacttatactgccagagttttttttcatttgctatccttcataattgaagaggacagcacaggtccaatcattaacatgacctatgctcttggttatttttctaatagtggtgtttagattgggagttcccaggtctcccagggtagccccaactttctctttcagtgagattttctgcagatattctcaatttactccagactattcagtgtcctactcacaagttttgaatttgtatgcatgccttctttattcctccatctaaaatgtagctcctttctcccccaacccttcaaggtttggtccactgttacttctacataaaaccttttgtgatttttcttcattctgggtgtaactgttccctcctctgacactccacagaattgaatttgtaccat

SEQ ID NO: 72990 - DNA, 1757 bp, Homo sapiens
tatatttacctttctgtaactgaaaatcataattctgaagaactgattagaaaaaccattgttttatacttacttgatcacctttgatgacattcttcaaatctgaaatagttaatactataggcatctgctgtgatgcctagacttcagtgtaaatttacagaacagaaaagtcaatatgtaggaggctaatttatggatttcctttcaaataagaatggcttagaactagtacgtttagaaataaattttttaaacccttatgtcataggagatattccatatatgtttgccagtttggttttcatgaacaataaactaaaacagtaacaaggtgagaaagcaggttttggtaaaagattcttctgatttggcataagcttatctccagaaaatagcctctttttgtttaatgttttctgtgtaattacagggtgtaggaaaaaacaagattgttgacagattccttcacctgctcaacagaccccgagaatatattcagctacacaggtaagactattagacccacaacctcttaaaaatctcatttaatcatttgtttccctcctggtacaatttaaaaatactttcttagaggcccattttataaaccagttttatttctgttcttcttgctcttatctcttctctcctttaaaggtaataaaaccatgcaaaatttatttttaaagtggctaatgctttataaacatgaattaatagatattctgtggacagagagtgatgaacattacattctaggaacagatctcatcaacataaaggctcttaagttagaagaaaaacatgtaggatctaagcctattctctcacaagcagctaaaatagctcacaaggagaaataataaactatatgaatctcaggtatgagataaggaacccagaaatctggtagaagcatgttattatttgtctccttgccttccttaaagttactttttagataattttgtatggttagaatgctggttcagcttttaatcaaatagtttttctcaatatgggtcatttttagctttatgagtgaacccgttctaatttttagaaaataaaatataaatgatagatccaccaaaaacaaaatagataagtcaagaaatatatcaagtaatgaacaacttaaagctaacttagattgttattgttttaatcctaggaagtaaaaaatatatagtataatagagcattgaattgagttataagagttagtttctggtctgggtcttttcactaagtgatcagttcttgagagagaattataagagaataaagggcagagttagtgggtcaaaggagaaagaggaaaggactcagggaaagctgagatatggtgaaaaactgccttttgggatttatacctctgcccatgacagggtagtggtaccagattagccctaccacaataaaaactataaaactgaacaaaattcacaaacactaggaaaagaaaaactactagggatctttgagctgaacaactaccagagttccttcattaaataaccctggtattcagaagggtatttatcttataaagtctatgtttagaagtaggactaatctatccctaaagtaagagttactccatacctatctttacaaattttaaaactaagccctgataaagaaggatgcttgctatttaatattattttggaagttttgtctcatacaaaatggctttaaaaataaaaataatgggtatttggggagggagggaggaataccttgaaaaa

SEQ ID NO: 72991 - DNA, 1008 bp, Homo sapiens
ctttgacattctcccctcatccattctgaaccctttgttaatttcatagagtcctcttttctaggcccttgagttctcagggccactttactgcccttatcaccctctgtgacatttcatactgacctgccttgccctcccaaaggtccagttgcttcaaaagtgcttctgtcctgtggttttcagtgataatcactgtcttctaatgctgctgatctaagttaggaattaggccagtaataatctcatttactaaatatatgctaatatgtaggtcccatcacctttctctgctgggttttttgttttcattttgaagaggctgatttttaaataacagttgttgccattcgttgagcacccatatgtgtgtgacatgtgctaagcactttagaatcattttctaatttaaccttcataacaaccttaaaggtgagggcattactattgccattttaaagttgagggaactgagccttggaaaggttaagtaatttgccaaggtaacacagctaataaataggataccgacttatctgattcaaaagcctataaactttaccattatgttatgctgcctgccaaaagaatttcaacaaatatttattgagtactgaccatgtcctgagttctgtactagcaactctattcgtggaattttgggaaatgtaatatagcaaagtgaaagtattctgacagcataggggaaggattcaaaacagcaagctgcagcacaagtgacaaattggttgacacctctgtggccaacagcctaaattgtttacaactctttttggctattttagaaaccaccgatttgcttaaagctttaaacatttccgtggtatcttaacaccttggctttgtgtaaggagaaaaagtgaacagtcaatcatacagcctaagtccagtgtgacctttgttatgtaacatccttcccccattgcccctcccatctccaacttagcacaattaaaatacattaattaaatttaattgataaatact

SEQ ID NO: 72992 - DNA, 1031 bp, Homo sapiens
gtggtgtctttgtttttccttgaacttactagtgcctgcctcagggcctttgccacttggtgttttcctctacctagattattcttccctggatagctgcatgtttactcactttcctttttgggatttgctcaggtggtcaccttttctgtgaggccttcctgaagctctctagagtcaaatttctattccattttatttctatccctctttctgctttaagattctttatagggcttcttactctttgacataatgtatgttttactcactaattttttgttgtctatcttccttctctcggatttcagttccaggattgcaggggttttttctttgttccctgtagtctccccagcatctggaactttgcacagtagctattcctgatttgcacagtgttcctactgtgcaaagttgcaaatgttggcaatactacagagaacaaagttagagattagtaatgtattccacaagtatctgttaaataaatggatggatgaatcttccatattgtccctggaatgatctttcccaaatccatttcctaagttcttccccttgtttaaaaccgttaagggattgactctctttgcctgtagactgaagacagcctgctaaacatgcctgctgagttccctctgaccctaagctgctcatcaggcctcagtttctacaaactctcttgaagcatcctcagctcttcccacacttagcttcttgctattttctaataccgcttatactcaaatgtctctgccttagataatgcctagaatgtgctttccctacatccagttgtcccttagtttctctcttctcttaagtctctctcagcccccttaggcagcagtaactaatatctccaatctgctttcatgacacttgacatatatttgcaagttgtattatatattgttgacctattgcagttgtattataatttacttttatttccccagttgctatttgagctccttgagactaagtcccatttcccagcctgcggcctggcacataatagacactta

SEQ ID NO: 72993 - DNA, 1055 bp, Homo sapiens
gctctgcttctggtcattatatagagctcatattttctagagttttatataaacggaatcacacagtgtgtgctcttttttgtctggcttctttcacatagcttaagtgttttgagatcatccatgttgttacgtacattgatagtttgttcctttttactggtgagaagcatcagaaagtactttataaaaactcacacttatgcccacagacaaacatagtgacttcaatatttttattttaaaaattgttttaaatgatctttttgctctctaaatctgtaatctttaggaaataatatctttttgtctgaaattaagccgtatctgtagtttcatttatttttttcttgttgctaaaattttagtaaaattaaacctaaccttaattttaaattttaatggcacttatctcataattttttcattatctatcacttctttggtctttgtattacccaccagtttatcagatcaccttaagtacacagcagatcctctgctctctaactttctggcttgtggaacctagctagcatcatcaggaaatgacttcccatgtaacctatttgtatgtaaggaagcctttagggagaacctagcaaacaaaaaggcccttctcatcctgttattcagtagttcggtgactgtttttataatcattatacatttctctgcctaacatatcagctgtcttagaaactgccttcttcaaatttggccagcttacttaagaacgctgctggagtcaatactaaaaagcaaactattgacaatatatgggccagtaaattatcatcacctttaaatgtaaaccatttagcatgctctcattttagttgttcttttagttctaattttacagctccactgtggtacctggcttcctgatctactggtttaaggatataaattagacttccccttttggcttgcctgttgtattttgactttgtttattccctgatttggtatccttcactatcttaagtgagaaactacatctgcagctttaattttgggtagccaaaccaggctctttctctcctaccttt

SEQ ID NO: 72994 - DNA, 1043 bp, Homo sapiens
ttctttttttctttttttatctttttttgagatagggtcttgttctagcaaccagactggagtgcagtggcacaatctcggctcactgcagccttgaactcctgagctcaaaccatcctcccgccttagcctcccgagtagctgagactacagttgcgcatcgccacacccgttttgttttgtttttcccatttttttttggagcagtctcactgtgttgctgaggcatgtcttaaactgctggcctcaagggatcctcctgccttggcctcccaaagtgctggcaatataggtgtgagccaccactcctggcccttctgtcagtttcatgtttctcccatggtatattctgatgaactctaatctgggcttgtggctctttattcttgtagctcctacatcatcttagatctctccactcccacttactcagtttcctctggtcttttttcttgtaccttttattatttagatgtatgttgagcctcctgggctgaacttctaattttattttattttctctattatgttctgtcaggatcttggtctgtccttaacttttcagaggtgagatgtcctaacaatgattcttctttgttgtctgaatatttctaacagttgaaagcctaatccctttccttatctgtaatttttctttttacctgagaaccacaccattttcttaattttgttgttaaacacagtcatgttacagaatctgcttcactctgatagtatggattgttggtaaatttttttacctttacttagccttaatttaatgttgtaacttatttttgtctttctgaaaataaatatgttcttttttagggttataataggttagattcttctcttaagctgcttggcagtacttctttcaggactgtgtttattgagtagaagactgacagcttgactaaaaagacacagcacagtgtaaaagcagcaaatttgtactgaatgaggaaattactttatttcatgagttgttcttataagtaatatgacccattatctagcatgtgttgatcctatatgct

SEQ ID NO: 72995 - DNA, 1058 bp, Homo sapiens
tggctctttctaatatgatggtatacagagtttaggtgataaaatttaactgagctagtcttctaagaaatatcaagtatttcccatgttctatccctccgaagattgaaaagaggaagaacatttctggtctatagctttggttggcatttatagcggtgagctatattgatctgctgctgcatattgtgtagcaaaaaataatcattcattttactttagcaaatgtaagcgagtctccaactactagattgtaaaagaagagccctatgtactagttgtctttttcatcatctctgttagtataaatgtttacttacttgaataaggtaagtactgtacacatcctgtgaattaataagataaaaaatactttggaatcataaccaaatgaaatagtgcttttttatatcatgcacagaatggtgattcagatatgttggtataagaatgaggaattctttctattgaaattaaaaaaaaaatgttaccagtttttagcttcagctttttaggagtctgagcctcttatgtctgctgaagtcacgacattcctcatcttttcctgggcccaagcaaaagactcctaaccttaattgggccaggatatcagctgttttcagtctgaagctgtgattttcaaaattaacatccatcagtttctttgaaagtatgatattagttgaatgccttcatcctgccatctcctctctgaattccaataggaatgcttaaaatagacaaagcctactctttttttctcttatttttaactttacttttaatttatgttattttgttgtgcattttgtatatcttttgcaatctcacatcatattagaacaaggaagggtatagataagtgaattttaatttaatatctttttaagcagtgtttcccacgtgggaggcatatcagaatcatctatgtaatgtttaataaaaaacagatggtaggccccatgttggccctgatgaatcagaatcttcaggatagtggagcttaagtttatatatgtttcaaaagttccccacctgtttctgataatgtatcttta

SEQ ID NO: 72996 - DNA, 1087 bp, Homo sapiens
gcctcccaaagtatcctgcctttgagtatgctatcttgttatgtaaaagaattagtttaagagtctgagaacagattttctcctatatttctagagagtgacaataaactcaccaaaacattattttattttaatgtttttcagtttcctgttcagtttattaatgcatggatgaataagggtgggaagatactacagttaaagttaatggcaggactttctatttcctgatacacttttgagttacaaactcagtgtcttctagtttctgtcacagaataaggtcatttagtcatgtcttatcagtcctctctctgaaaaatacagatgatgataattgaaaggcacataagtttcccgtaaaaacatttacccatcctttgtacatatcctgtcaaccttttagatgtcctgcaaagattgggaaacagtagagataagcaaactaagcacattttctgaaaactccttttcttttttcccattttgcttctctgctcattaatttttagagaaaatttttagagaaaagagtttcctagaagtatagactttggaaagggatagagaaatataataactgtaatatgttttggaggtgaatttgtttcttttgctatatagcttctttccatgtaaataatcagttgctttttattatagaaaccaagcccctgagatcaaatataagactcctctgtgggacacaggaattaataaacttaaagaatgaatttggtttgtataataatatagtgcacattgatgaaaaagttccagaggtttgatgcaacatagagaatttagtgggaaaaagtagatacaccatctgttttcctagaagatgtggagacttccctgttatttgtacatgtataaagctacacttaatctgtggtttttgccttatttttagacttgattatttttaggactgcatttcatatgaagtaaaaggaaaacagagctttaacacagatttgaggcagtacgtaaagtaagttttataataggctataaaagtcataaatcatttggctcaagtgttaggtcagattcttttaactgattattctttttttagggt

SEQ ID NO: 72997 - DNA, 1014 bp, Homo sapiens
tcttggctcactgcaacctccgcctcctgggttcaagcgattctcctacctcagccccctgagtagttgggatcacagttgcgcaccaccatgcccagctaatttttttgtatttttgtagagatggggtttcaccatattggccaggctggtctcgaactactaacctcaagtgatctgcctgccttggcctcccaaagtgttgggattataggcgtgagccaccacatctggccatgttatattgacctctctttaattataggtgccagccgggaccaggctattaagtcaaccttgtgcgtcagaccgtttcatacagactttgagccataagcagctacaggctgaaatgatgcagtctcacatggttaaagatatatgtttaattggaggaaaggtaagaatgacagtctcactgcagacttttagtttcctggcttttggttattttgacttacctcttgaataattttttccatttgtagggttgtggaaaaacagtgatcgctaagaactttgccgataccttaggatacaacatagaacctattatgctctatcaggtacagtgttcatttttagctgcacttggactataagcatatatgcttaggccatcagcagaatttatggatatcttcttgttatgacctgtgtttttttatataggtaaagaaccaaaatagtaataaaattattcaaattaaagtgcaattataattctttggagcttttgaaagtacattctaggatatctgatgtgcacaacataccaggggctgtttttcaaagatatttattttccagaggcctggaagggtagggggaaaggaggagtgaagagaggttgattaatagttataaaaatacaggtaggtgggagaaataagacctactgtttgataaataagtagaatgactatagtagacaataatctattgtatattttaaaatagctagtagttaataattcaaatgttccagcataaagaaaagataaatgtataagg

SEQ ID NO: 72998 - DNA, 2985 bp, Homo sapiens
tgtatcaagttagattgacactactctagctgtgggaaaacatacatttaagctcatttatttgttttcctagaatttaatgaatcttcgttctaaattttttttctttttttttttttttttgagacggagtcttgctctgtcaccaagcagagtgcagtgtcacgtcttggctcactgcaacctcctcttcctgggttcaagcgattctcctgacccagcctcccgagtagctgggattacaggcacatgccaccacgcccagctaatttttgtatttttagtagagacggggtttcaccatgttggccaggctggtcttgaactcctgacctcaagtgatccacccatctctgcctcccaaagtgctgggattataggcattagcctttgcgcccagccatttgttctacattctaatgaatttaattacttgggtaggtcttgctcctttcctgttgagttctccttaaaatacagtggaactttttttttttcatgaaattaaggtgtcaatagttgttatttgtctacaacatggaagcaattcttgtcaaattatgtgatactgtggggatttgcatatataaattgtatgaaatatagaactttttaatggcagtataaattcacaggtttttttttaggtttggggaaaggagttagtgattgtcttgagtacttatgacatcaaaatgaagacttgaactgggatgttaagtttagaatgttgaggttaaacatgattttcttcctcccaaatctattttctggagttctttcattctgctgaatacatgatgatctgttctttcattgagtttcaactctttcactatagtaataatgttccaaaactagtgtaggattttgggggttaatttctgcctatttaatagtaaaaataaattcagttttttatattgagcatgctgttataaataaggcatagaacttaattttcaatttattttcatctttcacatacttacctgtattctttctgtgtagttttgatatagctagctggaatgaagtggtgtagtcaatgttagaacgttgataattgggccacatcaagaatcaatggttctagcctttttttttttttttttttttttttttttgagacaaagttttcgctctgttgcccaggctggagtgcagtggcacaatctcagttcactgcaacctctgtctctgggttcaagggattctcgtgcctcagcctcccaagtagctgggactacaggtgcgtgccaccatgcccagctaatttttgtatttttagtagacagggtttcaccatgttggccaggctcgtgtcgaactcctgacctcaggtgatccgcttgccttggcgtcccaaagtgctgggattacaggcatgagctactgtgcctggtggttctagccttttaaatccagttcaacaaatattgagacccctatagtgtagaaagcactgtaccatatgctgtggaaaattgttataataattttagttaagctattcacatagctgacagcagaatgatggccaagaagttctgttttcatgaatttcaggtaacacattaacttcgattgatttaaagaataaaccaatatgggcctatttcagcatattttgaagggtctcatcatctccttctaggaagttgattgtcaagaaatgtaaactatgaacttctaccaggtcaggaattcagtgattccatttcttgtcatttagtaaattttagggactattttaatatgatctttaataattattgtaagtagaatggtattagtaggaatagaaaaaaattttcgttaactttttttaacctctactttttttttttcctttttttttttttttttttgagacggagtcttgccgttttgcccatgctggagtgcagtggcgcgatctcggctcactgcaagctccacctcccgggttcacgccattctcttgcctcagcctcccgagtagctggtactacaggtgcccgccaccacgcccagctaattttttttctattttttagtagagacggggtttcaccgtgttagccaggatggtctcgatctcctgaccctctgatccgcccgccttggcctcccaaagttctgggattaacaggcctgagccaccgcccttggcctaacctctacttttatataataatataaaatggatttcacttgtaattaaggtgtaatctgtcagatagccaatgttaatgctaaaatgaaaagtaaattgcatgattttcttgtaattttacagcgctttgaacttcaagattcaggaagctctctacttcctaaagagattgtaaaagtagagaagatgatggaaaaccatgtgtcccaagcttctgtgaccatccggattgcagataaagaggtgaccattaaggtaattaatcacaggtttattctttctatgatataccttattctgcctgtttttatgacctaaattgggtttatgatctccttgtaagtcttctctcttgatagtactgcttctgtcggtatctatatgtctatgtctccagagtcatgtgtgcttataaactggaaaagttcaggagaaacatagggaaagcctttcatcaaaaattcaaagttgacctgtgggaaaatcaagtcacaggctgattactgacagcattttgtgctatgagtccttggtaagaaatagtgttttcaaacatttgagctgctacagagacctattttcaagtaaaatctttcttagctatgtgaaacggtttaaaaaggatctgctctggttgaattgtttttagagagggaaataatatttggtcatagagctccatctgcatgtatatatgttatatatatatcagctccttctatatatatctatatgtgtatatatacacacattttatggagtcttactatattgcccaggcttgttttgaattcctgagctcaaacaatactcctgccttagcctcc

SEQ ID NO: 72999 - DNA, 1113 bp, Homo sapiens
tacaagtcaagatttcaggagagagatctgtactggagagagaaaatcggggtcatgatggtttgtaaagtcatgcaagtgatgagcttatttaaaaagtgaatgtagatagaaaataaaaagttccactcctgaagtaccttactgtgtactggtcaagaagatgaagaagaaactgcaaaaaagactgagaaggaaacagcaaaataggaagaaaactaatttatttaatttggtaaataggatattattgatggacctaccaagatcagtgttagtagagtggtgggaatgtaagccaaaaatcaaggggcttacattttaaattggagatgaagctgaacccccagtgattataattcatatgtatcaatgaagtttgatggtgaacaaaagccaaaagatgatagatcacttaaggatgaggtataatgaagaaatgactgtttctggaatggggagacaaacatttttataggcagaagggacaaaaaatgtggagtgcatggaaaatgtgccctagctgaggtggaaaaggacattttcagagcacccttgtgtcttgttttgaaatgatggaagaacatgctttccactcaggaactggaatgatgaagctgccataatatgacatagtaagtcttctaggggtttctgtctactcatagttaaagcagaagtcctttctactgaaacagtgggaacaataacaagaattgattaaaacatcaatgattttgaggatgaaggaaaaataattttgtttgttcatttaacaaaccattgttgaccattgaccgtcccatgtgtgattctaggttctggaaatttggagtgagccaaatagatacatttaatattgccctaatggggcttacattctagtaaagtatggaggagtatgtgtctgaaagctctgttctgagtggaggaggcagctagattgcctcttgaaagggtggtaaatgggctcagatttacttctgaggagagcagtaatggtttgtatttgttgctgaggggctatgagaaaagagcccaggagagattgtggcaacatatttgttcaggcaacatggtatgcagaatttcactttcagtacttaacaatct

SEQ ID NO: 73000 - DNA, 1728 bp, Homo sapiens
gacaatatagttcacttcaaggtttattccaggtgctggggaaaaagagaaccggaacttatctttgatttaatcaacacctaagctaaattggccattggtcatcgaagtagagtacctagtgtttaagatcaaaggtcgtgactccagatgaactttaatgcccctcagcccaatgtgcagtgccttgggaacaagggcacatcctcagggaggaagaaactcatgagaagttctgataaaatgaagcaatgtaatgttttttgtgaaaaaaactgagagaagatattcagtgtctaataaagtcagttatgaacaaaggtctttatctttaccaagaaaccactttgatgtattttttggtctgtaatttcaaaactagtcatacaaatttattataaagttatagaatatctttaaagagttgaattttcttaataaagtagctagtgttgcttcattttttggtctttattttaaccataattaaggggaacgtagaaaaatgattgcgtttatattggaacagaaatgatttcaaatttgaatgtagagtgttttaaaaaggaaaaagggattggtattagataagaggagaaagtatggctgtcttctcaccttaattatgtgaagagctagttaatggacagttgtaactcagtaaactgtcaagtgggagggcttaagttcatttgtctgatcttaatgaagtactttctttttgtaagatcattacacaatgatgtatacaaccagattagcatcttaaatagcttttcttaagagtggaagagtcaaaaaaaaaaaagagtggaagagtatttattgatataattctttatcatctgttctgggaagtctatgtggtctgtttgttattgtaagtttctacatttacctcaaagcattattttaagctaatatttataggtgggtgaaatatatgtgctcaaatagttttgaattagaagaggtaaaaattaataaaatattgttgaatttggaaaaaaatgtttacttaagaaatagaagtatgtattataatggtaaattaagaaggtatgtatatatacacattaacttttccttgataaatgataattattttttctcctagattatcatagaaattaatgtatagttgcattcaaattagaaatccatttaaattttagtgtaattacttaattagactatttttaaggaaaaattattagtcactgaaaattcaatcagatagaattcacaatacctttcttttttctgaacaagctataaaagtggctggaatgactttcattccccagatggtgctcatcatgtgatgttcatactctaaaaacatgtttctgtagtcatgaaatactttctagcttttagttaaggatgtcttaaagaaaaccctctcattctgaatctgctatactttgagaatagtatgctttcttacagtttagtaacaaatacatccaggcttctagtaacgtgtcttggctcttggtctcagttaagactgcatcataacagtggttaaattggtaagttctcttggtgatttagaaaggatatactgccacttatccattgataatgtaatctgagccatagtttttttctaagaaacttggatcttacatttagtatttttatttagttcaacaaacactaattgagcattcattttttggcaaattatatgcatatagaaaggtagtgatacagaaatgg

SEQ ID NO: 73001 - DNA, 2258 bp, Homo sapiens
tggccaccaccccgtctgggaggtgtacccaacagctcattgagaacgggccatgatgacaatggcggttttgtggaacagaaggggggaaaggtggggaaaagattgagaaatcggatggttgccgtgtctgtgtagaaagaggtagacatgggagacttttcattttgttctgtactaagaaaaattcttatcctgttgatctgtgaccttacccccccccccccccccccggcaaaaaaaaactatgatgttctagtagcagtgatcataccaagtacctggacattggtttctaaataccatgctctctaaaaggattaggtcagggaatgcagaagatgagcctggaccatctttttgtgccagagagtaaggaaatattcaacaaatgatgtcgatatgtcaaaatgatggagttcccaggttgaagtggctgaaatctgggacaatttgagcataaaaataaatgatgatggtaattggttttaacctgttacataaaataggaatccatgagtccatactgatagaaatgaacaaaaaatatggagatgggagttctcttttaaagtgtaaaatgcctacttgtgaatctagaaggaattacataaatagaaaaaacaccatttggcaaccatcagagtggcagttaatttagacaggagtcatcaaaggatgttaaagctggcaggtggagcctctatgagacacagggtattgacataatctctgaatatctccctccaaaagactcagttgactacaaaacaagaaagtggtatttttacagtaaacttcaacttgaccaggtgggacaaattgacattgtatgcctcccaaattccccatttctggggaatttttgctgagagttcatgatgtatgtttggccatgaggaaatattgtagatttctaggttgagggtcattgtatagaacataggcctctattctttaaaactgttcagacatgaaagacagggaaaaacatagaaatgttccaggctaaaggagactgaagagattggatagctaaatgcatcatatgttcctgaattaaatcctggaccattagaagcaagtgacaatattggcactgttggtaaaacttgagtagggtctgtggattggataatagtgttatattaagtggatttcctcatttggaggcttatgtggtgattatactggccacagttcttgttttcaggaaataccaactggagtgtttaggggtataggggcatcatatctgcagcttactctcaaattgttcagataaagataactgataaaataggcagggggagtaggagggagggggaaatgtgctaaaaaaatgttaaccattgaggaaactgggtgaaggttattaacttgaaaagcaagtattttatataaaactatggaaattgctatagagctttcatttaaactaatgaaggtctcattttttgtcataagtggtttataatacgtggggcatggttttcttttaaaatatgtgtggcataatttcctcattgtatagttaacagtggtgttttccaaaaggccagtcacactctaaaatgtcttataactatatgtttaaagtgttgacccttggcagagacttattggctcaccaaaattaattcctccatatgaaagatggtttttgtttttcttacatggtttggctcaaggtgtggatttctaagaaatagaatgtgaccactaagctgtatggctttctgtatagaaccttcagtttctggaggccaggatttgacaacgttaagcatatggaatggtatttctctctcccttatcttcaaatctacccagggtctttgggatacacaacaccctctgtgtatctattaataatgagaagaccttagaagagtggaacattggattctaattacttaagtggtattttttttttttcagagcagttagccaaagaacccaaagaaacagtattttcattgactggttatgtcaataataataataagataaaattaatatacagctgttcctaatagataatgagaagagaggtgtagttagagacggaatctataagagaagcaaaaagaagcaaggggaaaataatggtcaataaagagacaaaggagggaagagacagcagaggatggaagcagtgaaataaccaatgatgaaagagaagaaaggtgtgtgtgtgtgtgtgtgtgtgtgtgtgtgtgtatgtgtgtatgtatgagagagagaggaagagtagg

SEQ ID NO: 73002 - DNA, 1793 bp, Homo sapiens
gggccataaaaaactcttggaggctagagtttaggtttgggattacgaaatgtgagagatgaggctggcagggtagatttggaccaggtggtgaaaaacctcaaatattgtgatgaatttaggaatatatttgcatctaatcagcttctgagttttaagtaggatattatgatgcggaaccattgttccttaagaattaatattagggatcttttttagattaattaaattggcccctgtattttatatttaacaacttacacattttatattttaaaactattaaaatttaatatcatttttcccttagagtttctcagctcttgtcctttgccacaactctgtgttcccaagaatcttctactcttggacttccagactttcctttagatagtttagcagctgcggttcaaatcttggtaagtaaaataaattaatgactggcatacccaaatatgttaaaaattttgaaagttaatcattagggattaatgacttcagtttgcttttgtcatactcttctataaatattgtaaggcctgagattaatttgttgtgcagtgcagtaaactgtacagagaccaaggacatgttctgagcccctaaagagctttcagctttggagtaggagctagacatgcaatctcagtaaagttctacagagggaaggaaggctttagcctgatcaagtaagaggtgtgctgcagtgtgagttaggcctcagagctgtccttacctgagttaggggagctagggctttcacactgttctagcttccatcagtctctgtgtcatggttgtctcaggggacacaaattcccagacactaactgctctcccagcatgtgtgcaagggtggcttcaagagcccaaggatcgtcttcttagaaagacctacagcaattgctgttggaagagaaagctaggaggcacaagagagaatgcaaacagatctgaggggatctgatagagtacagacattgtccactacagtttcacaaagggcatggcggtcatgtctggagtgataaaaggcccaggaagtcaaagcacaggcaaatgtgtttaatcacaaaagggcctagtatctttggagaatgagaataagttgtatccctaaagcaagtgtgtgtggtagagggagaagtcagaccgctattgtgaaatgttttgcatgatgaatgaagtttcctggattttatgatatggaaaaagtggcttatcagacaatattaagttggtgggctatgaatgtgaccagacttatgttggaggaagacacctttgttggaagtgagggaatgactaggaagcttttgtaacactcagtgagaccctgtggaggagggcaccatccaagatagtgggaatactatcttaggcaagagacttatttttaaacttgtatgtatgtatgtatgtatgtatgtatgtatgtatgtatgtatatatgtatgtttcatgtgagtcagggagcctaggtattgttgacattgttctatacatccagaacagaatttctcctcctgtttatcaaatcttatacttttatcaaatctttttgtttttgcttagaacattttattttgaaaattcttatgaaatcttttgtttttgcttagaacattttactttgaaaattctcaaatgtaaaaaaaagttgaaaaacagtaaaacattcataatcccctcacctacaatcacccattattaatatattgccacatttgtttgcatgtgcttttttctttttttttttcctgaaccatttggaagtaaattgcagtcagtac

SEQ ID NO: 73003 - DNA, 1010 bp, Homo sapiens
aagatggacgcttcctgatgtctgctgagcgttacgacaaacttctccgagtaagaaaagaaaatcctgttgctttgtctttgctgtcaagctatgggcagtgccattttattgtgtaagacatggctctgttggaatcaggacagatgttcagatggcccttatcttgggtaaattgctagagtcatgaatttacagctttacaacactcttctgttttagactttgtcaaaacacctcccagatttttactgtcttttttttttttggtcagtctaataactattctcttttccattttttttcctattttttcttcttctctttcttcctcttttcccatctccttttttcccccctttctttctcttaacaactatttaataaaaggctaatgacttctagatagtgctggtcaccagggatacaaagctgaagaaagtccagtttttagcttcaggaagctaaaggtccagtaggtattgacagaaatgaataaaatatttaaaggatatcctgttctgatgacccaagccaccagcatcacatgccgaggttgctgtaggaacctcctaactgcactccctgcttccatccttccttcctgacactggtctcaacacagcagtcagtgatcgccttaacagtgcatccatttgggggcattcctatgctctaaccctgatagcttcttgttccactcagagtaaaattcaaaagtttttacaatgcaatacagtgccctttgttgtctgcttccctctactagaatataagtttcacaagggcagggatttttgtaactggtattatctcaagttcctagatcaatggctggcacatggtaggtgcttaaaaactatttgttgaatgaatgaataagtaccgtggaatgattaaatgctgtgagaaacatgcatataaagagggcaacaactagggaatgtggggactcttcagaggcttgggagatgggttcatgtaatgtcacaaatgacaagaagacattt

SEQ ID NO: 73004 - DNA, 1054 bp, Homo sapiens
acaaaagttcattccttggttttattttatgtttgtggttgtcattgtcataaatatgactagctatactaagcctaacaaaggtgccttcagcaaattataatttagcaatgcctaatacataagcactttaggaagctgagctgcaagttgaactttggatattaaattgtgatctcttgaccagccacactaccctgaggtatgtcaccaatcatattgctcctttcgtgcatgtcagttctttgcttccagtatggctgttattactttgcagtatggtttttcaaaacataagaagtataaatttttgttcctattacaaatataaaacataatcaacataaaaacttggaaaacattgaaaaacacaaaagataaaaccaaaattgtccataagcctaaatagacactattaataatatatgtaattctaatttttaaaaacagtattattaggtataactgacatgcaatacactgcacatatttagaatgtataatttgatgtttttacatatgtatataaccaggaaacattactataatcaaaatactgatcaaataaatttatctccccaaaaagcttacttgtgcctctttgtaatgtttcctggttcctccattgcctaggaatcattaatctgctttgtagatttattcggattttctagaattttatataaatggagtcatacaacatatatacttttctgtctagcttttatcactcagcataatgattttgagtttttttctttctaagtggtattccattgtatggatatattacaatttgtttctatatccacatgttggtagacatttgggttgttataggctcttagaaataaagctgctctcaacattgatgtacaagtctttgtatggacataggctttcttttttcttgtgtaaatacctgcatcatgcggtagatgtttaactttttaagaaatgccattctgttttccacagtggttgtatcattttacatttccaccagcagtgtatcagagttccagttcctccatattcttgccagctcttggtg

SEQ ID NO: 73005 - DNA, 1026 bp, Homo sapiens
ttccaagcattaatttttatttatttttattttagttcctcttctaacaccagcttcacaaactgtggcaaacctggggccaaagaggtctgtgaaaatctctttgctgtatagctgccagatttttggaatgctggggaattctctttgctattcagtcttatattctgcttgctgcaactcagctgtctcttgtcttgttgtactgccctcagcctccagaggccacttcagtgaaggtggagagtgcttctgagggatttatctcagctatctggccccagtaccatccttaaggaactgctgtcttgcactggataaagacctggagtgcctaggaggaatctctgtcacctcttctctcctaccactggccttttagtgggatgttgccttgcactagggaaaggtccagcatgcttcaggaggaatatgtctcagctcctgccctgtatttggtctgtagtgtacatccctgtgtacttgtaaggactgttgggaaggagtaggtgggtggatgcaggttttctatgtggctaggacttctcggtacattatgtctgcccatgcgtggccatcataagtttgctgaaagttcagtttgtttctcctgacacatctatgcagattgtttctcctcctgccattctaccaggggtgaaagttagctgcgggtctattctttccttgaaaaggctcagtcttttctagaatttagttcatgtaggcttctttgttttgttagctgtgtgatgagttttagaaaactgtgatttttatagattagctggtttattctggttgttagtttggaaataaaattctcttgcaactcatttcatcctaactggaagtgggagttgggaatatttatttttaatattcattatttaatggttatgcctaagtgtgttattttaataggttttcttttccagaggtaagactaatgacataaattcttcaccaagttgttacacttgtctggagaaaaattaacaaaatagatgtataataacttacatg

SEQ ID NO: 73006 - DNA, 1054 bp, Homo sapiens
ttgtcatacttctttagacatgatttcttttaattctttgaatgtatttgtggtagctgatttaaagtgtttttctacttagtcaaatgtctggtttactcagagatagtttttattgactccttttttctgtatgtatgagccatactctcctatttcttaatttcttataattttgttgttactgaaagtagacattttaaatagtataatctctccttcccaggctttgtggttgctccttgtgttgctgtttttttttttagtgatgttcctagtctatttctttaaagtctgtgttctttgtcatgccttgttagcttagtggtcagctaatgtttgaacggagatttctttaatgccttgaatcaataagtctcttggcttttgctgagagtctgtgtgtgcaagttggacatgacttcagtgctccataggtagcttacagttgtgtctcaaccttttctttctgcttgtgtggaccctcaagattagcggaaggtgagagagagattaggcccttctcaggattttcctgaatatatgcatggccttccagattcttaggcatacactgaagcttttcaaagccttctgcaaacatctcattttcagtttttgtttctgtctttaaagttttttggttgtcctcttgttagctccaactggttttgctgcctcaggcagctgtgatgttaaacaattgttgattttttttgacaaatgccccgagttagtgctgtttgcatacagtagctctgagtacatcaaataaagacaaattctaaaaatggagcatttcagggagctgccagacaggtcaagtagggataattttttgggattgaggcttttgaggagcttctgtatagttctgttcacttcagtgacttccaggctgctggttttcaccatgattatggacagtttgttgtaaaacaattgggctcacgcctgtaatcctagcactttgggaggctaaggtgggatgatcgcttgaggccaggagtttgagaccagcttgggcaacatagtgagacactaaaaccctgtt

SEQ ID NO: 73007 - DNA, 1018 bp, Homo sapiens
gccgcgccgcgggggaaggagtttccggcggactcggctaggtgccgcttcctgtccccttctccgcgctgcctcacggtgcctgcacgggacgccgctcgatccccgagccccctcgccgtccccgacagcccccccggcgccatgcaatcccggcttctactcctcggggcacccggaggccacggcggcccggcctcgcggcgcatgcggctgctcctgcggcaggtggtgcagcgcaggccgggtggcgacaggcagcggccggaggtcagactgttgcacgccggctcgggggccgacacaggtaactcggggtgcgcccctgtcctccctggtgcccctgcgctccgtgccgggtccccgcgcgcccccgcccctcctctctgttgcttcgctgcgcttggaaggaccgtttgccgagcggggagctgaaagattgaggttctagtcccgacctcggcgctaactgctgtgtaacgtgggggcaaggcgctcgccctctctgtgcctgattctgcaacccgaggggtctggactaaggtttctgatgacctagaagagtgatttctccttcccctgccgctgcctttacccccagaattctgacttaggttataatactcgtagaggttaatgcctcagccctatggaattattgaaagctggatttgaccttgctctctgagcctcaagggcctggaagccggtctgtgtcatgttctagccagggcttgtggcggcttagaagggaacattcttgccaaagaacccatagttcacggtgttttaaatgcatccccgagcctttccaagttttacaggagttttccttaaagtttcacgtaattcttagagctgacagttacaccttaatttagttaaaacacttgcctctacaaatgaggtaattgaaacccagaagggaaaagtgattcgctggagaacacacaactaattactatgctagaatcacatgctttgatttctaagctcagtattttttggctctacttga

SEQ ID NO: 73008 - DNA, 1630 bp, Homo sapiens
tctcccgggacccgcgtctgctcccgtcgccagcgcggtggccagcctagcccagcccagcccgggctttcctcgccgctctccgcgcgcccggccccgggggaggccgctcctttccgcgcggccgcccggtgcccgtgaccacccggcggccgctttcggttccgcgccttataaggcctgacaggggggtcacgtgtgtcccgggccacccgccgggaggaggggcggcgggggggaggggcgggtagcggggaggaaaaggggagggcgccgggggcggaggaaggagcgaggggcggattctgcgcccgtgggaggctgcggcggtggcggggagcggaccgctcggagccgcgcaggggagcgggaccgtggagaaggaggaggcggcggaggaggaagggaccggcgcgggggcgggagagcgcggcggaagccggagacggcgggtgggccggtggctggccccgggcggggagccggggcggcggcggcggcggccgagagggaccgcggcgagggaagcgcatccaggagccccggcgcagcggcggcggcggggacccgggtctgcgcgcccgggcggccggcgggcgcgggctggcgcgatggagcctcagcacgtgcgccccgcgcccggcgcccgcagcccagcgtgggaggaaccggtgggtaccgcgcccgcgcccaccccctcccgcttctcctttgctccccccgcccgggccgggttccgttcaggaaatggcccgggatgaggtccccagctgcttcccagccgggttagcgcttcctccgccgcccgggctcctcctcgcgcgccgcctggagcgcctttgtccggctgatcgaggctctccccgaggaaccgctggcaaaccgctggcgacggccctgcgaggaccgtttcccggcttcaccgactcctcaacttttcacttgctttgagaccgtggaatgtaggcgggggagaggagaagccaggctgcgcggtcagcgtggggagtctgaggagcccggttttccctgtcgagaccgcgccctggtcgtcacctgggcgcgcaggttcccggggacacgcgcctggagaggctgagcgcggcgcggagcccagaaccacgcctccgactcctgccagccgctaaagcttgggcgtctggagggtgcaacgggttttgccggggacgaagcagaaagctgacttcgctttcgcctgggatttcgctgcacacgcaacgcggaggttgagtaattttaggaaccaagagtagtgtgtgtgcgtgtcttaagtgtgcgaggataaggaggaagagaccagggggctttggatttgttccctcaaactccctcaacttccttctctcttccgattcaaacagaaccgtctcacatccctccagggattccaccccggaatccccctctcactcagagctctggaagcctgtgtgggctgccttttccctggcgtcgaattttgactctccacgccctgcctcgatatttgctactccttcttggttgacattgtgagccagtctgaaaagccccgtccgaaatttctggcctcacccatgttccggtcaacgtgttcggatgctgttttcccagggactctccgagtctg

SEQ ID NO: 73009 - DNA, 1043 bp, Homo sapiens
accttagtttggaggaaccttaaaggtcatgtcaactgaaaaaatacgaaaggaatggtactgaaaggcatgaacataacagagattgaatgctttctccaggtggagagactccacagtctggcagggactttttgtcctatttaaaaatatagctaacaccagtttggtgttctctttggatgacaagagggatctgtcgttttaatgtcttctctcgcagccccctcaccgcagccccctcacacctgtgaggcttctttgacgttgagcgtgcacaacccgctgccagtccgcggttcccaagtgcccgcgcagccagcttgcaggggagttgtgcgcggtggctacagcctgttgatcccacttcctcctgctctagtccgggctagggagtggctctgccaggacttccaaggctttttgtctcgggtactggtgttcgcatggctcgagtgtattgttttcttccaggcaatctcggttagcgcttcagcttagacacttcttgtgcgttctgtcgtcttgggctgcgtgtagtctcttgtttctgcgctttctccacgcccttcccagtttcctgttagccgaaggggatcgctctttctgaacgaaaagttctcagagcggagctgaacctcccggaaaatgctcttctcttccgtgtgcgccggatgggggtgggggtgggccagaaactgaacgccgccgtcaggagagctgaggggacccgacggccctggcggaggcgggagaggtacggtcctcggagtggggctgggggtggggaaaccgacgaggggcagcccccgactgtcttggtggcagaggggacttttattcagctggaaccgcgcggcgaggcccaagtgtctctggagagattcggggttcaggaggtggcgggtgcacccaagggtgctgggaggaagctccaggttcccattcttccccagggatcggcgttgcccctgctgtccagaagtgagagggggtgtgcgggcatcgccactacggggtgggctgcagaggtttcctgcctc

SEQ ID NO: 73010 - DNA, 1870 bp, Homo sapiens
tggaaacataatttttattcagtgcctgtggaggccggtaacggtggctcatgcctgtaatcccagcactttgggaggccaaggcaggcagatcacttgaggccaggagttccagaccagcctggccaacatggtgaaaccccatgtctattaaaaataaaaaaattagctgggctttgaggcgtgcacctgagatcccagctcctcgggaggctgaggcaggagaatcgtttgaacccgggaggcggaggttgtggcgagcagagattgtgccactgcactccagcctgagcgacaaaaaaaaagctagtggattaatgtttgtagtagcctgcctccttattttctgaaatacatgtgtgtaagaacaacacacaagaacaactgttgacaagatgcacttactaaagagttagggattcagtcactttagttaagagtacatcttgtaactccttttaatagtgacgtttttgagtttgtagtaaattaagaatatggcatttaatgtgttttttaagattaaggcttttacaaagttagggactttcctaaaagtgtttttaatatttcaaatcttaattctgaaaaaagttcataaactgtgttaatgatgggcaaaatggcaggtaaaaaaaaaaattgtataggggccgggcatggtggctcacgcctgtaatccctgcactttgggagaacaaggtacctgaggatcacttgagcccaggagttcaaggctgcagtgaactgagatcttgccattgcactccaacctgggcaatgaagcgagactgtctcttaaacaaacaagcaaacaaacaaacaaacgtgtatgttacatatttatatgaaatggtcaaaattccatgcatacttatatcaggattaaccagtagatttatactgttcgaaagaaaactgagagatggctctaaattgaattgaatcatgtcaaacaacaaatttgttgggagtaccactgtattttataggtttcatgcgctcgttgtaatagctaagattatatgcttatggagactacaagtaaatttaaaaagcacattatttgtgattttctatctgactttctaataaaaacatttagcacatacattttgccatgagagatcatttttgactatgaaatcaaatattgcttgaatttcaaaagtgtattgaatgtcagaaattcagcattttacaatttctcctatgttagagtgcatgtaagttcatcaacattttcatatatgaacacttgagatcagggtataagattctgagaccagtgagcttcaacctcataccccgcctcctgcaactggactgttcatgtatgtcacagacttcattatttacgtcttttatcacatatactgattcttggggaagaaagtgagagcaatagggggaatttatagaatgagaactactaaatttaacgttggttcccagtcttcaattatgattcagatgagaattaaggaaggatctttagaaaaagacaaatactttctgtgtctccgcacaggtgtgtaagatgggagcacctggaggagaggtaggccctaagattagctcaaagccatcttttttttttttttttttttttttttttttgagatggagtttcactcttgttgcccaggctggagtgcaatggtgtgatctcggctcactgcagcctccacctcccaggttcaagcgattctcctgcccctgcctcagcctcccgagtagctgggattacaggcatgcgccaccacacccagctaattttttatttttagtaaagatggggtttctccatgttggtcaggctggtctcgaactcccgacctcaggtgatctgcccaccttggcttcccaa

SEQ ID NO: 73011 - DNA, 1032 bp, Homo sapiens
ctctttttaagaaatcagtttgaacatgtgaaaaccttcttagctcgtcgactatataaaatcaggcggccggcaggatatggcccatggatatagtctgtgggctgtagtttgctggcacctatgttagaaaatggaaggtagtatagttaggtttgccaagcattgcaaagttaaggtgctgttaaatatgatccacatttaagggaccaaataaagctagatttcagtccatttaaaaaatctaatctttgtagaacattttatttttagcttggtttgcgtctttgcttccattttaatgtgaactaaatatagactggaaattctgactctcagtacagtaatatatggtataacacctttctttccattttgattacaagttaaacatgatatcccattattaaagataagagacataataaataatttactaaacctttacatataacttaacgatgccgtattttaaagtatctaaatttagaactctttcacttagtttaagtttgcttgtttgctgttgtggtaaagaggcaaaaggttatatgaaactaccagtataaaggacgtggggccccgttctgtttccagggtacagtgtttttcactcatattggatttgttaggctttacttactcaggaaatgtgtttataagcaaaggttttaattaaagagagtttgttttacatctaagaatagacctttgaaaaaggccataacatgttagtacattacagtttcccttggcaaatttgtttggttttgttggatattgagtattttactctatgactatttagtcactggaaacacatttgtagctgggcaccgtggctcatgcctgtagtcccagcaatttgggaggctgagctggtaaggttgcttaatgccaagagtctgagacaaactttagcaaaacaaggagaccccatctctataaaacattaaaaaataagaaagttagctgggcgtggtggcacctgtggtcccagctacttggaaccactgctctccagcctgggtg

SEQ ID NO: 73012 - DNA, 1009 bp, Homo sapiens
atgcatgaacccaggctaagaacttttctctatagtaccttactttggacactgttaactcactttcaactttctacttggttccccccaacccccttcagccccactgacctccctctttgcagctgctgttccttctacttagcctgctcttcacccagaggtccacatggctcattgcctaaaaatcccttcccactccacctccactcacagccatgctctatttctctctatagcacttatcaccttctcatatactatgcgtttcaagtatttacaagttcataaattctccttgcattaaaatgtgagttccatgagggcagaggtttttgtatatttttgcttactgctctatccctggtacctacagcagtacttggaacaccatagatatttctttgaatgcatgaattgaggagcaacaaaggagtaaactgagaaggagcacacaggaagatgcatgatattgaaaatgttcccattctgaagctggattcacgggtgttcattttaccactgtgcttcacaaactacagagatattatatattcttataaatatcaaatattataatatcacataattttaaagtactacaagagtgtcgaggaacaatacaactcaaatcaccgtgcctgctcagataaaactcttgcactttttcttacctacataaaatagtgagatggagaaaagtaggccaaaaaattcctgtcgttttcattctctagctaggtaaaaataaattttactcatattttttcctcaaatatgttttaataggccatgtggaaaattacttcacatgattctttttaacactataccatgacctttcaaaaatggcatcttaccttatagaagtgaaactaacagttttctttgaaaacctatttgaagagttaggtacctagaagcatttttttctaaaataatccttttaaaagtacgttaaaaagtctcaataatttttgttaagtttaattcaaatgaatataaattt

SEQ ID NO: 73013 - DNA, 1009 bp, Homo sapiens
ttaggtaaaatagggctagaggactatgagattaggaagaaggttagaaggctaatatatagagtgaggtgtcttgcacagctagagatgagttgtaaatttgatcccgggtagccagagcagcaagaccagttataaagtcgtattaccagcgggaaaaaagccctctagattttaagggggaaaagcttttctagctttccttgggggaaccaaagaaatatgttctatcagtctttgatgtgggtgggagtgaggtctgcaatatgttcccctcacctacatccacttgggaggtgtccttatgatgtcctcccttgtgaggtcaggacataatccagacttcaactttgtgtgacagtagttctgtaggagatgtaattaaggcagttttagttacggccaacttcaggcataaaatccaaattatttttgaagattgaataaatggcatgtacttgaaacagttctcgggttaaaccaggtatctgctgaaatactttcaaagtgtagaatctcaggttatctgcgtttttatttatctgttcacttgtagttgatacaaggggatggagtgatatgttcttagctattatgggaagaaaaatctggtatttcttggtggctctcataaaaactggtaaaatgattctacattcaggtttaaaaaatgttctttggagctttatgagtgcattgcagaatattaaaagctgtgtgtattttaggattattgtgaaaatagtgttgacttcatggacctttgaaaaaggtcttgggaacacttgaaaatcctgctagggcaatgtatctggacctatttttttttttgaagagagtgccatgaggatatctggaggaagagcagagcaagctgaaagaacagcaaatgcaaaggttttgaggaagagacacacctgacacattccagggatgagcattcccgaacagctgacacattccagctggtgggaagggagtgaggggaaagtgagtagcaggaaaaaaa

SEQ ID NO: 73014 - DNA, 1071 bp, Homo sapiens
aataggagctgtattttgctcctatgagttcatattgcttaatgtttgaattagaagaaaaaacttttgttaggtcactttcttattaagtttatatttgaacagttagtaagcaggcatattgaaatgctgtatgacataaccgctcttatctttgaggcaatgcagtgttgtggttaagatcatggactttgtgttttgagaaaggcctggtcttaaatcccagttgtcctatttaccctctaagtgacttcgggtaagttacttaatctctgtaacccagccttatctctgaaatctggacaatcaatgtacctacctcacagagttgtcgtgatgatttgcatgagataatttgagtatttagaactgtggctggaacatattggttcttaaaagagataaattattgtattgatgttaaaagaatatagatgatgttccacagtaagtaaataaaatcagcatctaaaacaaacttgaattgtgatgatcaagaaaaaaaatgtttaccttgcaaagaaatacagatctgcccactgtcatgagacagtggcttcccattagctctgttttagatcatttctaaatttactagattgtaaaatctcattatgaaagcctagacagggtgatgtatgtggagttctgtttataattaacaccttatagaatgtaatgtttttaaccaatgaatttttaaacaaaagaaaaagggattttcaactaataaaagtccctccctcacctcagaggtcaccttctcagggcgacctgccctggtgatgctatccagcattgcagtccccacccccaacctggcatgccccaacttcctttccttcttaacttctccccttagcactgatcaccaccgaatacactagatagtaccattttctctaaatccatcttctaatattagaatataaactccatgggggcagggatatttgtctatttttttccctgccctgtctcctgtgcccagaacactgcctgttacatagtcattgcttaaacgatatttgttgaatgaaaaagggaatggttctagttttgagaaattct

SEQ ID NO: 73015 - DNA, 1081 bp, Homo sapiens
tcactatctagtgtggttatctaatgttgaagaaaagctagagacatgcttctaataaatgcataatttaatttagcaaaacagtttttggaaaaatagaattggaatttgaaagtgtgtgccactcatgaaataagggttacgtggggctttgtttcacatggagcatgagagtggcaatgtgtagtaatggagattaagttagtacagcaaacaggcctttatgccttttatacttactaattgtgtgataataaaggagttatgtaacatattaaaacctcagtttcctaattttaaaatagagatacattcatatggttggattgttatacagattaaacgagataactgcaagtgagctttgatttacttcttgttttttcatactttttcctgtgttagtcgtgtttctgcagtttgttaaattcatgtgtacattttctagtggtgtttgaaggtgtaataatccttccaatttgttaatacatttagaatagtgcttttggggctagaagattggtggtgaccatgctgtcacattgtttctcactgttctaaagtgaaagaactttataatgaaaatatttatttcatcatgaaagtgtgtctcttgggacccaggacatcaatgaatatgagatctaagtgtaaaagtgcactaaggacttggcgcaacttccactatcattatttttgcaccattgttaatctgtatataaaataactttttctttccttaaatctttcagaagcccctttgaaacttagcccttaacagatttgtcaactcatgcctgttgctgctgctagcttatttagtctactgaaaggttatttattaatgtctacaggttgctggagccactaactgaaacttaagaaaggtgcaggtggggactcttttaagcctcatgccatgatggatgttcatccagtcatcatggttaccatggcaagcactggctgctacctgtttcagcagcttcctcctactctttcctattttcagactgctatctacattttacaagctcattgtcaccttgtttctgccagtgttacctaattccatccttga

SEQ ID NO: 73016 - DNA, 1045 bp, Homo sapiens
agatggtgtttgtaaatattgtgcaagtgtattttgtaaataaattcctcaaaatttagtctatgattttttaaaaaaaccgaagtctgtaggcaccaagacaccaacttaagtttttaaaaatcacttaacaagtaaaatcatttctcatgttgtttgcagcctgtgtaacagactgctgtgtttgttggataggagacagctcaattctttattggcgtaaagaataaaagaattattacacagagagaaattccatgtatgctatatttgtatgtgcagctgatctaaagtagtgattcattttctattacctgtcatattcttgtcacgcaaactttctgtactggccttttggataatggccaattgaagagagaaaagaaaatcaacccccaacatagagctggagggagaaagacacggtatttatatcaggagagtgttgtgtaagaaaacatcgtaaccctcttttttattgcccattttccagaaatcttactgctattcaagtttaggttaacccctttttgtctgcagttgggtctatttttactttgtttctatgtcttgtgaccataatgttttaacatataatgttgggaatgtaattattttaccacaaataatttatggctcttttccaagaatatataagcaacagaatattggtttaaaaaaagtactgtttagatttttttctttctacagatgtgacagtgtaattcatccaagggaagctgcttgaatctgctaattaaaatgacttgttatagctccaatttctgtaggatgagaaagaagttatataagttattggaagttatgggttcttatttcttaaacatgctgtaaaatgtgtctgtgtgtaatttttttctttcagtagttcatagctgagatttttatcctgttaaatgaaagccctcaaagattttcttcatcaccttttatagaatatagaattatgcatcactttctcttcataatgtttacttactttcttttggcagtttggtttagatattcttcttggtactttcaa

SEQ ID NO: 73017 - DNA, 1028 bp, Homo sapiens
gcctggcccaagaggcatattctttaaaaatatatgtacaaagttatggagtatatgcacaaagttatttgtatatttttaaaaaatatataccaagttatgggtatatgtacaaagttatggggtatatgtgcaatttcattacatgcacagattgcatagtgatcaactcagggcttttagggtatacatcacccagataatatacagtgtacccactaaccaatttctcatcatccattcccctcctaccctctcgcccctccaagcctccgttgtctcatttcactaaaagagggatattcttaaagaaacctctaggtttaagaacagagtaaaaaaatgatttcagttgctttggtcagtgggtttttttgctcttcacccccattccagtttaggtgtgctcccttgacctactaggaaagatgaactattctcactcacggagttcatccctgtcccctcccaccacctcctaactttgtatgatcatgtcgaccttttgttttgtaaccataatgctaactttaaaaattatttttatttgaatgcattcagcactcaccataagtcattttaccacagtttgtgcacttctgagttctttatttttgactctgttcttaattacttgtatttcattgttaagtagtacttccaagaatggtgcatgggtgttttttgagttctttgaggtttgaaaatgtctgcttgttgtttttaatacacaaataacttggctaaatatgacactctttggtcccattttccttccactttcttttgacttttttattgtggaaaaacctgaggtcagcctgattttctcacgttgctttttcgatcaggataacctgaaaaattctttctttatctttgaagttcaataatttaatgtctttgttttcactatacccaaatacaaaattaaattgctacttaacatggtaatttagatttcttcctcatctgttggtgccctttttattgtatgctttttgatgtggtgcattctacagaatagt

SEQ ID NO: 73018 - DNA, 1020 bp, Homo sapiens
cgggctgaactgggcttcgggttggactgggcttctgtggcttccctgagcaactcgttgcttcttgaggacccatgtctgggtcactaacccacccactaatcttttccctttagggagcccaagctactaggacagacaacttaacctctgtctttaaaagcttttaaagaaatattgaaaaaatgaaacaggctaaataaaaagagagagaagagaaaaagtactcctggaaaccaacgatattttctcaagtattgtactttgtaagaaataaaagtggaattagtgttaaacccactttcaagaagcatgaacgacacggggatgggcagcattcctgcccgtctctacctggaatgcaggtagagacagcgaccaaaagtgaccttttacaggtagagacagcgaccaaaatatgagagcaaattatggtgaagccataactagaaattgatcactaacctttaatcagaatctagacataattattgatataaaataactcctggtcatccatattcatgtaaatatattcaatatttaatataaaagacaatagacatttatacatatatgtcttgcatcatagtttgtatacgcttacagatgcttgctccataaaattatttttaaaaatcacttaaaaatttttttttgccatgtttattcacaggtatctcttggaagttctttgctgttcattttattgctgtccaaatagaaatagtacaatctgttttctttttctttgatactacatcttaggaaatgatcccatctgctattcagtgttgtatataagagtgcttgtgtgtttttagtttaggtgtaaatatttaaaactaccagatttttttaaaggaagttattcacaatagcctcattcatcttaaagagttttataattaaaaattttaggtaactagatctatgtttatatagagttaaccttagttatatgtattacaatgtattgcgtatttttaaacaaatgttaaaataactttgatggctatg

SEQ ID NO: 73019 - DNA, 1031 bp, Homo sapiens
tagatatgtatgcattctggatttctgtttttgctcatgatactttacattgctatttttattcctacttttaaacatgaagcagttgtccattttgagttacccattttatgaattggcatatgatataatataagaaaaaaatttaaatttaggttatgttaatgcagatgatataaaaacagctgagacatgctagatcattacctgaattaatagctgggggatactgaccaatgcagtctttatagggcatgcgaaacctcttagaatataactgaatatgtaaatcataattaatgttacatttcatgctggtgaaatgtaggtgagcaaaatagtttatggattccctttctcccttccccctatgcttctctctccccaaaatggccgtcctgcctgtgaacctctctagaagctgcccagaaatgccatggttccatggaatacactctgagatacattgctgtaaagggaaaagcccagtgattgtgatttggagtttgtggcaataggtaatttgaaggttctgaccattctcaaaatatgagcaataaggctgctatgatatggcagacctacactgtgaaatgttaaaagaaatgatttaagatggtaggtttacagcagagtaagcctattatgtggatggaaaggattgtttttggggaaaaatgtaaagtagaaataacattttcaaagagaacaaaaaaacgagccagagtttgattctaagacataatcttgtgctttttacttgaagctaatatagccagaatatttaagttgaaataattgtttttaaaaaaattattcaactcttggaaaatccaggtatgtttgaagtccatagtctgagtgatctctttcctctatgaatttctgtaacacttaagaaatatttttccaaagatatttactacatactgatactcatgcatgatgtctgtatttttatctaacctattaaactaagtttttttttttgagacagagtcttactctgttgcctaggctggagtgcgtag

SEQ ID NO: 73020 - DNA, 1858 bp, Homo sapiens
tttacacaggtgaaaaaataattaatattataaattgaaaattaggccagggcacggtgcctcatgcctgtaatcccagtactttgggaggccaaggtgggcagatcactggaggccagaagttcaagaccagcctggccaacatggcgaaaccctgtctctactaaaaatacaaaaattagctgggcatggtggcacatgcctgtggtcccagctactcgggaggctgaggcatgagaatgacttgaactcgggatgcagaggttccagcgagccaagatcatgccactgcacttcagcctgagcaacagagcgagactctgtctcaaaaaaaaaaaataaattaatacttaaaagtttgttaatgtgtagtggcatttgtgtcatattttaggagccattccttttgatgacacttacaaaatcaatcagaagattcttaagtatatgattcttcaagtttttattttctttatgttcttaatgtcatgctggtctctttgtgatctaaatgatgcagtgaatatttcataaatacaaataatttaatcttaaatttgttaatagtgtgtatttataaagtgaattttattaaaaatccactaacaactgtttgagtgcatctttgtgctaatgctatgaggtaattatattcttaagctaaagtcagcacttccgaattactctcaggtgagaaaaataacttttaatatgaaaggacacattccggaagtacactggagtgcataaggagttaccaaagagttttcttgttggaaaaattacaaattcataggaaacatgattaaatgccaaattctatattagacttaattgcaatagaaggtcagagagagagaaatcagtgtgggccaggatagcaagaggttgcttcatccctgcttgtgtagccttttgtcaaaaatgcacctttaaaactggactcctcatcttctcgcccacactaattcatagagtcaggtttgcgagtaaccttaaaggtgctcagttcactggcgctttccggctgatttcatcctgtcctgcttgtgtttctttgccttattccacattatcaaggcttgttgattcttcctttgtaacaggtctcagtttgtccattcaatctagtgcctcaacatgtttatttaagcatctactgtgtgtcagatgttgtgcagagtgcggggctgaataagggccctgaaggagcctgcatcccttcatgtgtgcagtggacacagaaaatttccggaaaaatgtggggtgtgctaggaaagtgttcacactgggtctgtggcagcatggaggattgatgctgaagccacctggggagaagacctgagagagcagggggtatttgggcatagttcagtgtctctgaagtgtgaatggcggggctgaggccatcttcactgcaggtgaagcagcactggtagtaagcaagggtaaaggcttgaaaggtgtgttacccattcagcaaatatttattgtgtgccaactacgagctaggcaactattttgcaaccgaatgcaacagtgaagaaaacatgaaaagcataagtatgataaataagatgactgagtagcgcgtgtgaaggtgaaatgtgttgtcgaaaatgataaagcaagatgatggagttggggactttgggccctaagctggggttgaaggatgtttagggtgtactccacagaactctgggggctgcagaggtgcttctggggtctataagaattgttctaaattttgttttaaaatatgccttaaaacatttcaaaaacagtaatgaagaacagcatgagcaaacagatacattattgtgaaaatttacacattagatcaggggtccccatc

SEQ ID NO: 73021 - DNA, 1312 bp, Homo sapiens
aactgtctttcacgaaaccggtccctggtgctaaaaaggttggggactgctgcattagacaccaccagcgcattaactggtgccgccatggtagctcatgtttggaaaaatgcgtggattttaaaacaattttttttattaattgacttcataatatataattttgcccatttaaacctaaagttgaatttacattaataaaacatctcatttacacattttgtataaagagaatctactgctgaaattattggacattcaccttacaggaattcaacccgccttactcttggattatcatagttgccctcagcaccttcaaattatctcccttctaatctcttttgcataccattgctagagttaattttcttaaatcactaaatcttttaattaaatgcttgaaactcaaactctgtggtgggggcaagtagacttactagttacagttctgccacaaaatgctctgtggccttaagcaagtctttgttttctcatctgtaagaatcttttttgctctcagattttactcccataactctcctcactagctgttgatgatctttgtgatctgtctctagcttatccatccagcactggctcccccactaatctctgcctttatcctctgctctagcatggccattctcttcattcctgtctccttccttctgcaatgcacacaccactagctgattaattatgctcgcatatgttgatgttatttccccagcccagactggcctctttagttcattgacttacattctgcgtatcctttaaaaatagtcttctagaacttatggttaaagaaaatttattggaagaacaataacggcaccaaatgatacagcattaaggcacattgagaactaggaataaaccatttgatttgttgaaagctgtgctgtctagtacagtagccactagctacatgtggctatttaaattaaaaccaattaaaatttcacacaatgaaaaactcagtttctcagtcttaccagtcacagttcaatggttccatttggctagtggctacgctatcagacagtgcagacaacgaacatttccatcattgcagaaaggtttgttggacagtgctggtcatgggtggcttgaaagttttgtttcagggacttctggaggagaaataatatatttacagatggtccagaaggaaatgtttgataaagaaatggaggtgaggagtattgattctagaggtctgacagtggcaagaaagagggacggggaacaggtaacgtccaagttaaaagaggtatgtgtgtatgtgtgtgtgtgagagagagag

SEQ ID NO: 73022 - DNA, 1036 bp, Homo sapiens
catctgtttttcctgtttctgtccatgtgattgtcttgtgaacagtgggggacttttgtgggactgtggtgttcagttgaggcctgcccgggtaaggcagccccgctgtgagtacaggaacaagaactgcaaggacagatcgtagacaggcaagcaggagggctcggcttcttagctttggtgtggagaccttgagtgtgctgtctctctgagcttgtgctccttggcctttggggacccctggtatgcccctgatgggggagctgagacagaagggtcctagagtctctctttgggctcagaggcatggaggacaaaagggattttgtcctattgtctaaaatggtactttctgtctacttcccttttattagtgccaacctttagaaaagtcttgtttgagtgttctgtgtcacctctgctttattacgagtccttaaaagaagagtcatttttcacactcgggccaaacttcaagaggaatcaaatgaagagttagtgttgtgacaggcaggtggtggttctggccctgctcaccatcaggaggttctttctggtgtgctggtcttggaagcatttcttcatagggggtcattgttatagtctaggcaagaataataaaatcacaagcattaggtcactgggcacaggagcaaaaaggaagaccagttttcagaaaccttttgattggcagattaatttaagggtgagggaaaataaatttaagggtgagggaaaataaaagataggttgggagttctggggttcctaagcagtgcttaggaaaatacactgctgctagcaggtgaggtcataggaagaggagcagaattgccacgggaaggtgctgaattcatttggaattccgtatagagtgacttttacccagtgccgtgtagttagctgctggcaattttggaattagaatctaggttttctgaagccaggccagtgtcttttctattaaactaagacatgtgttacgtgaaataaaatgtacttgagtttcaggtggtgacggcatctctaagtggag

SEQ ID NO: 73023 - DNA, 1050 bp, Homo sapiens
tcaatatattatgtctttatggtagtaagaaatagtgtcatgtaaaagttggaaatgaactgtggaatcagacagacagaaatatgatctcagcacctgccatttattcatatagatctcattatcatatgtagcagataatgttctaggcactggagatattgtcagtgtgcaatccagtgggatgattaaaaattttggttctacaagctgtttttgtcttggaggctcactatagcactgtaactctttattgaatgctgtataaatgtgatccatcttggaccctatcctaagggggtctatttgagccagtgttgtgacatggcctctaaggtaatcctatagaaaggctctagtgtagtttgctttcttttttccttcctctcttctttccatccaattaaaatgaaacattaaatttaacttttttagatataataaactcagggaccttatattctaataggggtagcacaataaacgtagtaaattacattatgtgtcagaagatggaaagtacttcgtggggtgggtaataagatcaggatgggggaaaatatggtgagcaagcacaagtttcagtgtgaaacacgcagttactcaggtgggtctcattgagatggtcaagacctgaaggaggtgaaggggtcagccagagggatatctgagggaggagaggggaggtagtgccagcctacagcaggagtatgtaggcccactgcagaagaacgcagccattgtgatggaggaaatcaagagagggaaacgctagatgaggtcagagaggttcaaagtattttgctggtgaaaacaaaatgaactagcatacctaaggcacttaaccagagcctggcccagggccacagagtccctgcctacctcttacagctgcatctccctctgctccctcttgcaaacttttcactgcatttatagcagaaagctctttgaagatgcctcaaatatccatgttgttttaacctttctacttttgcacacacctaaaatgcccttcccccatctcttgtcataaactccttcaagacc

SEQ ID NO: 73024 - DNA, 1057 bp, Homo sapiens
caaagttccctgttttcttcaagatcccctcaaatagtccttattccatgattcacgagagagagttcagttttctgctggataaatcatctgtgatcttctatagcatttcattgtatttcttctcttttaattgtctatcttaccttaaagttagttgtgtctatttaatctcctgtgctagactgtaggttccttccagtcaacgaacaagtcttacagtcacattggttgaattgaagtagactagttctacagtctacttcagtttcaagttccgctgtcaactacttcaagttctagtttccgcagttcttgcggtgcaccgttatccctgccttgctggaacaacgctgaatgagtatgaacaatgagtgactaaaagtgggaagcctacatttattgactaggatttcctacttgctaccttggatgttaagagtatacaaaaaaggtcatctgctacttgcaaagcaaattcattacctcatttgaacgcatagttatagatgaggaaaataaggttcagaaggttcagttacttgttgtgagctaagccaggactggttctcagctctcaccttgcaaacctggaaacaatgatattgcctctgcctccctggcagagctgttacaagcttcagagacattgcattgtgcatgtgtatgccacgcactcagcaggttccccgtaagtggtagctgttatgcttccagagagcacagcacatttgcattgaaacagtgttcccagggtgtctttaaagcccttttcagttggggatttatggattagttgtactttatgcttttatttttcctttctaggaagaaattgcagaaagtaccaccaacttaacttttttcccccattttctattcctaattcctgtattgaaaaaatgtattgaagagcattgagttaggttttcttctaatgtctttgtatgttttttttcattaacagtctctgatatttgatgaagttgacctctcagatgctagtgtagctgaagcaagcacgaaaaatgctaacaacagcttcacggtatggtta

SEQ ID NO: 73025 - DNA, 1034 bp, Homo sapiens
tattttctccatgtagcctactttcactccatttcaccccagttgccatcgttcaggcagttgccatagttcaggtcacttctcacttaggtgattcattcggcagctctgttccagtttcttcttttctgatcacagatcacattgcttaaaaagacctcactggttccacattgcctgcaaatggcatcccccaactcagtcttcagatcttgtaagatcatgcctcagcattctagtattaccagacaatttatttgtccttctctgtcccaccagtgcagcaattctacccatgcctatgcttttcctgttccctctgacttcagtgattcctcccccatctgtcacggtgggaatcctaccaattcttcaaagcttatttcagataacccatttttttccagcttctttcattcacaaagtatggattgagttcccaccatgtgttaagcacaagaaattcagaggtgaatgtgtatgtatataatttccctcaagatattcctgacgtcgttcagcccaatttcatgtgggctactttttataactacatactccctaggtcttcaaaggtgcattgttcttgctgtgttgtcactcccatccacactcccagtcctccctggaaagctaccactcctgacagcagtgtgcagtgtccatcccctaggcatgacagagcaggggagacagactgctaaacaggtgcacagcggtgccatgatagaggtgagcactggtaggggttgggggaagagaggacacaaatgaattcagatgttgccttattgatttatgggcatgtgggttaattcatagtgtaaatattcctccccgtctcccctgatccccagggagagtttagtttgagaagaggaaagccaagaatagagtcctgggaaaatgttaaaattcaaggtttaaccaataaagactgagagcattcttaagtaaaggagaatcaggagtcagtgatgttataaaaaccaagcagaagagagtttcaagacagatgctttgacacgtcctat

SEQ ID NO: 73026 - DNA, 1049 bp, Homo sapiens
tcttttctcactaatcatgatatgtctatccccagatttgtttttatttacccaatttgtagaggataggagcttagaccatgaaagtcaaacagcctgggtttgggtcctgacttggctacatccagttatgtgaccttggacaaatgggttaacctttctaaatcccagtttcctcaacagtcattgagaataacaagagtacctacctcataggattataaggattaaattaaatgtgataatacaccacaatacctgcagtttaataaaagtggcagttattctcccgagtttatcatctccctatttccaagtagcagtatgttgccgattcctgaaagtttgggaatttggaagaagaatgtggatgaactttatcttgagaaaacattccatgctgcttatctttcagagatatagcaaagatttatttccacttttatctcatattaataactatgactgggaataataaatgaaattataatctgaccatgttaggtaaatgttatttgcgaaagaagagctatttaatgatatgaaagtcatcacaatcacatggcatatgttaacctttcaaagcatgctgttcaaatgactgttttctttaaattttaatgaagattaggctaactcttaaatgagtcacaattttaaagaaatttttgtactggtattgttaaaacttcttatggaagtttgctagagaaagtagcatgtgttttttatttgtttgtttgaagtagaaagaaatacataggtaatttaattcatttatttaaccacccataacattttctgggggcagtctgtaggtgtgtgtgaaatttcatgggtacggcacacccacatgggcttactcggttgatgaaacacaggcaccctctggtaacacttatatttagaactaaatgatcactggaagaaaaagggattttagttcaggggtccctttccacagcagatgtgagtaaagtttattagcattagattattattctttctacgagggtttaaaaggtctacataaaaagacaccaataaac

SEQ ID NO: 73027 - DNA, 1089 bp, Homo sapiens
tggtcttattgacaactccagaattgggctttacatcctgtatgaaatgctttaaaaatatgaacacattgttatacctcacagattttggttccattagacagtaaaatcacagtaaccaagtaaaagcccacccttttaaataggatttagtctagcctggccattcctagtgaatccttattaccttcaagtgagaagaaagctcacctagaacagtgttgcagctagcagtgattaaagtgcttgtgccatggcattgattcttgcggtcactaggttgattgtctttaatggatgagagaggattagcaattttgattcccctttgcattttattcttacgtaaggatttaatttccaacaagaaaatcatgaaattagtttctggcaaaaagagattttctatttactggtttctgccttacacatttttgtggtctctggatccagtttaagcttcgctgagcccaaatctcaatttatgaaggcaaaagtaggtttgtacttaagagagacaaatgacaatctagtcagcaacagataagggaagtcagaagcaagatcttcctgttgacaacagataggttgagtgttatctagttggagattttattttttagttgtttattttgtcggttgccacaggttgagacttgctggtagcacatctaaggtctttgggacaatcctggaactcagggttgaggtggagggttggccagctgtcaggatgctctcggaaccttctggtaagctgctcccactgagatggaactcaaggcagaagttagtctttgtatcttggaaataaacagattagtagtaagaaactattaaagagagctgacatcttagaaggtgtggctacacaacagccctggcccttgacatcaggacttggtaaggccaagacatcagcgatgtcttccactgatccaaacaccaggcaatgcctagtgatgtagttttttggaatcagttggtagggtttcttgttggtaggggatgctttgacatacttcattaatgctttgtaataatctagcataacactatttagtatgaaatgtctgacagtagttagct

SEQ ID NO: 73028 - DNA, 1070 bp, Homo sapiens
ctttgtggtctggtttctgcacaaattttggtcattttatttttcaaaattccgccagtaaagggtgctaataataactaatttttcccaattactcaacaatattattagagctgccccatttgttagaaccataatgtgagaaaagctgtcagtacaaagcagttaatccttttccctttggagcctttgtaagagttcagattctggggaggcttttttttttttttttttgtacaggtaaagtattcatatgaatgtactttagattgcatggacctttttaggaaaatgtaggatcttgtccaccagcaaggacagacgtgactatcctcaaaatgactgtagataaacttctaaaaggcgtttacctgaagtttaacacaatatcaggacacacactttataggacagagtgtaaagaaaggttttcaagtctttagattcatcagtgccttcactactatcattatctggaatcagcaggcgtactgaagtgtgccatttatgtgtacaaagacatgtatacaaggatatgattgcacattgtaatagcaaaagattggaaacaacccaaatgcacaagttagagacccgttggagtagattgtgaaatatatcatgcaatggaatgttatgcagccattaaaaagatgaatgagttctgtctgtaacaatacataccaaacttcaagttttattcagtaggaaaagccagatgggaaacagtgtgaattgtaagatgttactctgtgtgtgtttgtgtgtgtgcacacatgcatgcatttaaacctcaacagagcatatagttgttgtatatggatagaatatccctggagagaaatacaagaagataaatagttgccttcagtaaaggaagtcagtagctgggggcaggcttaggagggatatgtgcttttcattctaaatacattttgaattttgtatcataaatgtttattgcctattcagaattttaaaaaatgctacatgggacccaccttctggaatgcatttgataggagtgatggattcagcaggaagaccaccttagacactgtcaggatgtt

SEQ ID NO: 73029 - DNA, 1013 bp, Homo sapiens
gctgtccgtggacaaatctaatcagtagatttcttaatcacaaggcctataaatcaaaataattttccagttttttttgcctctggaaaacgtaactgtattaagtgtgttatgatctttccttgctcattactgttcactttaaaacaagtttttattgaaaaggagaaattgcaaatgtatacattttactttagtagtatataagtacacatggtttattttgctgaaatcatttagaattgaggcatttgtgtaattccaaatacacaaagaaaaattagaagctattctttatccttctttctcccctttttcttgaattcacaatgactttacaagacatttaatgtaaaggcactaaagacagttaaaaccattagtcatcatgctttacttagaattcagcaaagaacaaagttaaagaacaaaatagcaagcctggtttatttgtctgaataatgcttgtctcatgatactttatctcatataagggaaggagaggaaatccttagttacatcatataaggtagcaaaaaataaatacaataaatgctagagacaatatttattcagaaaacatcagtgagtccagtgaaacttggagactctgaaatgctgtgccagtcattagagccaggagtgtattatgatttaatggtacctctctgctgcatctcatgagctgtcctagaaaaacattttgaagcaataaagcatccatttggctcctaagtaatgagaggcattgttctttgcattaactatttattcaggaagagaagtgaccaactgttaataagctttatccaaagagggtcgtggaaaacaagaaaatgcaaaagtgaggttctcttcaatttcatatgcaattaacaaatatccagagctgactgattggtgctcctcttccatgtgacttttggctggctgtatttaagggtgagtgcctgttagatgtattcaaagcttctgggtttaaggaaggattctgtagcctaaacccatgacaa

SEQ ID NO: 73030 - DNA, 1154 bp, Homo sapiens
tggaagtgatatgtaaactcaatattatttaaatattaacagaatattcttgataccataataaatcaattaggtggccgggcgcagtggctcacggctgtaatcccagcactttgggaggccgaggggggcggatcacgaggtcaagagatccagaccatcctggccaacatggtgaaaccctgcctctactaaaaaaaaaaaaattaagaaatcatttaatattgcattcctttgatttttaatttaaaaatattttccatattgaaaactatgtattcctgctaagcttactatgaattattttgaagtatatttaaaatcagtttgtaagatgtatttcgtggaataagaatgcattgtgtatttgggtccatagccttagaaaaaagggctaaagagcccaagtcagtagcaaaaggatcaaaggtagaaaaactccttaggctttttctttcctagaccacattattttatcatacagattacaaaaacgtaagaaataaagactcaagttagaaatggaattacctcagaagatgttaggttttgcaacaatctttctctttgggtattaacaatcattagattgaattatccctttcagatcatcactccattcagaaggctaatgctgtgtgctgagaacagaaaggagatggaggattggatcagctcactgaagtctgtacagaccagagaaccctacgaggtaaaatagcatcttttctttcatctcgtgttcttaggaaataaatgttaaccaaagggctagagctctaccgtgcaaacataagtatgtgtacactcattcagcaacttgtttaaaccagattttgaaattcttatcttaaagcaaagtgctttggttttaaaaatgatggatttgaaaatttgaccataactatatgcattccaaacagttcagcatctgtagccttgttcactggcttggcaaatctgtcctcacatctcatttctaggtggcccagtttaatgtggaacatttctcagggatgcacaactggtacgcctgctcccacgcccgacccaccttctgtaacgtgtgcagagagagtctttctggagtcacctcccatggcctgtcctgcgaaggtactgtagcacctagcatgtgttttctcccaacagta

SEQ ID NO: 73031 - DNA, 2224 bp, Homo sapiens
taagtctttaatccatcttgaattgatttttgtataaggtgtaaggaagggatccagtttcagctttatgagtttctaacagcaggatatctagtgcctaaaacataatctatgtagtgaaaaaagaaaacaaacaaaataaaaaagcccatagccctataaacctaatgaatcaacttataatttttcctactgtcatccaggtctgtggacatagttttaccttttctgtaaaaattgtgaagatataatttgatcatctgcttttcttatttagcattattataaatacctttctgttttgctccatggttcttatacattttaaaattacttttaaagctatctgtgtgtgctagtttttctaaaatgcatttggattgttaattattgtaaagcataatagaaaactgtctaaaaacaggtcttcaccagaattagaattattattgaattttagttattctcccaaaggttttgataaatacaggtttaattatgccagttttctaaaaggactaataaaataaagtcatattaaataagaacttgatgaaaagtgtctgcttttactggttaaaacatttagaaggctctccagacaagtacacaaactaaattgcctgggtcctacttaataagttatccttgtttttgttctcagtagtaccttgcatgaccatgaaactcatttctactgaaagcacatttactgggtgcctgtgatacgcatcactttcctttaccttacagggcagcagtccagctgagaaaataagcatgggggtacttgtaactttaataatagggaaatgtcataaaagaaatgtgaatagaaagttatgggattactgcagaaaaagcaggcactttatagattttatctttgttaaattttataagaatttttataagaacaaaataaatgttctgtcatcaatttattttatgggcaatgatattgacacactggttagtttccgtccttcttcttccttttccccttctttttctcttctctgcctcccttcctctgcacttggtctcttctctttctctctcttcgccttcaacagttattcattaactatatattcctctctgagataattacaaaaattggttgcatggactaaaatcaaatttccatttctaaaatgtttagtcatttcctgaagtataaatgttataccatttaaagtagtttatgaattactgaacattttgtggtacagttgattctagattatcagttccttagatgtgatttataatggcagaacattatttttatgattcttgaaggtatatttgtttgtcattaggtacacactgcctgcaaagatttataccatccaatatgtccacttggtcaatgtaaagtatctatcatacctccaattgcactaaacagcaccgattccgatggtatgtagcagtagtgtaagtacgtatatttctggtatatttaacattgatatgtatatttcttttcctagaataataactatgatggtaattgactattgtagtcagtttttctaaaataattccatttaaattgctgaaagtacattccatttttaaaagaatatatttaagtgaaagttgtagaatagctgttaacattggcgaaattactgtatataagacttctagattttatgttttagtaaataaaacaagatcattactctgtacggcaatacaatctgaaaaggttaatttttataagtgtttttttcctctataattgaaactgcctattagcatggctgttattaaaatctgtttttctgtaatttcattgtaggaatttatattcctataaatgcacttttcccaaaatcttacaacttaactctaaagtgctgaggaacccctctacaacaccggttttgggattgcatactaattacttccttctaagcaaaccgtattgcaaaggctttttaccatgtataatgctatgctgttttatgtaacagacttgagcaactgtggattttgatattcatagggttcctgcagccaattcccccaaaatatacagggaggactgtactattattaatgtcttgcattgatatcatgccttatgcttttcaaactttttaatttatgccaatagatatcttagatataagtttataaacctgaagatgtaagtttataaacctcaaaatatgtgacttttttaaaaacctgtgctattaacagccct

SEQ ID NO: 73032 - DNA, 1066 bp, Homo sapiens
aatggccctgactaggccctgaactaggctggcaccaggaatgcattttactgtgtgtggcctttttaccttgaaaactgcgataaaagtagactaaatctttcttcttagcttttgtatacttcattagctgtgggtcttaggcaaattactcagtaagcctcaggttctttggctataaaacaggacagaggggtaaatatatacagagtgcttaattacagcgcctggtacacaatgcaaaatattaactcttattattacttacctttctgaccgtgctaagtgactgcatagtaggttaataagttacatctataattttatctttgaacatagaggctattttattttcctctgagagaaattgtattttttgatcttcaaatatttttaatggacaaaaacttggattttttgaatgtaagtttcaaatggcattaatcaaatgttattaattaatacattagtcaactggcattaatgaatttattaatagcattaatgatcatgtaaaatattttctaccctgcagggaagaaaaataaaaccaatctctggagaacattttcttttttcaaattttaaagtttatttttagattatatattttcatttttctcatcctagctgtaaagatgtaatttttagtgtttaagagatcagtaaggtggatttgtgggtaaatgcaacatcttgtgtaacttgggagctcctggcctcacttcctttctttgatgtaaaattgctttcctgtagtggtctgcctttgaaggagaatgtagaaatttaaaagagtaacatacttttgaaagagtaacataaccacttgtggaatgaaggtaaattaggaatgtggttcttttgggaagagtctagtcaggaaagctttgtggggaaggcttattcagacttaattgaatcttcaaataagtctgaataaactgaggctgattggtagaagtaatgaaaagatacctgagtcaggcagaagagcataggcggccagcttgcctagagcagatcatttatactagaaaattttgcgctgtgtgaaatggaatat

SEQ ID NO: 73033 - DNA, 1050 bp, Homo sapiens
ttgcccaagctggagtacagtggcgtgatctcagctcactgcaacgtccacctcccaggctcgagctatcctcctccctcagcctcccgagtagttgggaccacagatgtgcaccgccatacccagctaattttttgtagttttggtggagatgggatttcaccatgttgcccaggctgatctcaaactcctgggctcaagtgattcgtccacctcagcctcccgaagtgctgggattacaggcgtgaaccactgcaccctgccagaaaatattttcttaacattaatttcccaaatgtttatgttgctttattaagagcttataaaagctctgccttgttttaattaatgtgtatattaatacttctcagaattttagctatagtctaaatgttaattttagtatgaataattaatgttcaaaaacccctttatagattgtaacttgtaattgtatttcattctctaaaattcttatactttacttgtttattctgataaaaatataattttagcaactttagtttttgatctttagttcttcggacatcaaccccaagttcattgctaaatagtgtttatttgtgaatctggaattttgtttggcatatgtttcaatttgcctttcctgagcatatcttaatattaatgggctttattttcacttatccaaactatttgtcttcttactacctgaagttatggatgacccgacagttcacccctgtgaaccagctaatcagtcctctgattatgacagcacagaaacagatgaatctaaggaggaagctaaagatgatggtgccaaagaatcaataactggtgaggaaactgggaaaaaattattttggaattaaataaaatgtcattttgcttttagttttcaaaaggctgatcagtttgaaaaaaactatttgtatttttatttttgaaaaggctttttggaagttaaagcttagataaatattcatgaataataaaacaataaagataacacctagactattgtccagtactctcacatccctctcttatcatgtaatctagaga

SEQ ID NO: 73034 - DNA, 1118 bp, Homo sapiens
gctgtggcatgatgaagacctttcattccccatgtttatggccgatttttccacaggactagtagtagtgagtacattttaaattttacatgtttgaaacatctcttgttaactatgaaaaaaattagatagtaggtttattaatatgttgttgctaaatttattccagctttcatatgaagctaaataagtaaaacgtaaacttaataagtaaaagaaagggtagttgataaagttactttaaatttaaaaacctgtttttatcttattctcaaaaaattttaaaaaatgtttgcaatcattaaatttttgcttttactttcactacatataaacttgggcaaatttcttaacctctttttggttttctcatctctaatatgaggataataatctacctacttcattgggttgctgcgaaggttgaaaagttactataagtaaagtgcctagaatagtgtctggtagatagtgctgcctgagtgttcactgtcatctttattgttgttatttttattgctactactgctgctgctgctgtcactaattacattaacggtgagagaatatttcattgtacttgagactcttaaaaactttgaaatcagacctcatggacctcacatgttcagcataccacccaatgcaggcatgttctaggacccttgaagcagatggccacaagccttaggaccactcactttcaatacatcccactcttatggtcagctctaattgttagaaagtcattctttatattgggctttctattttctcccctaaatttctacccatgattacagtaattattaggttttatgaatgatagtttgacagtaacaactactggcctttatgtagtgtttatggttagtttaaggagcaatttcatatacatttgactgtatcaaagaggactctgactctggagctatttctcctcttccttctcctcctcctcctcccttcctcctcctcctccttcttcttctttttcctcttcctcttcttcttcttcttcttttctttcttctttcttcttcttcttccttctttcttctttcttcttcttgttcttcatgtggcagccctttaatgataccaaaaacagctttggt

SEQ ID NO: 73035 - DNA, 1041 bp, Homo sapiens
accttaatacatctcttaatattttaaattaagtatcattatctatgatttgagaatatggaactgataactccatgacattttgggtaattccgcctttattgtaaattccttatagacttaataccatctttgctataacaaaggaagtaaaatgtatttgttatagaattattgggatggtaaatgagaaagtgtcacaaagccattcctatttaggtcctcctctccttaattctttatgataacatatagatccttggaagtgtcaaaagccttgtactcacaaatgtcattgtttttaattttcattaatgagaagagtaggcactgaaataaggcactgaaaaccttgcttttaaaagtaagatatttgatatcaggcctggatggactggttctttctgtgttttttcttaacatgcgatcccatatgtgtttgcttttctttccaggtttaagagcaggactggctgcctcaattgctgggagttcgattatcaacaaaatgttactggcaaacattgatccttttggtgccacgccgtttattgacccggatctagattccgtgtaagaaaatgcttttgcaaatattttgtttgggtttttcttgttttttttttttttcaacatgaactgtaacattttaaatgtattacaataaatatggtcccatgtaaaaaaaggatgatcagaaaattacaaaagttgataatgccaagcacattgagtcttttaaaattcagtggtctccgtgatctgtccctgagataggtccttttccagcccgttctctctgagagcaaccctctggcaaaggaaggcaccaataaatagaactgatgctattccctttacctcctttcttctcagtcttgccagatctgtcatctttccacgtcagcttctaggtttacttattttgggaatcttttggcccacactgatctcttcccttcttaagactcctacaattttttggcatttcaagatatactttcttttacttcctttttaaattttgcttttgttatatca

SEQ ID NO: 73036 - DNA, 1379 bp, Homo sapiens
gagttgtaggcacctttggcattctggtgaaaataaagaccccttctcagaatattgttttcaaatgcattatatgaaatacagacttacaaaagaagacttaccaataagattaaaataaattaacaacatatttttatgttgctaaagaataatatatgtgtttcatcgttaccgtatcaaataaaaatctaatggcatgtctaataaataccataacttcaaagtgatgatgaacttatatacaagatatctgaaacatctataacgtaatataaaaatgtctcatttcgattgatgatgaaatcacgggtgttactaatgccttttttcccctacatttataattgagggcgatgctaaacttcagaggttagtgaacataaagatacagatttttaccatgaagttaacaagtcacctgaatctatccatggactcctggtttctgaaccttaagttaagaacacttgatatagatgtatatgttaaatgataagggaaaataaaatgagtaaaacaagataaatgaaaacatgttaatatacataaaaataaagtagaaaaagtagagcactctttgccatcattaacaaaaaatagtaacaataaagtaaaccaaaaagatacattctacttctaaagacgatggaaggccgttgtctaaaaattcatttttctgatgatggttcactcgggataaaggtggaaaagagagacccacaccttgggaggctctttccagagagacgccttcaccaatggccttcctttttagctttttactcttacctttttcctcagataagttttccctccccgttatgttgttggtatggaacgaggctgacttcatgtcttaactttaaatttgtgcagaacaaagactttgaccttggtttccctatatacgaaattgataaaataatgattttatgcaaatcataaataaatgagcccaaggtactgtaaatcacagtgtgaatgggaaagaactgtacaaatgcaaactttgtttcccaagccacattatcagtgattctgatatatactcaactttcagaaacttggagtgagatttagaatcctttttacaatgatgggaattccagaaatgtaaataacgtcacagtatcatattttgctacttttagagtagaaacacctttcacatgtaaatggaagaattgtattaaaattccaaacattttttgtaagaaggatgacttttttgcccataatatacgtaatttacatgggttaaggagactgttctatttattaactgaaataataattatatattgtttcaagttctgtaagtactaagatacatgaagaaaaacaaataactttaaaaaacagtcttcatctgtagg

SEQ ID NO: 73037 - DNA, 1299 bp, Homo sapiens
tagctcactgcaaccttaaactcctgggctcaagcaatcctcctacctcagcccagctaattaaaaaaaaaatcttttttgtagagatgaggtctcactatgttgcctagactggcctcaggtgattgtcccgccttgacctaaatctcttttttaacttttaaatgatgtattcatgatcattgactgcactacttttcatgtgttgcagtacattggaaaactttgaaatgtcttttttatacttgtgatttatttgaggagtcattagagaaaaagcaattgtagttttattaaagcacacatttacatggacctctgagttctaaactaacaattcgttacaatattgactttaaataggcctttgagagcactctgaaatcttgggaagataagcagaagtgtgattctggtaaaccagttctccgaacccatttgtacatccatcacgccattgacttggcaacagaagaggtgtcgcagatgcagctatgctcccaggctgcagaggagctcattactaggtagggggctctgctgacttttcaggctgtgggaactgtggtctcagccaatttttgtttttttaatcttaatacattgtttcagtagtggtatcaaaaagagatgcaattactcttcttcacacagcactctttccattattgtttatttctccattttatatacatctttacactatactacctacttatatgttgccttctaattactaattaaatgtttatggaatggagagggaagtctaaacattcatcctgttccagagaagagtcaggagcaaaaagaataaaaagacttcaaaaaccaatttctgacaagttattagagagattttgagaccacacataacattaattccaatagacaaaaagaaaagagataaaaagcaagcctatgagtgttaaacaaataaaaatcactatgaccagggaaaacttcagaggggaggagggaccatgggccagtgtcttacctcctcacctgagtcttatctaccgaatggggctaataagagctgtttcaatagggtgtgtgaagattaaatgagactctagggatgagtcctataagcacattgtattagtccattttcatatggctatgaagaaatacctgagaccgggtaatttataaagaaaaacaggtttcaggccaggcacagtggctcatgcctgtaatcccaacactttgggaggctgaggcaggtggatcagttgaggtcaggagttcgagaccagcctggccaacatggtgaaaccccgtctctactaa

SEQ ID NO: 73038 - DNA, 1787 bp, Homo sapiens
tatggtaatgctcttccctaatctgttgcatttgcagtttcaatgaatgaaagagaagtttctagtctttatacttgtgatccctctcactttccaaggatactgaaaaatgaagtattactatatttcattcttcaaaatagcacttcaatatgtctccctctgatttttaagcctaattttttatacaaagattttttatttcatattttttgttgcagtggggtctggatttatagatctacctgtgccattcataattgagcagccattaaaagtgttcttccatactgatcttcatatattttttacttgttttatcctaacatttctatacttcaaaaaaaatgagcaatactcaaaaaagttttttattcatttgtttcatttttgcttttaggatatgtgacgcagccacaattcactgtcttttggagcaagaactggcccatgctgtgaatgcctgctcccatgccctgaataaagccaacccaaggtgcccggaggtgaggatctaatggtaaattctcattccacagattcttttgggtgttacacatgtattttaatactgtaaaatatgccacgccctgtgacagaaagttatgttgtctatatgagtctctacaaacctgcagtaaaatcgtggacaactttttattttccttttcctgttattttttcattcctgctcttaaattctctcattttttatgtttcactttcaatcacttgtcaccttccatctgtcttcacttctttcttttttgaactttaatcgtcctttcttactccttcttttaccttaccttctgccctgtaccttgttaaagggcaatcctagatatcatcagcgtgcattttgttagagatgtccactcgtttttgaagttatgcactgaaattattcctacttcattttgttttgctaaatcggaaattgatgcttctgtaaaatttttaatgtataagttaataatagaatggatagaatataactcttaaaatgtgccacatggtacaatgctatagtatggagaaaactgatagcgtttttttttttaattatttgattgaagttacttaaattaatatacagttaagtgcttgttctcaagataatagtctaaaaagcaatatggttagtgttactgagagtaaaagttttttttgacttaactttttaatgggaatatgtatatgctggtgctagcatatacatattcattaggtaggagatgtgatcctgagtgtattcactgtaatcggtgcattctttttgttctgtaatataataataatgagatagtcatacaaacaaatgtatgaaactttgcgattatagaattttggtagattaaaaatgtgtgctgtgaatttaaattataagaataaaatttaaagtgtttatggtaatgaaatcctattttaatacagatcacatgtctttgatattcttcttttctagagtcttacaagagacactgccactgaaatagccatcaatgtgaaggcgctgtataatgaaacagaatctttgctagttggcagggttcctttggtaaggaaaagaatgactggtaacataagaatgatgaattaaatgtctgggtcttaccttcattggggaacaggcatttggcagattctaaggcagaagcagccttctggcttccatcctgagagctgcctcttcacctggtttttgtcttcaagaaaatatatggctgaagttgggagtcatgattcaggctaacaggagtggagatttcccctcatatatgcca

SEQ ID NO: 73039 - DNA, 1048 bp, Homo sapiens
acagtaatattatctctgaacttttagttctaaaattctataaacatatttatgagaactctataattttaaagtaatttataaatatattgattagctagaagagacctcaaaaataatctagtcggccaggctcagtggctcacgcctgtaattccggcactttgggaggctgaggcaggcagctcattgtagaccaggagtttgagaccagcctggacaacatggtgaaaccccatctctactaaaaatacaaaaattagccaggcctggtggcatgcgcctgtaaacccagctactttggtggctgaggcacgagaattgcttgaacccagaaggccaaggttacagtgagctgagattgcgccattgcacttccagcctgggcaacagaacaagactctgtctcaaatcatcatcatcatcatcatcatcaccttgtgctatttccagaggaagaaataaagtctcctgaagtcaattaaccttcctttggttacttagttaattacaaggccaggagtagaatccaatcgactgccttccagttctgtgcagaggaatgtttatttaatctttattcatttattgaacttgtaagtgcattttaatacctgctttcaatgagttaatgcagataataggtgagcagttaaattctccttaaaatatccaaacccagtttcagatgataagccattgagctttttgctttgccctaatttttacaacagtttttcatcacagatttttctaagattcatgattttttacccttaagcctattctttaaattttcaaggagatttttctgcagttctttttatatgacaagtttttaaccagtttaaaaagtattatttgttcatgtggtgacttttttttttttttttttttttgagtcagagtttctggctctggcacccaggctggagtgcagtggcgctatctctgctcactgcaatctccacttcccaggctcaagcaattctcttgcctcagcctcccaaggagctgggattacaggcgcccaacaccatgcctaact

SEQ ID NO: 73040 - DNA, 1042 bp, Homo sapiens
taccccatatcagattttaaattgtaattagcatttgtagctcatttcagtctatagccgttttcatacagggtctgaaggaaatcatcagagcttatttagagcttgcaccattgatcctaatgatgtgaaatacattttgtatgcatattgtgtaggttgggtggctttaatgaggaaactggactaaagctaagcatgggtgcacggcagcaaatggttttgtatagtcggatccttgtgttgatagtgtgtaacttgcatgggaaaaagtggaactatggttttgttgaaacaacacctttaaccttttcttttgctagcactgccgctgcactctgttttgcatcttctttggccaacctttgctttgtaatgcattgagcatgtagaaattaagggggttttgctcttaactttggtagttcagaaatggggcacagaggaagttgctgcttggctggatctgctcaatttgggagagtacaaagatatcttcatccgtcatgacatcagaggggctgaacttttgcatctggaaaggcgagatcttaaggtatttcctttgtgctcttctgttcttgaaaattttattgcaaaacagaatcctttctcctgtgcctcttctgatacttgcttttagcttcgcttatgtcatgcaaatgtgtagtaacctaacattcactgtcctgtggtctgagtttcttgtatgctttttaacaagaatgtcagcagtattttcctgtcagaatcactctattatagctaaagcttagcatgaacttagtaatttttctctgcatctagtgatatgactgttgctgtgctagtatttccaaatggatcatgtttccatcagctcattttattgcatcagcatggaaggtgataatttggctgaaaatgactaaaatctaatatatggttaacaactaaaaattaatgcaaaataccaataacaaagcctttctaacatatggaatgagaagagagacttacagcaatggctacttagaatcttacaatttgttgtatttctaag

SEQ ID NO: 73041 - DNA, 1042 bp, Homo sapiens
gaaattcaaatttcctttctatgacatattattaaaattctattattctcaaaaagaattttttttctttagtaaacgaggtaaaaattttgcctagcttttgctagaaaacagctcagagcctatttgtgaattgacgatagagaaaaccattccttcatcacctgaggcatttcccttttattctgtgggtgaagtctcagtagtagtagaaacagctgaagtaggctctctggccaaggtttaggagtaggattttgtcacgttgtattttcttaccacatattgccattttaaatttccaataagtagtaacgtttgttggagtgatccctttcatgtagaccaagttctaaaatgcattaaattttatcataatacagagaattcctaacaaattaatgaactgttgttgcacctttatctacaaatacattagcaaagatctttgaatagataattggtagtataaagatctttattaaacagattcacaaagagttttagcacatcaaaagatgacaccacttatacctaaacaactttagccataataaaataaaataattaattaattaccttagttgagagtcctaaatctggaacatagcaaaatatgtagtattagagttcataaagcaaaagttggcttccaagcttgaaatgagtccacaaaaaagtaaatgtaggggggatcatgatatccaacatgtttttgtaacttctgatatccttggcagataccaatatttattaatgactgattaatatattatgctagcttctctgcatgatacctgtcctctagaagcatgcaccgcatttgctgtgaataagcatacattcagggaaaagactgtgtgtgtatgtataaaaaatatacatacataaatgcatatatgtgtacgtgttatatatatacatacaaacatagatatatacaggtacacacacaatgaatgtagcagaatgaatgtgtagaatggaaaaacatacactaaggcaaagttagaaaagaatagaaagaagatggttaagaatt

SEQ ID NO: 73042 - DNA, 1234 bp, Homo sapiens
ttcctaggtttcattacgggggggcattggccattttcttaaaatcataggttaggagactaaaatataaattaagttgtgatttgaatgtagattggtatcacctccaactcctagtgcttagtggtcaaatatgttgaaaacctttccaatactatgaatgaatgcaaatcttaatgcacgatgttcctgcctgaaatgtctttctttttcttgcatgtcacatctaatactgtaacactttaaatagctttcatgtcagttttaatgttaatgggatttaatttattactaaagtacatttttgttggttaagggcactgcacttttctgttttttaatgtgggattttgcgtaaatattctgtacctaagactttgtgaaagtgtgtctgtgccataatcaacaaatgatatacatcacatgcaagtcaattttatttcaatctatcataagcagtaggcgtgcacgttaagaaaattctctggatattttcataaaattacatgctcccttacctgacaaaacttgttacagctttccaaaccaaaatttccacattttgtttctaatttttaatttcaatttaataattatttaatattctatttgaatttataatatagtaaagtgttgatatccaggaattccctgaggtgtcaactgagatttatatactgacagataacccagactcacccgctctctacagtgacttctgacacgatcttccaaacagaagggatttaaattttttcttaagggctttatgttgttattattattatctcacttaattcttaattcttatcaggtggatattattttcctttttctaaaccactgtacttcagtgtagcttattattagaagtcaacattacaatgatcaaatctttgaaagccaaaggcatacgtatcaaaaagtcacaaaaatatccttaaataagctttctttagccattatataccaaaacattaattataatattttaaaatttgtatataagagaaataaacagggtactgactcagtggtgacaatttttatgaagtagcctgctaggtgcttaatagatatatatacacacagatatatacatatacacatatatgtgtatatatacatacatacacatatacatttatatgtgtatatatatacctacatacatataaccttgtgatatggcatcattgatattttctagacaattatttccccagtgtttaaa

SEQ ID NO: 73043 - DNA, 1050 bp, Homo sapiens
tgttcttgctgacaagaaatgacccatgaatgtctagatctatcctgtccaatattgtagctacatgtggctatctaaatttaaatgtaatttaattaagccaggcataatggcacaagcctgtaattccggtgactcaggaggcttaggagggaagatggcttcaggccaggagtttgagaccagcctcggcaacatagtgagaccctgtctctgaaaaaaaatttttttaactagctaggcatggtggcatgcgcctgtagtcccagctattctgaaggctgaggtgggaggattgcttgagaccaggagttcaaggctgcagtgagccatgatcatgctactgccctccagcctgggcagcagagcaagacccctactctttaaaaaaattaatttaattagaaactccatttctcagttgcactaactacatttcaagtgttcagtaaccatagtggacagtgcagatgtagaaaatttccatcactgcaaaaattctattggacagcactggtgcagatcattgctactcaaaatgtgatccatgggccagcagcatcaatattacctgggagcttacagaaatgcagaatttcaggcccactgcagatctaccgaatcaaaatcttcctttagcaaaatttctcaaacgattagcactggcctacatccattttatccttccttagctattagggatgtgaggtccgagggcttcaaaaggtccccggaatagcttgttccttcatccactgtgtcctattcattcttcagctaactccagcaatgagctgaaactcattcatcacccttgctgagttttcttctcaatccttattcctaattctggttctagatgagccctacctacccagtggttgtatttttgtagccagtgtgggacacaggagattggcagaccaacacagctagcctctctctagccctccctccacctctaagtcactaacaatccatgtttgttcagtttgttgacatgtggcatgttcatttgttcacaacttaatcacgggggacatttcagaa

SEQ ID NO: 73044 - DNA, 1006 bp, Homo sapiens
agtggcagttttaaaacaccaaattctttagatcagctgaaaagaagagtgagaattgaaaattcctccactagtaattgttagccaatagaatagcctcccagagcagtccccacagcacttggttgccatgggtttctctcctctcactgcctgccccagtgccatgatgtctggggcttgtctcttctatggcatcccctgattgacttttgtatagcaacctctgtgtcaagtcagtaatatgatgccattgtaataggaggccttcctaaagaagtaactgcaacttttaaaacgtgatgattattggtttttataatacacaaagcattaattttttcttatcttattttctctttattatttctttccaacttttgtttggagacatttatgttagaagaaaaactataaagttttatcattgtagagaacagagagatcaaagacagctggactgtacctgtttgtgtaattatttctgatatttttaggaaaagaagtttaacagagtaactcagactgagactgttaaactctgttcatgataaactccatattacataatataggtgaacagattaattccctccatgtaactaagatactctatttacattatttatatactctcttagttttttatgcacttccaagttttagttggaaaaatgaaaaccaagctactacttaaaagttattaaaaacttcacataaaatatttcattttagctacaagttattcattgcataggattttataaatagtctgggtatttcataggaactgcatttcaaaagtgaattaaccaaacctaaaaaaagggttacttttaaaatgcattaaaataaagaagtttcatattcagttgataaggccattaaggtaggataatgcagttacatatacaaactaaaaaaggaaaaagaatatattttgtggtccttaatgtttgattgcactattgtttcccacagcttagccgtatctatttctgtatac

SEQ ID NO: 73045 - DNA, 1883 bp, Homo sapiens
aaagtcagtaacagacagtattacttgtaatcatcaaaagaaggtttccacaagttgtataaatcagtgcatttatttattatgttgtgaaacttaagctttatatgaaatacatattctagctcttttcctttttactgctgttgtttagagtgtgtagttctgttgatgatttacttatgtacttgaagtactcatttctgtcaaacagatgcccaactattttccttttaaaaaactgtattctttactgcaatagatagcggaatagtaatagacactttgttaaaaaaataagtttcatgtttaaaataaatatttttttaaaatataaagccaaaatgaattcaccaatattaaggatttaatgtagccaagggattcagtgtgttatattttgccaatatgtattttatcttcatgtcacaacttattttctgtagccaattctcagttttagttgaagagagatctcagtgattgtactgccaatatgacattcaaatgaacattaggaatcttgaaccatggctgagcgctgttgctcaggcctgtaatcccagcactttggaaagccgagggaggtagatcacctgaggtcaggagtttgagaccagcctggccaacttaatacaaaaattagccaggtgtggtggtgggtgcctgtaatcccagctactcaggaggctgaggcaggagaattgcttgaacccaggaggtggaggttgcagtgagccaagatctcgccactgcactccagcctgggcgacagagcgagactctgtctcagggggaaaaaaaagaattttgaaccccccaaaatatcacatatctagcagttctaggttccagggtggatatttttaacatatgtttgcatttggttctgggatagtaaccgttatggataattgtttgtttctgtcaagtcggtgagattttaattgtttgaattatttctatttaaaattactctcaatttaactgtttaaaaaactaaaaatttaaaacataatggcacaacatacgacacagaataaaacacatgttttcaaggaagaagaaaaaactgttttgacttaatgtgaagcaggggtttaccaaagaaaattgctttaataagccctaactttaactgttttcttctatgttacagtgttagcggttgatgtattgtgtactgtttaagaactcataggagactaataattaatttactataattttaaaggcaaagagttttatattaattttactgttgcacaagcagttattggaagtgggggaaaaaaagaaaactggtgagagaaattacatggaaattataggaaaaaggaacttgaattggtaatttggcaaagatttgggaacaaatagtttgaacatagatttctttcaccttatatgatagaaacacaaggcacacgtgagctgtatagtgtgctgagcacacccccagaaaacaaaaaatatcacattgatgaagtccgagactgtatctagatcttagcataactagtgaattcagggagcacatcctgctgctgaaattgagaagtcagtaagaaggtagttcagatgacctaatcattcaagacatttgatggagtccacacaagggtttatgatgtggggcaaatatctgtgctttctcatctcagtgattgatgtctggagaactagtcagacacacttagctggttcctatagaaaaacaccagtaaatgtggatcagaccataccctgcagaccaaggagattttcttaaacttgctaagcctttcttaaacttgccaagtattagcaatgataattgctaaatggattttttcctttcactgaaacaacaaaacaattattgaaattcacaatacctagagatg

SEQ ID NO: 73046 - DNA, 1156 bp, Homo sapiens
tttttggtttttttccagcaactagtttttctactttcactctttcccaccagagtggtctctctaaaacaaatttgctaaagttcttaagtaggctcttttttctctaaattacagaatagcaaactaactcctaagcaagatgagtcagtgtctatgaccttgcctctttcttcctttttagtatcctcaccaaccttccctctgttgacttttgtaatccaggaatttggaactacttatgacttagtgccttggcataatcacatgccatagatgaacatgttcaagactcagttcaaatttaactttctgtgaagccctacctgacttccctaggcaggtattttctccatgcctatagtatattgaaactttttctgttaaaataacataacatttcaattacacacacacaacctgtctcttccactgaacttctctctccccctttgtattctcagtgtctagctacacataataggactttgataaatatttttgaatgaaggtaatagaaaacccgaacttctctatatttgtgtactttcacaaacaaaggcttagaattccacatgaaagtccacatgaggtaagtgtgcattcatgagcatgtgtgcactctgggcaaaccaacagaagataaacagcaaggaagagcagttgttttgtgaaaaataatcatctgttagctgtaaatcagaaatattggccaaatcagaattcttgtttctaaaatgaggcttctaaaattttcacataactgccaaactcttatttgtaattcttaaatatgccctaaagatcatctttctcttttatagacatttagtgtatacagtccacataaatacatatactgattacctacagacaataatgagacttcagaaagaatcaaaagcaatagtgatggtggaatttttaaataatattcagctggggggaaatagactgagtttgtgtgatttcaggttatttagagttattaatgtaaacataagaaggcttgtgactcttatcaccctctatagaatataaagactaaaaataaaaactattacctctgggcctgtttttctttgggattagataaagcctttctaccatatcaccaaatactcataaaggctaacacagaaagcttttccaagtt

SEQ ID NO: 73047 - DNA, 1087 bp, Homo sapiens
ataatttggtttgcatttatagtaatgattccttaaagttcacctcccccaaaaaaccactcgttaaaagtccagtgcatgacaagtgttgtctctagtggtaatgatctgtgaatagccctttaaaatcactgtctggtgaggaagaaagagtgttgtaacacagagtgttatgtgcagtgataaaaaatatgccaccaagtttaggggaggacaaaggaagggcagagatagagaaagttcaggggcaccttcctggataggggacattaagtcgaatcttacatcagttagccaggtgaagtatgtgtgtgagaaaggcagagaggacagtgcaagcaaagataggcaagcagcatggagggtaaaacatgctgttgctgaaacataagggagagatagaaggtggaactggagtaggcaaggtcagaactaagcaatccggtttgagccctggccaaatccgtgacttctgttggtgggattgacgtgaagagagcagaggacaaggagatcggttagaggttatgaaagaagtttgagtgagaaatagcaagggacttccttagtgcagttttagtggaaatggaaaggagggaacagatctcagaaatactcaggtgtaaatggactgtacttgagattggctgtggatggatgaggggagagaagaaacataacaaatcccaggtttctgataactgaagagggaagcatgaaattcaagttcagactcagccatcatggtttcaaggtgactgtctatgggatacatcatgttggagagaggtacgggagggaaatacagatctgagagtcattgccatatgggctgaaacctttggagaagatgaagttatccagaaagatccttaggaacttagaaaaggagccccacagaactgggattcagacctctgagaagggggcgctctcccgatggtggttctaggaatgccagaggaagaagccggagaatgaatgaagccacctgcctctgccagggtgagaaccagtgcccctgagacactggcagcaacagtgagcaaaacagaaagggcaagtcctcttttcttctgcaggaaag

SEQ ID NO: 73048 - DNA, 2857 bp, Homo sapiens
aatttggacaatatattaaaggccgttttaagagaaaatgccagttgtaaataggtagaggaattctgtctatacgtgacaaaaatgtgaaagacttagaaaatatctctttgtgaatgggcagaggagaccagtgttgattagaaaaaattccttcttactccatcttagcaaactaattttcagaagtagaaaaataaattttttggctggtcttcataaccttttggcaagggtttcaaacttgtagggcgtgtggtgtttggtttttcaaaagtaattgaagtaactttggatagggtaactgattttgttttttttcctgtcttgtggtctgcattttattaatcaactacctggaaggattgaagggtgaggacaggtcgagaaaagctttaagttaagcctgggcatgagttaagggtcaatgagctggtaatatggggaagagaaagaaaaatgctttatcagtttaaaaacagcctggaaagatccaagtgtctcgattctcccagtcatccttacatataaaagtttattaaaaaaatacttctgggccaggcttggtgccttacacttgtaatcccaggactttaggaggctgaggcgggtggatcacttgagaccaggagttcaagaccagcctggccaacatggaaaaaccctgtctttactaaaaaataaaaaattagccacgtgttatggcacatgcctgtaatcccatctagtcgagaggctgaggcacaagaatcgcttgagcctgagagatgggagattgcagtgagccgagatcgtgccactgcactccaccctgggcgactgagtgagactctgcctcaaaaaacaacaacaaaaaacttctggagtaaaggcatttgaaatttgtagattagagactggacatggtaaaaggagaaaagttatcatttttagaataatctgagaatgtttcttgggaaataaatggggtagaggcctggaacagagaggatgttacttgactgaaaatgaggtatattgtaaagagtttcggtttgggagtcaggtctattaattaaatgagcctcattttcttcatacccacctcaaaaagttagtgcgaagcacatagtagctgcttactcagtgtttttatttttacctcccgtaatggtttgaggattctttgattgcaaggaagaaaaagccaatttaattagcctacttaaaaaaaaagcatttgtcatacagtgctgctgaagtccattgcatgattccaattcagcgttttgggaaccagaaagtcttcaggcagttactcttccagtttttctctggaagcacatggtcttatgtctctgctactcacgcaggtctgttccagtttctttcagattggccttctctttaaagctcttggtttccacttccccaaaactttgatttgcatgagactttggtttgccatgatgccaacatcagactcactgactatgcaacatggttctcagcaaacatctccaagtctcagttatgtttctagagagagaatccaattggtcaggtttctgcttctagcacagttggctggagagtgaggaaagataggaatgggaaaaatggatgaggaagagacttagatttgtctcacagtttgcagggctgctccttttaaactggccatgccaacatatttaacaaaaggagagtggacagggaggaagtgatggatacctcaggtgtgctttaacatcctgcaatttgagttcttcctctggcattgcattgaacttgctctcagcttggtaatgttctaaccagatctaaccagtagtctctttacaggacagattctcctgggtgtgggagttcaggcaaattactgaaatgcttgatgactcagttttcctatgcgtagaatgggcataatagcaccttctgtggtgagaattatgaattcatgtatgtaaagcaattaaacagtgtctggcatatggcaggcacaatgcaagggtacggtattagtatttgttgagagcataccgtgtggcaggtactgtgatacaggcttctggtcgtgttcagagaggaaggaatttctgccctcaagaagtctagaagtccagtgctgaccactcatgcttaaaaccatttcttgacttcagtgacactaaattcttctaaatctctacctcacctacctttctgactgccatttatttgtggttccttttatgccggtcctggaaccctttatcatggttgtcttcatagatgctctcttgaatttctgttctttcccagtcgctgagaccagctttcaggttctctatatgtggattattcttagagtaacatctccatctctgaccccaagtaaatctcttaatttttagttctttttttgggtattattatttatataatttatatgttttgagacatggtcttgctctgtcacccaggctagggtgcagtggcgcaatcttggctcactgcaacctcctcctcccagggctcaagcgattctcccttctcagcttcccgagtagctggaaccacaggtgtgtgctaccacgcctagctaatttttatatttttttagaggtggggtttcaccgtgttggccaggctggtctcaaactcctgggctcaagccgtccacctgccttggcctcccaatgtgctgggattacaggtatgcgcccactgtacctagcctcttggatattcctatgttgatataaaatactgtcttccagttaccttctaatttgcaaagccttctgatttaccttctgatttgcaaagaaaaaaattttctttcagcatcccaggcttaaaaccttaaagttatttttcacattcttcttttttt

SEQ ID NO: 73049 - DNA, 1114 bp, Homo sapiens
agatgtcactgataaaaagaaatgtgttcctgggttaaaattctgaacatattttctgttagaaatagtcttgtggatagggctacgtacaagattaagaatgttactccattttctagggagcatattcatgttgaaagcacaatctcaagattttagttttttgttgttgcatttttttgtaggtattcaattacatagcattttaattatagcatatcatccttataatattgccatacacatatacaaagttttattataaatcagttgttgaaaatatttttgaaagtcaaatatattacagatgcacactcaatagtgaaactaagataatcatttgagggcatatatcctttacagtgatttcttaaaactgtattcaaatgtaggtctaatgagttttttattatgaaaatgttaactgttttatcctcctgccttcatctgattattctaattaacttctaacaatggaccgttgcatgtttaaaagttgtgtttattgttgctgaataagtagttttgaagtcagtagccattcacacttagtactttgtcaactagacccatgttattcctttcaataccagtggctagttgggctcaaacataccttataagtagatctcaatctggaatgcagttgaaaaatcaataatttttctctgtgactgtttgggaaaacaaaagtgacagaacaaatattcttggattaattttgtaaaaagtcattaggtaagtggccctattttctatttggtgatgttgcttttgccaccaaatgcctgtctgcattcacgtcattgatgaaatttctcttcaccgtacagctcgttcacttcagtaaatctatagttgcttattatgagtaaggcctttggggaatgcagagatgagtaaggcatggcgatggaatgaaattcactgttgtatcccaatcactgttacttagacgcttggtgaatgtatgtgttgaacgttggtagtacttacagtccagtgcagggcatagacatgtagacatttaactgttacataaggcactgtagtctaaagtgctaaaatagggtaagtggtgattttgctccccaaggaaatgtttggtaatatt

SEQ ID NO: 73050 - DNA, 1795 bp, Homo sapiens
taattcactaatttatttgtaatgctctggactcatggatttttgcagttctatattttataaccttttatttctttacagtcattaattcatctatgtaagttgctcaaatttttccaaaattgatacctgagagcccctccaagtaggtacctatatccttttgtctcaggctcataactttgattgctttttcactttcgggttgtatccttttggtacaggatgacctaatttcacctactttaccttcctcagacctgaaattggctattttttttttaaagaaccctgaatagtatttaaaacccaagatctggatactaggagttgcctttgcacttaccatgtcatgagtttatattgacagttcacgttcagatttcacatattttttcctgttttgatttcctgtttctaaattagtgtgaaaatccccgtttattaaggaaaacaaaattgtttaaaatattgaatattttcaagcccacagaaaagttgagaaaaaaacctagtacaatgagcacctcatatagtcttcactcagattcaccctcggttagcatcatacctttaagtatgtcagtatcattaccacctctttgaaaatcattaattcagtaacatcatctagcatgcattccaaacacagatttccctgtgtctcaagtatccttgtaactttttccttgcttctcttctaggatccacactgtatttggtcaaggttcacacactgtatttggggattgtatctctttggtcttccccattctagaccattccaatagtctaaattcttttctcatgcagcaaatcttctgaagagtctaggccagttgtgttgtagaatatttttatatttgggttcatttgtttttccctgtaattagattcaacacaacacctgaaaggtgatgttgtgttcattccggtctatcagatctgaagtccatattgttgatgttaggcttgactaggtggttaaggtaataaccaccagatatctccaatataaatgcacataatctctttatgattaatacacttaataaactataaggtgatcctctgagacagtatgagtgtccttttccccagcttttaacccagtagatttaggatacatggataatcctttcctaaatcagtaattgcattgggagtttacaaatggggttttctaactttgtcattctgtccatactagccagcatttttaggtaaaggagctcctctgactttgtctcttttaatggactcacagattttttttaatccagtagtcataattcattaccattttcattcttcttgattccacattgtcccatatttggccagtgggaattctttcaagctggcttctgtgttttttgaaattaccctattagtctttgagcatttccttgcattctggcacagttagatgttccaggctcgcttcatacattctcagcctcagacctggaaccagccatttccccagggaaatctagttctttttattggtgatagatatttacagaccaaaagctgggtgctgactatgctcattgccactgaaggtcattgtttctaagacttttcagtggaaaaaaggtagtacatgtattcaaagaattacgaatttgtaatgacaggtcagattcaaatgtaacagtacagctttttatcataaattctttgagtttatatttgtacctcttagactaaagatttccatttattttaatttattaagattgcagctgtttgagttaatctagtgtgaggttctgaaatatggggaaac

SEQ ID NO: 73051 - DNA, 4368 bp, Homo sapiens
aattttagtatattttatttttgaatttttgaaaaattatctgtgaataataaactgtatatgttaactattatgaaccaggaaattcactagccagtagaccttaaaatttttggatagggtccacattataggaaccttaacaaaagtgttactctacagtgttacttattgttattattttaaatcaggatttagctgcagtttctttggaacttccagatattctgaattcactccacttctgcagtctaaatgaaaatgaaattatttgtatgaagaatataaataaaccattagatataagcagtgatcctctaaatcaggtaacttttgtagataatttctaatgagatttttagggcaaattttactatatttgataaagatgattaaacttttaaatgcttggatgacatttgttttttttaaatggtatctcaaggaaatatgattcataagaaatataactcatgaagcattgacatccctgaaggatataataattttggtcatatcttataaattatattttttaactgtgaagttccgtagatggtatgcaagtacatgttaattttttctgaaaatttattatttctggatttcttgaactacttttacctttgtataagctacagtgacttttccctattatggccaatttcaaatttatataaatgttacgctatatgttttagagaatgtacttcagttcattttctggtttaaaaaaattccatgtaaagtggacatctgatgtgttctttataaataaaaatgttaccatttcttacaggtggttagttttataatattcagcatttagttctttaccaagtatgattttgttgataatgcatcagagaaaatgctttgcattctaagagataagacatatacaattgaaccagaaaatttaaaatttggattattttagttttaaaaaaactgctatgttgttctttataaggtctgccaataaaactagaactgcttgcttcatttccttaattatgttctttattcgtatttgctttatttgctaggatataagaggtgataagctattatatttgatttctagttttttgaataaataatttcatcagtatttacttgaaaaaagtagtatgagggggaaaatctggttacttgtatttttaaagctataaacattgtaagttgtaatgctagggaaatttaagtaaaaggagtagacttttaacaattgtgataggaaggaagatggcatcatacttgaaactacgggaaaatgggattaaaaataaaagaaaatagaacttggttgctgcccccaaacaatttataatagttagtgagataggtgaatgattaaggaaaatcatagggctgtacagtaatacaggaaaacataattgctcaaaggaatggatagtaagtttcataacatttcaggagactgggtagaatttgaatacctggataaaagaagatgggagaaaaaaggactggaaagtgaaaaatgtagagaaagaattaagaagtaaacattacaaaaccaaggagcttttcaggatgcatgaatttcttgtttgtttttttctctgagattgtcttatatctaggctttacttcatgttgttttgtatttgaaattaaaattgtttttattatcttttatctttcccaagagtcatccttctggaatgctttgtgtcatgagagtgtcacctacatcaccaagacttaggattgattttatctttagtctcctaagtaaatatgctactggtataaggtacaccttggacacattcttgcatcagaagcaccaacttgagaccactgatgaagatgatgatgatactaaccagtctgtgtcatccatagaggatgactttgtcactgcttttgagcacttagaagaggaagagacttcaaagccatacaatgatggtttgtttttcattagactttttcctaaaatagggaattaaaatttttcagttttgaaaattttaaggcaggcttgttcagttgaaatttatgttgagatttgattcaatttaaaccttttaactttttttctgattacctaaggaaattccttatgatttttaagttcattgtaatctggttttcagttttgcttatttcaggttttcatatttagttggtgctgttcacgcactggttacatcattaagtgtctggaacattcctaggttccaattttggaagagttagctggcagagtctccacggtaatttttctaacatgcgtgacagcatgcaaaacatcccatagaccaggtatccctagacatagagtaaactgaaattattttataaacagtatatttactttcaaatgttacttgggtgaatctttctgttaaacatagtttagaagatacacataaatattatatgtttaaagtcagtttattccatggatttaagttaatttccaaaaagttttgttcaaaaataatttcaccatttcattcttttcctataggaatgaacattactgtgctaaggagccagtgtgatgctgcttcccagacggttactggtcatcatttagaaacccatgatttaaagattctcattagctctggacagcagaagtcattggctaaaccctcaacttcctcagtgaatgtcctgggacataaagaactaccttctgtgaaaacttcagtcacaacatcaatttcagagccttggacccaaaggagtttctataggtcatctaatgcttcagataaagatagtgatttacagaaaacatttttttcgtcttctcctgcctactcatctgaatcagaatgttcaagtccaagtcctgttattttcttggatgaagagggatatcaaaaaagcttaaaagcaaaacttgagctgcctaaaattcctgtgatgaaagatgatatagaggattcagactcagaagtaagtgaattttttgatagttttgatcagtttgatgaactagaacaaactttagagacttgcctgtttaacaaagatcccgtcatagggaagtcatcgcagaggaaagggcacaaacatggaaagtcatgtatgaatcctcaaaaattcaagtttgatcgtccagctctcccagctaatgttagaaagccaactcctcgtaaaccagaatctccatatggtaacctgtgtgatgctccggattctcctcgcccagtgaaggcatcaagggaagatagtggtttatttagtcctattcgatcctctgcttttagtcctcttggaggctgtactccagctgaatgtttttgccaaacagatattggtggagataggattcatgaaaatcatgattctgtttattacacctatgaagactatgcaaaaagcatttcatgtgaagtactaggctcagttcttcgtacccaccatactaataccctatcaaatattaacagtattaaacatggagaaaataaaactgtaacttttaagcatggaaaccttgatcaaaaaaataaatctaaaaataaatccttaatgattaaagatagcattcaaaaatttgcagcagatcttgtggaaaaaagttttggcagtgcatttaaagacttacagaaaggagtctcttcatgtaccaatgctttgtaccacttagccatcaaattgacatcatctgttttgcagatggcatttgatgagctgagaaggcagcgtgcattttcactaaaagaacgtgccattagtggcctggctaactttttggtgagtgaagctttatcaaatgccttaaaagatttacagtatgtaaagaagcagatattcacaaacacagttgctaggtttgctgcagatcttgctgaagagcttgtttttgaaggcatcatggaggtgtgtcagttttcatatcctcaaacgcctgcatctccacagtgtgggtcgtttgactttgaagacaaagtagtgaagttgtatgcaaaagatttgtctgaatctgtaatacaggaagcattcattgagctatcacaagttgatgtgacctttacaacaaaggcagcagttagtgtctctacggataatatcaagtatgtgagtgcagaaagtgtagtgccatcgacacaggctgtcacgttttccccttcttttcacaatcaagcaattatggtgacaaaaccagtgcaggaatataaaaaggaatacacagtgcagcaggccttgttttgtacttctggaattgttacttctataccggtgcccttggcaggaagtgcccttctcccatatcatatttcatctactgcatgtcaggccaaggctcatctgtcatctgatgatagtaattcaaatggtgattctgcccaagtgcatattgccacaaaaaacaga

SEQ ID NO: 73052 - DNA, 2504 bp, Homo sapiens
atggttcatggatcctccctagagacactgccatcttgtccagctgtgacaggtcagaaatctgacttgaaggaatctgctaaggatcaaccactgaaaaagcataacttgaatagtacatcacttgaggccttgtcttttggacaggaaaacccctttcctcattcacatactttctcatctacagcacttacctgtgtagatggtttgcatgtggaagataaacagaaagtcagagacagaaatgtaatacctgatactcctccatcaactcctctagtaccatcccgggctagttctgaatgggatatcaagaagttaactaaaaagctcaagggagaattagccaaagagtttgcacctgctacaccaccttctactccacacaactcatctgttggtagtttgtctgagaatgaacaaaatactatagaaaaagaagagttcatgttgaaactcatgcgatctctttctgaagaagttgagagtagtgaaagtggagagctcccagaagtggatgtgaagtcggagcactcagggaagaaggttcagtttgcagaagcattagctacacacatcctttctcttgcaactgaaatggcagcttcccatttagataacaaaataattcaagaacccaaggttaaaaacccttgcttaaatgtgcaaagtcaaagaagtgtgtcgcctacttttttaaacccctcagacgaaaatttgaaaacattatgcaattttgcgggtgatctggcagcagaagtcattacagaagctgagaaaatagcaaaagtccgaaattgtatgcttttcaagcaaaagaagaacagttgttatgctgatggtgacgaagattataaagtagaagagaagttggatatagaggctgtagtgcacccaagagaagtggatccgtttattctttcattaccaccaagttcttgtatgtcaggtctgatgtataagtatcccagctgtgaaagtgtgacagatgaatatgcaggtcaccttattcagatactaaaacaggaaggtggtaatagtgagttgataatggatcagtatgccaataggcttgcctaccgatctgttaaatcaggattacaggaagcagctaagacaaccaaagtgcagtgcaactcaagaatgttccctgtgccaagttcacaagtgaaaacaaacaaggaactgttaatgttttcaaacaaagagcaccaccaagaagcagacaaaaagagacaaagtaaaagaaatgaaggttacttttgtaaaaatcaaacttgtgaaaggaccctggatccatatagaaatgaggtctcccaactgtatagtttttcaacctctctggttcacagcataacaaaagatgctaaggaagagttgacagcctctctagttggcctaccaaaatccttaacagattcttgcttgtttgaaaaatctggatatgaagaagataatgagtgtcacgttacaccagaattgcctaagtctcttcagccttcctcacaaaatcacaggttttaccacagcactggcagtttaaatggatatggttgtggagacaatgttgttcaagctgtagaacagtatgccaaaaaagtagtggatgacactctagagctaactctaggatctacagtgttccgagtgtctgagaccacaaaatcagcagacagggtcacttatgcagaaaagttgtcacctcttacaggtcaagcttgcagatactgtgaccttaaagaactccacaattgcactggaaattcatctcagcactttttcagacagggttctctcgccagtagtaagccagcttctaatccaaaatttagcagccgctatcagaaatctaggatttttcatctcagtgtccctcagattcatgttaatcttgataagaaggcagtgcttgctgagaagatagttgctgaagccattgaaaaagctgagcgagagctgagcagtaccagcctggcagccgacagtgggatcggacaggagggtgccagctttgctgaaagccttgccacagaaaccatgacagcagctgtcacaaatgttgggcatgctgttagcaggtaagtttcacgtttcttttggttgttaatgataaattaaaaagataaatgtgatcctatatgtcttaggtcctgttcataaaggaatgattatttttaaccctacataaacaaaagttttccctgttgcatttatgtattgtttcatatcctacacatgactttaatatattttggtctcctgatcccttttgagggaaggtgttatccatttacagagctggaaaatgagggttggagaaaataatcaccttatccaagttcatagagctatgaaataggtaaagttgaattaaataaatagctagagaattttatatagtagtccccccttattctcaattttgctttcctcaatctgaaaatgttaaatggaaaattccagaaataagcgattcgtaagttttaagttgcatgttctgagta

SEQ ID NO: 73053 - DNA, 1140 bp, Homo sapiens
agacacttttaaaaccatcagctctcatgagaactccctcactgtcatgagaacagcatggaggaagccgccctcatgatccaatcacctcccaccaggtccctccctgggggttacaatttgagatgagatttgggtagggacatagagccaaaccatatcatggcctcttacagaaaacaattgcgaacctctgtcctagatccacattttcgttttcactacataccagttcctagtatgataataaacataataaattgttaataaatattctcatgaataggtaataaattaggcctttttacaattgaaataattttcctcatacaggttgcttcaggctattttactttttactcctcctcagttcagtcctgtctgccctacggacccatccatccccctttcctcccaccctcatgggaagaaaagagactgtcctctaaagtttttaagacatcactctcaggggctagcaaatgcctttgttattgattttctcagtaatttccacttttccttcttagagttgggtgagtagatagcccctaaagttcttcctgtaagccagtgctgtccaatttcagctttttattaaggctggagtaattattttcctgcttctcttcttaataattgtgctagggttctgtaaatactgactaaggaaagctgactctagtgtgtagagtttacgtttaacattttttatttctaaagttaaatttgtctttcaaacttgaaaggagattcattcagatggattattctttaaggtattatttcacctgatgtccctttttgtttgattcatgaacatgaccataaatatttcacaaactgtaatgaacagagaggtggcatgtgaatgcaattgggaaattatgtgatagtacatttttattcatttttgtttgttgttgtttgtttgtagagatgagatctcactatgttgctcaggctgatcttgaattcctgagctcaagcaatcctcctgccctagcctcccaaagtgctgagattgcaagcatgagccaccgtgcctggctgatagtgcatttttagccaacaaaacgattatattctaagctatcattccgagccaaaataacctcacagtcattataaactcttctc

SEQ ID NO: 73054 - DNA, 3767 bp, Homo sapiens
ttgaagatgaacaccaagatgaaagcagcagttttcatcatctaagtgaaaggtaactacacttttgcatataattgtgtagtttaggtcctcagatcttagaagtgagctataaatttacattattatttaaaaattctaaatttgaaaatatgctattactttcaaaatgtattttattattcacaatgtatttctaattgtttttaacacttatttaatacagtaagtagcccagctaattttattggggtgtgccaatagttgatttgaaaaatattgcatacatttaattttatgccttttaagcttctcccaaactttttatgaacttctgaggaaaaattttttttttcactttaaaaagggtacttttttttctttaaagaacaagaaaaaggacaggtatctgtaaaaggcatcaaagtagccctgtacttttcctgacattagttaaaatagtatctttttggtggggcgagggtccctgcttgtcctgctgttaggaacaaaatgacctggaagacttatgcttgaatgattgaaaatacgtaagtcaaagccattataaaaatgtgattttgtatagcacaaggcacttacctcatatataacttttcttagttaactttgttcataacagtggtgtttgaaatattttattaattatgagacagttgtttcttatagtcttaacctctacctaaaggcatttctgactaacctataaaattctataaactctttatccacattaagtgataactggaaataatagataccatttgtagcagagtcttgagggaggaaagggttcttagcatattgctggtttcaggcatgtgtggaaaggacctgtggaccatcagttgaacttagcccctggaaatggcaaactaggtgtgggagggaaggcaactcttggaaaagggaatgaggtagcataaggaaaggaaatggcttttcacctgatagaacacttcatctcgaagagttttgttcgatgcttggattaacctggaaatattaatatttttgtaaagtatattttgtcatagtttattatggtgctatataaaccaccaatatttcttaaaatctaggtccaaaaagacagtgtttaaaactggtagaagcaagtgggggcaatgtcacaaatcatgatttggcccttttctataactttatctagaaaaggatactaacatttagtttcttctctcattttgagaaacacaggcttctatgatttcagtggggttgacagtgttgcctaggaaatcctggcgttaaaatgggagattgaggtgtgggtagaggctttaagcattaagaggacttgtagtcagttgaacaactctgtgctgaatattatctaatttgatgagaaaaaggagtcgtcttaccggtttctgtccttggttctgtcctccttagcattatttattaatgatgtggaatactcatttgtggatgattcaacacaggctgaaaaaagaatctcattaacagaacaaaggttaaaaagaccaaatcaagctgaggttaaaataattatgtttaacatggataaatgcatttaggctcagaaaattaatgattaatatttgaacttaagtggggagcaaacctggcttgatggcattttgtcagaaaaagacctgtgtttccattgaccaaagttgtaatgtgacttaatgtaatgctgcgtggcattaaggttctggcacagagaaaaagcggggctcatccaggattggtggtgtgctcgttgcatatacagtgtccagggtctcacctccagagatgaagatttatgaagtcagtgaagggtcctgagaatctgcatgcttgataagcatcacagatgatttcagtgcaggtgattcagagacctcacttgaaaatatattgatttacaagatatgttgcatctgttgatgacaattgatatctatactgttcttttctgctacagagatcaaggtaggagataaagacttcggcgatttgggctgggcgcggtgattcacgcctgtaatcccagaactctgggaagccaatgggggtgggggtggatcacttgaggtcaggagttcaagaccagcctgggcaacatggtgaaaccccgtctctaccaaaaatacaaaaattagccaggcgtggtggcaggcacctgtaatcccagctacttgggaggctaaggcaggagaattgcttgaacctgggaggcagagattgcagtgagctgagattgtgccactgtactccatcctgggcgacagagacagactccgtcaaaaaaaaaaaaaaaagactgtgacaatttgaaaacaccttgccagtttcattataagcaggaagttcagtggagggcaacaactaaaaaacacactaatttcagattttcaaaagtgtttaggaggattatataattatttgatcagaaaagaactggtctctgtctgtgactgtcttaaatatttaggtagtttgttattctcttaggaattatgaattagattaggttaagggatggggccagatttgcagaatgtttcagataatttttataagatgtatcacaatcaagaccagtcttgatatggctaaaagctgcaataaagcattgcagtactggaccactgtagtacttataccactggttggagtactcctgtgctagacataggaaatatgaaaagacataaaagaaagtgatggaagcagggtagtgtttcaagagtgaagtaggaaaactcttaagtgaagaaattaagttttttaaatgttgggttaatacagggtgatcatacttcccacttaggatagtttggcttatttctgctgttctgttgtaattattaacggtgaggtctttaaaaaagtgtcctggttagatgaaaaatgtatacagtcacctagttagaagtggcattttatgaagaatgacttcaaatacccatttggaggcacaaagagggaggggtgataaggttagagggaatttgaatttttagtctttacttcgtttagctgtttttttttaatgtttatgtaataggtaggtgatggattttattaagtggaagaatctgtgtgatgggtagaaaaattttatatttttttgttataatcattctattaatagaagtaaatagagtgtttgagatgattaattttctttttctcctttgctcacagctgtctgtccattctttgtttgtatattttcttatttttagtttatctgacaatgaactacatgggttttaacagttttataatagagctatatttgtttgaacatatgttaaaaagaccctgctcagttttaacttttactctctaatacatcatgatttgtgacagtttgatcatgttagagtgaatataactatgcaaattatttgagattgcttggaagttttttagaacttgaagtaatcacctttttttgttaaccataccaacatttactgatgtacataaaatgattttatgtttacttttttagaaccaaaattttggtttgtataaatattactttttataattgcctagcataatattgggaaaaatcgctgcttatcactgcaaactaatgtgcttactaatgtttaataattagaaatgattagaatttttaaattgcatgctgagggttttaatctgaaaatttgaatttaattttatttctgaacatggttgctttttttaaaaattgctttgctgcagttttagaaagtagttgctttcttcttcag

SEQ ID NO: 73055 - DNA, 1067 bp, Homo sapiens
tcaaaagagcttgcttcctacaggatttctgttgggtttttttgttatgttttatttttgtgtgtgattttattttatatataagaaaagtataggtaaaaagtgtttttactgtattaaaaatatatataaattgcatcagctaaaccattaacaaatattcctggcattttgtaatattcaaatgctacattaaattagtagactatttcaactttaaatgattttaaattgaatattatgaaattacatggcactatgtatcatggtaaggtaggatttcttggttttgataactttagggatcatttgcaattcagattttaacatgaaatgatgtgagaagcaaagcttccttttttaattgtcatttctcccctttctaaatgtcatatgtcatattgtaacattcattcattaccacatttttaagaatttgttttgataccattattaattaaattttttttgtaactgcttctgctattttattcataagtgatggaccagatgataaagatgaagagcatgaggacgaagtagaaggtaatttgatttgtttttcaaagtgttggcatgtgttttgtataaggtttcctagaagagtctttatgcattttcatcagataggctctaggttatcagtgtaaaacattataaatcagggtattcttgaactaattttgtttgtccacttttagatcctttgttgagtagttttatttgattgctacactaatgaaattgtcattggtataaagaaatactgggcaggcacggtggcttacgcctataatcccagcattttgggtggctgaggtgggtggatcgcatgaggccaggaatttgagaccagcctggccaacatggtgaaaccccatctctactgaaaatgcaaaaattagctgggcgtggtggcgggcacctgtaatcccagctatttgagaggctgaggcgcaggattcacttgaacctgggaggcagaggttgcagtgagccgagatcatgccactgcactccagcctgggtaacagagccagagactctgacttaaaaaaaaaaaaaaa

SEQ ID NO: 73056 - DNA, 1050 bp, Homo sapiens
tggggtttcaccatgttgggcaggctggtctcgaactcttggcctcaagcgatctgcccacgtcggcctcccagagtgctgggattacaggcctgagccaccatgcccagcctcatttttatttttattgtaatgatagctttatagttttattttctctctaacccactggtcataatttatatcaaattatggcatttatagaacttgaattcagtatgttaaaatgatgttttatatttttgcaatcaataaatgatcaaagttattcctttgttttacattattttgccctttagaagttttagttgaggttatggtgtggttagaaaaagatggatatttttttcaccattcattagaatcctaagaaccagaaaatatttgtatctacttgacaaccagagtattgagagttaaattgatgagttttactttatattgtttacatttaaatattaggtttggggcaagatggaaagacactgctaattacgaatattgacatggagccatgcacggtagacccccagctaaggattattcttcagtggctcattgcctctgaggctgaagttgcagaactttattttcatgactctgcaaataaggagtttatgctagtaagtacctaccttacagagtgtgaggatacatttaacagtatatgatgttcttgtcatgtgattggtctaacaagatgcctggtgatggttaaattcttaggctgtagtgtccaacagtttgggttcagacatcagctctgccactttctagcagtataaccagaggcaggttcaccagtctgtctcattgcccctaactgcactatgcaaatgaatatagaatctaccttacaggggtttatgaggattaaatataatgttaaaaaaaatgcttggtctaatgcctggcataacactaagctctcaaaggtagatgctattaataagcattgtgtgtgttcctatgaaaaaattgaattattctctgtatttaattgatttgtaattgtacctaatgattaatatatctgtttctctgataatc

SEQ ID NO: 73057 - DNA, 2990 bp, Homo sapiens
gaaatattcgaattgtggtgttggttgcattcaacttggagaacatactaaaaaccattgactaggacactttgggtgaattgtatgttatgtgagttttatctcaataaagctgtttttaaaaaggttaagcatatatatgttacacaaaattaaagtagtttttcagaatttaacttacagatctttcaaaacttaagagcttttacagaacttagtagaaaaagaaatgaacaaaagcatgtcgtgagtggtgacaacaggatttatttaaacctgtatttatttatttatttatttgttgttttgttgttgaaacattaacattctttaacttagaaagccatgtttccattgaggctagagtgtgtattccagaaaaatgccacactatatgttgtggaaggaaaatccacatccttttattgagtttgacgttgtctttattattttatgtcctaattgagggtgtggcagttgtatttagttaggtgaagaatttcctgtagaaactcagcctctgcatgtccatgcagactatttgcttggtgaggtttgtggagctctgtctccagcgatcccaaagtgtcattctctggaggagatgtgtttataaaggggaagaagggaaaatgtttaatttgggtaaaggggtagcggtttagaggggaagaccttgttataactaggaaacggtatttaattgtaaacagcaggattcttaagtttcagctaatattgaaaataaaaataaaagctttgttataaaattgtttttggttaatgtttgacacatctttctttcttagctttcaaaacaattacaagagaaaggatggaaagtgggagacctcctgcaggctgtgcttcaatactatgaagtgatggaaaaagcttccagtgaggagagatgcaagtcgctgtttgattggctcttggaaaatgcatagagcaaaccccaaaccagtatattttagtatttgtttggggaggggaacaagccaataaagatgtttaggataaaatttgaatagtgaatattaacatcgtaagtcagttgggaggcaagtaaatatagctttctgagcgctttgtgttatcactcggtgtatatagttcatacttttgtaatctgtcaaaatactaccttcatttattcttctatacacatgtgtagtgtgtcaagaccctaagaacatgtatttgaaggaaggtctaaccagggggttttcaggggcattgtctgaccacattctttttgtatccaaatagtgctgctagaaactgcactgaagtggctgaggataggttccagtgatagagttataattttgctcctttgcaaacaaatggtatctaattaataactagtctgacatcagaaaataaaattgaggctgatttttaaaaatttctagtagatttttggcctttcctgtttttaaaaatcagtttcattttcatatttcatagatcagctattggtagctttttgatttccccaaactatttaatttcttagcagaaacattagtattttaggtttctataaacactataagtgatagtttcccccatcctttcattgacattatttgccaatgctgccagtcattctggcatgaaaggtgtgtgtgtgtgtgtgtgtgtgtgtgtgtgtgtgtgtgtgtgtaagggagtactttaaccttgccagtttgttccctcttttattttactgttttctttttagaaacccactgttaaaatttaaaaaggtgctttaaaataaaacgcctataaagattgtgcagtaagaatttttattgacaataattaaaattttttttgacaattttgggttcccaacttatcttacaagtgaaaacttaaattgtaaaacatgttgaaattttaaaaattaatgttaatatggaaatgcatttagagaagcccagtagtttttattgttggatttttgaaaaaacctctaccaagaatgtggtgttttttttgtttgtttgtttgtttgttttagaaaaattgggatttccccccaccccgccccacccagataaactatatctacactgtctcgtcaagttctctgacacgatctttctgggctctacatttcctactagtttgtgtccagaaactgcaagttgacatgaatagaggacaaaggttgtgtcttgcttttgtctctctcttccctccctgcaactctctctcccctcctcccactctcttccccctcccccctcctcccactgtctctcacctcccccaccccccactctctctcatctctcgctgtgtcctgtgtatgtgtgggtgtgtgtgtatttgggtgtgtaaatgttggttcttccactactggattttgtaatctaggataaatcactttttttggggactttgattttgctccattacgttttcattttttctgagcactgactgttctgaaagctgcacaaaacgtagaaagaagacatagcgcctgccagggaataggaaatgagggcacttacacattaatgtgaattagtaattgtggtatagaaatgttttatagtgaaagattcaaatttgcttttcaagaaaaatgccaaaagctatttaaataattcgaggttacatcgtaggttttgatttttctcaatttaagatacagaaatacagcaagccttaatataaagtttcctaaagtttcttcaagtattttttaaggtggagaaatgcaggaattgtataaccagaattgttcctgcctttagcttttcagaacttgagatgtggcagcactggactgggtttttttaaatgttaggactaggaatgtttgctcttgttaattatgaattaattgattattaagtttagaatgcatttttacaagtatctaactatcaaattgtgtttagtaacttgagtgtatgcacaagtttgatcaacagcaaaatagagttctgaatttcttttaaagtgatgatatattattttgt

SEQ ID NO: 73058 - DNA, 1077 bp, Homo sapiens
ctttataaatcacagaagaaaatgacaatatctgttggatatttgatataatttaatggtgttataaaacctttaagaggattcatggtgaatatatgtgataacatctttatactttgaaaaatgttccacttacccttcagatatttgttgtaagttaattcaattcttaatactttaattttgctccaacaagggctttatgttgctggtaagagaatttatttactaaatgcactatgtataaagtgaaagatagtttacttatctgactttgatattagatggctgacattagtgcacataatgcagagtttaaccttgattcttcaacagagtccagatttaaatgtctacttagttaattagttagctgatattcttccacaattaatatattcaatttcccatcagtatatcactttaaattttatgtttttctaaggaaactttccacagaattttaaacaactgatgcatccatactcagggtgtagggagaatactttgcatttaaaaaccctgtccacctgtcaccagcacaagagaattagagcttcagtgagaatttagaaaaattatactaaagtgagatgcattttttctcattttcagcaagactcctctaagcatttactcatttactgtattcctgctctgaagatgtggatacagaattagtcactcttgtcactttatttatttattggtttttttttaaccatctgtgtacattcctttcatagggtagagttctagttctagaagttcttattttgtttttgttgtaatgtttgaatactatttaatatccggttttaatattgctggatttgctacctttggttacttgtgcagtgttaaaagtaatccactttcttgtttaatataccagatacatagcaaaagcagcttggaataattatagctgtttatttggctgtgctcagttactatattaagatcttgtactgtgtaacagtaactcttttttgcttttcagtaatttaatatgttcacttaacaaaatacgaactttgagatgcactaaagttttgtttcagcagtggctcaaaa

SEQ ID NO: 73059 - DNA, 1362 bp, Homo sapiens
aaatactgtcatttgttttccttgtgatgtcagactcagatttcttattttttacaaaatgcctgccaaatatacaagtctgaatagccacagcctgtctatcagttggcctttcaaacaaatatggtgttccatggaaaagcagatagttgagctcacagctcaaacaatcatgaaagtgcctttcctcaggagcctgcatttattcatctaaaatgtaagtttctgcttgtaaaacatgttttaatagctgtgagaaagtcatgacggatgagttgaagcaagacgatactcacaaattatattgccactgtctggtggggaaaaatacaatgagcattagcacagtttagtgccactgcctcaactggtcctaaggcaccaaaaattgcatccaatatcggcagtccaactccttgcacacctgctctctcacagcttctttctcagtctaggccagcatcaccatggtagatgccttcctgtgcacctggaagctctcagacagcaagaattttgatgactacatgaagttaatcggtgcaagttttgctatcaggcaggtggctagcatgacaaagcctaccacaatcatcaaaaagaatggggacattatcaccttaaaaacacagagcatgttcaagaacacagagatcagctttaagctggggatggggttcgatgagacaacagcagatgacaaaaaggtcaagtccattgtgacactggatggaagcaaactttttcacctgcagaagtgtaacgggcaagagaggacacttgtgccagagctaagtgatgggaaactcatcctgacactcacccagggcactgcggtttacactcgcacttatgagaaagaggtatcgtctgcctgcgctgtcactgactgttcctctgttaccctttgactcagcaccacattgcctcatttatttcccctgcattttgtataaatccaccttgttgaagaattcttctgaggtcatgtgcctcagaagacttcagatccagttctagttcctgttgtgtatgtggtttgctttttaatggcattcaaagtgtgctctgaggtcaacaaagcagatccaaggccaaaaaaagaaaaattgtccaatatcagtgcaaagtcaacctcgtgaaatgggcaaattgtgtctttgaattattatgaaaacagcaaaaactcttttcaggtataactgaaaaggtttcaggacctcactttgaaaactgccgaggcagaagaacctaccatgctaatttaaggatttaatttaatcatatttaaggatttagggttcttagtgtcccttgacttcattagcagcaccagtgactattaactcaagtatagaataa

SEQ ID NO: 73060 - DNA, 1064 bp, Homo sapiens
ctctggtcattccagagtaactcttgaagttctcaaagcccttacctctaaatttaattctaatgtagtttattttttaaaaatccacatatagtaatataattatttaaaaagaggacatgtgtcagaggtagaggtaggaagatgtagctgttttgtaaagccagctaacaaaggtgaacgtctgtaataccatcagaggtagaggaaggaagatgtagctgttttataaagccagctaatgaaggtaaacgtctgtaacaccctgatagttgagatttgctgtattttatcgaatctaagttaccaattttcagcctactttgttatttcatgcatcactaagaaagaagaaactgttgattaaaaaaattaaacatgatcatcataggttctagaggttctagttgtatcttaattccagagatatcaaaacgttaaaaagttgtgcattatggaatgcatgaagtacctattagtttaatgtgtctataagaaaacacattgcttatgaaaattactttttcattatcattagtgtgtaggtgtttggcttcacgcagaatagatgtatatgtttaaattcagtgatccttaatgttacagtgtaatttttgagcaacagcaacagcaattctgttaatctattcatttttattgttctgttttatatttcattttcattcgtttgcttattgtcccacttgtgaagcttatctcttaaatactgagtaatctgtctttaaacaacctattcacatgcactaggggcaatctgctagttcaaaatggcatttcatattaaggtaattctggttgggcaaaagattgtgccctaatgttctgtttagattgactcatgttgtaactcctcaaaatgatgagataaactttttatttcattggtgtgctggttcttaaaagttaccctttgagttccttatggaagaataagtatggaaaatcagccaagttaattctgaaaataaataatattacgaacaagggcaggcacggtggctcacacttgtaatcccagcactttgggaggccgaggtgggagg

SEQ ID NO: 73061 - DNA, 1058 bp, Homo sapiens
taaatgacatatccagccacatttcacatcccctacattgcactgtaccctgtactatagttacattaagtttccttcatgaaattttatggttctgtgactttactagagctttctcttctgaaattcttttcctggctaactcctattcattttttttttaaagacacatccagtgtgaagccttccctgaccccagttccctttgcctagtaggagaaaattgttttatactgtgtgtttccttaggaagttgcacaagtttttattatagtttattaagatacatcaaaattatttatatttgtataagcacctatggtgtgaagtcctcagggaagacacttgtatctgtatctgtgattggcattgtaattggcacatgatagccatttaattatttgtctatgaaatagctattaacttctattattattgagcaacttaataaataaacatggatatttgattttaatatcattgacacctgtattttttccttgtagggtcctcttatatgttagcctctaagggagagcaagagtctgtgtctctcttgctcactgctttttccccagaacttagcataagtcctggcacatgccaaataaatgtttatatatttatatggtaaaagttaaataagtatttgttgaatgagtgaatagtctacgtctttcctctctccatcacaactaccacccctcttgtgaggaggaagaatactttttttcttcttcatttccctctggtacaactcttgtttttcttggactgaaatgttcagtctcaaaatagaaattttagcattttataacactttcaggcaacttatatttatctaaaaagttatttactgcctatgttgtttagggagaataaaatgccatagggaatttgtaaacaattttggtgcctttttttttttccccagctgtagcagctatgatggagtgatcttttttcccagttttcagaaattttttgattcatggtagtggaacatttatagtaatttttctgtttttttaattgttgctgttgttattttggttttt

SEQ ID NO: 73062 - DNA, 1015 bp, Homo sapiens
tatatgttgttttgttttttaaattgattgagaataaggattggcattacaaaggactgaagaaaaacacatgtaacattgaatcaatgatttattttgatggttagtggaattaagtggaaagctgtagtttcatatttgtccacaagatggtgaaattctcattaggtataattttttgaaacccatataaacccttaatttataatctgcatttgatgctatttattataagcactgtaatttctttttacagcccatctgctggcaaggctaagattagaacagctcataggagagtcatgattttgaatcacccagataaaggtaggtagaattcctatttttcataatatgtatatcaaaatatgctgtgaattcctttcagattaaagtcatatatgatatatagttgagatggaagtttgtgcgccacatgtattgtgatttttttctcataaatgagcatttaggttggagttcagtgattcacacaagtagtggatttatattatctgctttcaagaacttagttgctggtttttatatatgacttcctgaaccatctgatgcgcctaccatttttatcaagaaaaatcgaaaacacgagttatggactctttggttgtataaactgatttgggcatcacgaattgtatttatgtaaccttcaatgtaaaagcacaagagttagaggatttcctccaaatctgtgaatgtaatatgtcatagatgattctgaatttctgaattttattctggaaggctctgaggctgagccatttgtttttaactggccaggtttttaatgtaaatttatcttacagaaagacaattattataactttaactacactacagctgcttgagagggaaagcccatatgttcattgctgtttctgctttaaaataacagatggtagaaagttacactgtatttcagaagtcaaaggggggtgggggaggaaagtgaagggtttcttggattcttatttacagactttcagtttcctaa

SEQ ID NO: 73063 - DNA, 3768 bp, Homo sapiens
ttttgaggctatcttattaggtatattcagatttacaattgctttctcttaccagtagactgacccttgtaacactgtgaaattggctgttttatttttgcattttaccttaaaatgtactttatctaataattagtataacaatgtcagcgttatttttgatagtgtatatttttttctatttcttaaaagtatagtctcttataacaatatataacctgctggatttttattaatcaactttattgagatataatttatatagaataaaatgcacccatttaaacgcacaatttgacaagttctggcaaatatatatgtgcatgtaatcactaacagtcaagacatacaccatttccataagctccaaaggttcctttttgccccttcccattgccaatccctccccacagcctgggcaatcaccattcttctttctgccacagactatagattaaacatgtcttttctagagtttcatatatatctggaatagtattatatactcttctgtgtctggcttctttgaaggaaaaaagcagtgcagaatgttgggctcatcatagtgcatttccgttatctccaggatcttggccctcaagacctgactgacttggtagccctccagtgcttttatactgatgtgtttatattttatttagctcttctagttgggtgtcagtgggagagttggccttaaacatgatggttcacaatagccagaagcagaagacttctggccatatttagtggtagaagtacaaagatacagaaatactaagggtgaaggtgagtgttctaattaaatggaacccactgaattcccctagaaaactgagaggggttgaagagtgttattttttttgttctttttcttttcttttcttttctttttttttttttggagatagggccccaccctgtcgtccaggctggagtgcagtggtgcgatcaagactcactgcagcctcaacctcctgggctcaagtgatcctccacctcagcctctccagtagttcagactacaggtgtgcaccaccacacccaactaattttttaattttttgtagagacagagtcttattatgttgcccaggctggtctcagactcctgggctcaagtgatcctctcacctcaccctcccaaagtgctgggattacaggcgtgagccactgtgtccagccaagagtattttgttttcattaaatttagggtatgcatcctatcctatgttatcagtcaggattcactgccagcaactagatattataaccaggagagcatttagtacaggttacatattgttggaagatctgaaggagcaagttctacacttggcctacaagaatcattcctaaacaattacagagctactctgtcagggaagctgctgcctcacaggctgccactagaactgtgggagaagcacagttgctgccaccactataccacactcttgcttactagtagtaataatgataaagaggtgcagcaagaaagcctttctctcatttcagccttccaagtcccacaagaatggctctaattaatggaacctaatgtgaatcaaacactacttgaagagactataagaattgtagttttggactgaggaacttttccaactatttagaggtagaatgagggtcaaaagaaccagtccaaaatgtctaccatgtacataaattaaaagccctctaacttagagtgagtggtagagaattcaacgttattctgaataaattgtcatgtcatttttttcctctaacattgctatcaataagtataatatttaataagactctctatcatctgtgcctttgattttttccaactgctgagtgagcatagtatggcctatgatttaaatatccataatgcatatcaattaaaggttatgtttaagttcagttaatattttaatatttgctgaggatatccaagacatcgaggacatcaccctgataactctaagaatttaaacagcttaccacattgacattacctaattcctgattgctagattgtcttcaaagataatcatgaaatcaacatatttcataaccaagtgctttaaacttttatcagctttctttgtaactcttatagcatattcagggacatactatgatatattccataagtgtttatagcaattcagatcttgatatgaaaatgtcagttgtatcctcaagggcaaagaggtaaatatagctttctccagcattaccccttctaccacaacaccatgtttgttgatctattttctttgctttcttttcccttcataagctgggtggtatggtatcaataaaaggccagaaaaaagtcagaacaatttacaccaatactagctagatgctttttggtttgttgtaagctactgagaccttatgatattttcagcagctatagatggtttgcacttaaggggagaatacaaaataaaaaacacaaagagactggtgagctgtaatatgattgttagtctaagcattaaacaatgacagtattgaggactagaagttagaaggtatatgatgtttagctttcatgtgacagtttggtgctagtatttttgtatgtaggttctgtttgtgatttacaatgattctgcatttgaaattcacctcaattttcctcttgctgtttgcattagaaagaattcattgcaaagaactctaaaaaagaactgacttaattttattttttgcactgtaaatccaaaactacactctgtaaatattcgaatagaatcatttcagagaacaaaaaaaattttttgacattatttttatctctcatttattaagattagatcatttatctctattaagtaaataggtttttggcactgggtagtatatagttgcctttttaaacatacattttatttttgtgacattataagacttgattaatactttaaaagaccccttggattgatttaccttcttcaaaaagatacccgttttcacagatgaatgtgtctttaaaaaaaaaaaaacagtcatggaaaagactgttattttacttgcctaaccatccacttaattttagaaaattctctggtcaaatacttgaaaggtgaatgtctgaccagtgcagtagttgaatgttgttcaagttattcctgattataactttctttcatcatttttctcagaggtttttttttattgttgggtagttgtaggacttcactaatcaagtttaatttatactgttttgatttctagttagcttataaaataatttgtcagaggattaatgtgtgagacaatattcaaaaaagagtatttttatattttggggactttaaagtatgtcaatgatgaaatgtattttaattcatttttctttgttctctcaggtggatctccttacgtagcagccaaaataaatgaagcaaaagacttgctagaaacaaccaccaaacattgatgcttaaggaccacactgaaggaaaaaaaaagaggggacttcgaaaaaaaaaaaagccctgcaaaatattctaaaacatggtcttcttaattttctatatggattgaccacagtcttatcttccaccattaagctgtataacaataaaatgttaatagtcttgctttttattatcttttaaagatctccttaaattctataactgatcttttttcttattttgtttgtgacattcatacatttttaagatttttgttatgttctgaattcccccctacacacacacacacacacacacacacacacacgtgcaaaaaatatga

SEQ ID NO: 73064 - DNA, 1008 bp, Homo sapiens
ctatagagttcttgagaagagtgaaatgagttaagcatctaaaatgtgcctcccaattactagccaatattagctccctcttcctccttcctttgccacaaacataccaggaaaaataaaattctgttttagatctgataaataattcctgaaacccagcatagcaaacataaacacactgtcctaaaatacatgggcagcatagtgtgtagccatcatgagccccgcctgcttgctttcccactgcattatgccctgagaaattgccccatgtgttttctggtgtttgattctgtgccagagccattagggtagaagaatgagaaggagttgagttcagtcctttcagagaggacactctcctttgggcatctgctggttatgagggagcttcttgccacaattcaggctgcatgctgctggcagagggaacgaagggaatgcactgtcagaaggacagagagacagagaagcagacagaagcatggcgatggccaagtgttctttagggagaaacaggctacatacgggataagatttttggaacatgaaagaagggttactttaccaatctgaggctgctcaggcagtggtgccagaagtcacagaacatataaagcagagtttttcctcatgcagtcatccctcaagatccatggggtgttgcttccaggacccccttagataccaaaatccatggatgctcaagtccctgatataaaatggcacagtatttgcatataacctacacacatgctcctgcttaatttaagtcacctatagatcactaacacctaacacagtgtaagtgcgatgcaaattgttgttgcattgtttaaaagttttatgattttttcttattgatatttttaattgttttttcaaatatttttgatccgtgcttgattgaatccagattgcggaacctatagatagagagggatgacttgtttttttccttctgttctccctttattccagctcattatttatttcatagaatctcag

SEQ ID NO: 73065 - DNA, 1021 bp, Homo sapiens
actgcctctatttaactaaagttttgtattataggcccaggaatattgaatgtgtcatatgaagtcttttccatgagaatattaaataaacagttgatttgacttcttggtctatttggtgtctcttttaaatgaatcctaatattgttaaatggaaagtgtagactctaaaatgatatctctacagtgattacaccatgaaaaagtgtaatagctctgattcaatgaacatttctatgtgcccatatctgtggtaagccagtaattttcatgctatccttattaaatgttatttccatttgctgaggcttaaagagactaattatctctgtaagggtcatttaacttgtgagaatgaagatacaggattcaaacagagtatcagaccccaaattttggggatattcaaacagaatatcagaccccaaattggccgccctgctgtataaaatccacatgcatacacatggattggcatgctaacacaggacaacaaaagcaatcactgtgctagagcagagggattatggctgatttgttctttaaaatgaattattggtgtaaaaattcatcaaataaaaatatggagaagaaaaaagttgcattaaaaaatatacctgaattttatgactagatatcaagacttgtattgttgtaggttttggagtttagattccattccaaaagctttatggtctctggtctatgtgaaaattaaggaagagaaagaaatttgggtggcaagaaatccacccgaatgtcttctgctcctggcagcattaaagaaaattgctgtccttcatagatgaggatgaagccactagtagctttccaggagtggtgatggatttgctgggagccctcttaaattccctccccatctccttttatatcaggggagggctgttcaggaatggtgctgccagtaaggtagccatccatatgaagggtgaacttggcactttccgcccagccaacccacgccccaccccgccagctgctcgggaggtgggataatcac

SEQ ID NO: 73066 - DNA, 1129 bp, Homo sapiens
gcactgtcttagggaccagagaagaacaggagatgaccaaggcacaaaagaaacctaagatagaaccctattctcaacaagcttgtagcctagttatgaaatgatttgagactcagacatgaactaatgaagtgctaaattgggtagggaagatactctctgaactaggagttagagaagggtgaaatctgtgagtcatgattaacagcaaggtaccctcgagtccatgcttcttctggtggcttccctctgggatgctttagccaacattgccacatttctttcctttctcctctttctacccaccctttcttctctccttcctgccctcattttccttccatattcttttctccttttaattctctcctgtttaccttctttcatcacattttttctgcctccttcccttcctctaccagtttcttgcttcactccttcgaattcctgacttcttgtcttctttcctcttttccttctttctcccttccttcctcccctccctttgccccatctacattttgtatttctctctgtgaacatttgttgtgaggtgtctgtgtgtgctaacactgtgccctgcccaggatgtgaagaatgaacaagatttaaatgtgcatttaaaggctagaagtcagttttgcccatggaaggaagtctggttttcaactggcttccctgacgctccggcctctgccggcgtcttttcagtagcccaaacaggagcccctcttcaccaggcttcccttgcctgatgatacggggtatggagccaaccatgatgagaacaaattgatttgcatctgcttgtgtccatttgtacatgtgattagaggccgggcaaggaggcagtaggcttggcctagagtgagcaaattaaaaaataaatcaagcagattttataaatgacctctgcggtatcaacagcacacaagctccttagttacacacagcctgtttccttctgatgtttgctttctttcttttttgtatttgtagcaaataaatccttcctaaaagaataaatttaagaaagtttcaaacaaaacaggtagaagaatccactgacaatatcaaagattgaaaatatataggccacaaatttcttggaacaaaagccacctgggta

SEQ ID NO: 73067 - DNA, 1066 bp, Homo sapiens
gatagctctccatcttctgaatgaaacgcccacagagctgtcaggttccttctcatgcctggggtagaaagtatattgaaaaagtactctaaaactgctgggcaccagggatcagaccacatgctttctattccagtgaggctgagaggatatttagactttttaatccagagagcaaaatccagtgcccaccctgtactgatgagaacagggaaagcaggctccacccagtcctgtaatgtcactgttgtggtcaggatttccccaaaggctacatatgggtgtaagaatgactaggaatggaaggaattaatttaaattatgccgggcatgtacattgcacatggcttcctaaaaccatgtagcccaataataagctattttccagttaaatattattcctgctgttgatatttgcatatttgcatatttttctcttcttggccttttctaaattacccactctcattcacccggttctcttgtatcagaaacacttgaaaaaggaagattcattcagaggaaaacagggtccgggttgggggcagccatggcttctgaagctttgctgagtcaaaaatcatgcccagagcacagcaggcaaactctttaaaataggcagcactatgatgaaaatggtttctatcagtacatagaatctcccatgtcagccccagggcccatcaagcccaacctcttgtctctccgaagcagcccagaagaaacatttgacttgagcattagcagatgaatacttcttacagtcaagaggagggttcgtctgctcttccctgtttatatatcctttaggagatgaaggctcagttttccaagcgtgtctggttgccccctctacacacctgcagcctcttcccaaggcccatggtgtggaagatttggttctgaaaaccagactcagcgtaatgtggccacagaggctggaggatatagaaggacctgctattttggcacgacaccactgtgaccagcttgagaggtcatgggcatgtgttacatttcccacagaggggagaatcattcgcacttctgtactaatagcatacct

SEQ ID NO: 73068 - DNA, 1082 bp, Homo sapiens
agtgctgggattacaggcatgagccaccgcgcctggtccctgggtgcattttgtaaatactgcatgtgctcacctaaaaatgacaggtacaacaggacctagagaagctggcacatgaggaattaaattcaaaagacagtccagagtccatccatcatatatagatttttcaactacagggttattgaatatgacatcaacttagagatactcccaggaaaaccaattattttttttttgctctgatgatatacagctgtaataacatgccatgcatgagtctcagaagacatgctgatgtgctatcagttccaggaacccaaaacgaacccatatgtagttggtaactggatttttcttctattggaaaacatgtccaagtctgacaactgtttctctgtcactcagtgtgaccaaggtgtgatttttccctataatgcttttagggtatgaacaaagcaattaatgatctgcagtaaacttttccctctttaagtaggaagaattctgtccacttgaaggttaaaaaaatgggaaccagtctctatttttttatttccttcctttcactagagatagctgcttcttttatgttttaattggagaacacagttcatttaaaatgttttctaagtagttattaggttttatttatatatgtatacacatacatgtacttttttcagttggctacttcaaatatttttaaatgatgtgctttatatgcagtacattaatgggagtaggtaggaagattacatttataacatgctatgcctgctgatgtctttggtatcacaaaaaactatataaaattagttaaatcaagtgtgttagaaagaaaaatattagtcaggatctccaataaaaagcatatacaaccaattctaaattttccaagacttttcccctcactgttggtcttttgaactagtttactaatattagcatttgaagttaggagtagagcaaaagagaaacagggggtgacacttattttgaatcaatatatgagaacatttaggtagaagggaggccagagacttaagtgattaaaataaacttaggagtttaactttccc

SEQ ID NO: 73069 - DNA, 1028 bp, Homo sapiens
ctaattttttcaaccctaaaacatcaccaaagcaagagtcactgggtcttatctggctccttgtagacattgttgatgcagcagtatttctttgaaccttgctcagagtccccctttctatgtgactccacttttggacctggggagaaaacagcattctcaggtggtctgtctgttccacccttgcctttctctgctggctcctgacatctgcctgccctctacagtccatttccctcaatgaacctggatcttcaactgtgtgatggccccaggacaccactcagtcttggcaattaatgtgggcctgttatctgctaaactcattctgaataatttcatttggccccaattatcatccaggctgtgaacagatcaccctctcttggagatattatttccactcagctccagggttcattttttgtatttttttaatgatgcaatcattatcctagttaatgttcttccatccactttcttcctacacctctcttgggagaccttacaaagcttcagcttgcgtctgctcaacaatcttaacctcccaggcctggaagtccatctgccatgtccctgtgggacctatttgtccttagggcatacaactaacagaattcagcaggcccattgaccccactaccctagaaagatgatgtgtacacacagacctgctctgttccaatggagaaagtgcctaatcagcctaatcggaaagtaccaaatgttattttatcatagcaggaatttctatttcctttcctgcaattcctctttataaatgttctaatcccatctacataataagcctttggatttgttctattttaaaattcttcattgtgtttccattgaggcttgctcccaagatcctgtttttgatttgtaagagcatctttcatctctagtaacctttgatgtacagctggctccagacttagcttagaccactccccaaactctttctgactcctgtccttattgggattttcctaccatcagcctgaggcctgttataccctctagcc

SEQ ID NO: 73070 - DNA, 1086 bp, Homo sapiens
gagcatgtgtcccacctcttcttcttcattggccccagcactctgcctttgaaatccctccctgttgcagactgtggttaaaagtcacactaaagaagtccgtcacccgcaaacagcagcagccagccagccccctcagtccctgctaatgctgctcctcagccagcccgtgggtggcttcctccctgctcccctttcctttcatgtttatgcaagaaccacagctcaccaggcctgcctggagcctggctggctcctgagtgagctaggactataggcagccctcaggagggatttggtcacagagcgccacaggcactcaatatccacgcaaccggcaacctagtgtagtggttaggactctggagcaagacagcattggttcagatcctgagtctgcttcttactagttttgtgaccttgggcaagtcattagcctcattattcttcattttcttaacctgtaaattaagaatgtaatagcctgacttcgaagagcacttatgacaattgagtttatatttgtcaagtgcttataacacttcctgcatatagtaagtactgtacagatgtttgttaaataaatataaccaaagatgacctagaaagaaggccaccaggataaatgctgtatctggatatctctggcagtaaactacactgagtttttatctttctttaaagggtccttcgtgtgagccgtaactagttctcgcctattttaatctttgcaattggaaatcttagaaaacacggttcttggagttgtctaaagacataatgtatgtgcttccgatccggcaattgaaccccaataaggtggaacatctcagaatgtaaaatatggtcacatcatgatgaatcactgcatcttggagccccacacatctgctttcagattatctctctgatgctgaaaactattgggcctctgaggctccccttatacagaccttgaccatcaaaggctgctgggaaagggcagaggtggtgagagcccacgaccctcgggatgggcagtgccaagatttcacaactgattagatcagcaaggccttgggattgctgccccacaggaaattcctg

SEQ ID NO: 73071 - DNA, 1106 bp, Homo sapiens
ataacagatatcaacatcttaaattgtaaatatatatgtatatatatcatgttcttatcttgcatcttttttgatgaccttcttcccagcaggatcgccacctatgatccttgcatgtgtgtgtctggtggaggggaaggatgaggagggagaactgtaggatcaggtaggaggaatgaaatgcagtgacagcttcagccagcaatgtttaaaacaatttgatctaaaagctttccatgaattttctctcctcctgtccttgtttctgttatagtaaagttgctacctcacattcctctatttgctcaattcacactcccacactggggttaaagaaatcatttgcaatttgtaaagaggtttaattggtgatgctgaaggttgccactgtcaaacagaacaccttcccattcaccagtgaaacaaaaacacaaaagaaaaaagacttttcagtttttcacgtcacctccttaagaaagtaaatcctcagagctgtctttaagtctgtcagagtaaagacgttaggagcgtatggaagagatatgtgcaaagaacattcttcaagtttagtacagcacagcagaaggctatcattaaccatgtattttaatgatgtatgtgagggaacctctgcatgtgctgagtcctctgctcagtttctgaatgtagcttccaccctttaggcagggaggcgtgagagagaatacatactgatgtaccaaacaaggcaaaaaagaaaaagacaacctgtacgaaagaatgggaccgtatcttctaaaggtaaaaaacaactcaggctggattctttcttcccagaacttgctgcttggtcttaggggccccgatcttgaactgggagaggagcagacaaagcagaaagggacaaatataaggtttcacaccttcctcaccccaacccacagctctatcaaaaggaaaataaggccgggcacggtggctcacacctgtaatcccagcactttgggaggccgaggtgggtggatcacgaggtcaggagtttaagactagcctggccaagatggtgaaaccctgtctctactaaaaatacaaaaattagctgggcatagtggcacatgcctgtaaat

SEQ ID NO: 73072 - DNA, 1037 bp, Homo sapiens
ctcttaattttcatatcttggaggccttttttgctgttatcattcatggccatgctgacaccatttattgcaaaaggtctaactcggctcacttctttaatgctttctatatttaatgtttctgaagcagaggagattggtttaagatgataattttctacactttggagtctatgcaagatggtggtgctgtattgtattttgccagatagatttcagcagcaggtattaagaatatgtggcacatttcacaatggcagtatttgttgaggttttctgctgctgctgctgctattattattatttttccttacagagagtctgaagttcaaagacagggcaaatctgagatagttcagaggttcagtagttgctataggtggttgaaagcctatggggaaactgttcctgtctaatgcagccctcaccagtttatccagggcttgaccctggattagggcataggtgaaacttggagacctccaaaggttctagttactctgacattcctaaaatgttgggttccagaccagcctaaatgtgtttaaataacttggaaactttgggggaaggagcaaacttcctctccctctcacttcccttagtgattgatgaatgtgcccatttatttacatatcttgttccagagccacctaaagattaaatgtgctaagttcagagctattcttctctctttaccctgctcctaaatgtgtgattctcctagttgtaaaaatgtttacttgtattaacaaagaaaaattgggaatattgtaatcattggattaacttcactaaagttctacaattatcaggagttaagtaatataggtgatacagaccttctaaatccataataaagttttccatccttagtcagacatctatggctgatggatcagaccttcagctgtattttctctcttcactgatctgcaaaacaggctagatcattgcaactctcaccattaagattcaactaaaagctctctggactccaacacattcttattccataatgattaaggcaaaagctt

SEQ ID NO: 73073 - DNA, 2143 bp, Homo sapiens
caaagtaaccccagttagttttgtcagatgttgggtaagagtcagactttggaatatctgctaaggaataaatgaaagtatttttgaaattaaacatagtgattacatctgaccccttgggtaagttcagcatgtcttctgcaatcttgtttaaactatttagttgcttagtaagtacgttttttttagagaaagagaaaagcttgcactcaattcctccccaaaactcacatgtaattaagtctgatgttatatgtcaaaatcaagatcataataatgttaggggtggtggtgatggtggctctggagatgaagggactgtggaggtgatggttgccatggtggtaaaggtgactgcagtagtgatattggctctggaggtgagggtgattgtggtgaggatggtagctgtggttgttttggtgactatggtgggggtggtgatgaaggtagctgtggtggagaaggtaactgtgcttgtgaaggtaactatggtggtgaagatggccgtggtgggggtgctggctgtggtggccttattagctatggtggtaaaggtagctgtggtgactgtggtagtgacggtgactgtagtgagaggatggtgactaatggtaatgtcaactgtagtgatgaaggcatctgtgaggggggtggtaacctcagttgtgttgctggctgtggtgagaatggtggctatggtagtgaaaatggctgtagtggctgtggtaatgaaggcagccatggtgaggatggtggctgtggttgtgttggtggctgtgatggtgaaggtggctgtggtggggatggtgactctgatgctaatgttggttgtggtgatggaggcagctgtggcaaggatggtgactttggtggagaaggtggccatgttggggctagtggctgtggttgtggtgatggccatggtgaggatggtgttaaaggtggctgtgatgaagatggtgactggggtagaaatggtgactgtgatggtaatgttggctgtggtgatgaagggtagttatggtgaggatgatgactatggtggtgaaggggccatagtggcaacggtggctatggctgtgttggtggctatggtggtgaaggaggctgtggtagcattattggtgcttttaatgattagaaagctttagggaaagagataaaatgagcatattcactaatattttatagggtttttttttttaaaccttgtcccttaaaaattgtggaaagcctcaaaagtgcagcagaccagatgctcccagccaacttcagaaggtagtgctccagagaactgagcaaatgcagggctgcaggcaggagcacagagtgtcaccagagtttgtgacaggaggctttcctttttcttgatcatttttcacttttgtcttctgtttttaatttctatctgaaatacccaccagtcagataatggacctaataggtgggcgctccatgcccatcatctttttcctagtatcttccattttaactttatctttgatccttccaattgaagtttctgcttggtaatcatattattttattttcaagaggttattttgtcctctaatcattatcttctcatgcaatcttattcgtattttatgggtgcagtatcttctcaaatctttttaagaatactaagtaggatttttaagatctttgtggttcctgaatcatctctctttactccaggattagttgtttagctattgtgtttcagtctctctcttttatgtacaggtttcttcatgagcaaggtgatggctggcagtctgtgtatatttaggtgtggagggcttggtttgcttttctgtgaagctctgtggctttgctcattgctgtgtctggatctgctgcgtggccgagtctttctcctgggcagtggccagccaagagctctttgacaggcaggcttcattttaaggagatgtggggatcccttgaatgccagaacctgtcatacactaggaactcctggaactcactttcctttctccttgtttttgtaagtttattcattgacagatattttaattgagtctctggaggaagaaaatacaaacacatacattgcctctgacatcttgaacaggagcctgtttcgggggcctttacctttaacccagtctttgaa

SEQ ID NO: 73074 - DNA, 1047 bp, Homo sapiens
agagcagggtgatgtttccacaagtcaaggaaggccaaagatttccagccaacctccagaatctgggagagaggcaggagtcagactcttccttacagcctcagaaggaaccacccctgcttttggaccctagatcttggacttgtagccttcagaactgtgagacaatacatttctgtctcaactacatttttagctatataaagtacatttcctactgacaaggagattctgaaaagttatgagaagctcccttaactgaatccctccatcaggaggatggctcaggtggtgatttggaacactgctcctttgtggaccaggcacgtggctcctcagtgcttctgcaaccctgactgagcagctcaccctcgcctcctctgacttcttttaggtttgaatttgcaataacctaaaagactttatacacttttaaagcaactgggataatcttttctagagggagaaagggagagttgtgtaaagtgtgacatagtggcttttgggctaggtctggcgtcatggtctttggggaaatcgacggcctctcatcttggcgagggtgccaacaaacacccaatgttggggcacatggacaaccccagaagtctcacacagcagctgttacatcgattttcaagtacagagacttgagcaataactgtaatgacattttcctggctggctctgacctctgaatctcactgattagtctaacacacactgtgaacatcaaccagttaggactctaagccaagactcaaaaattgctttaaaatggcagaagatgtttaagatataatttgtacgagttggttattaacttgttcacttcccaatccgtgattcttttttatactctccctctcaattatttttccctgttaggttgatgtatctgtagtagttacctctaatcactaagatacttctgtaggcaatccatgctctggatgttacagagcagtcaatatggatgggggaattaaaaaaaattgactctatatattttaactttccatcattctacttatatttcccttgttt

SEQ ID NO: 73075 - DNA, 1110 bp, Homo sapiens
aaatcagttatgtgccccaattataaaaatgttgatggaatttgctatggtattgattttttttttttttttggtgggggaattacagctgttgtgggtttttttaatatgatgatatcacattcctattccgggaatgcaaacaatattatatactgcttggcaggcactgtagtcacttggcttagccaagaataagaactctcagcagtaccattccataggtttgtaagagatcccctaaaataatggatggtacactttcctatatgtatttatgttcagataatttatttaaataatgctgttggcacatgctttatagctgcttgcattttgctatacagatttcagcatatcttgcagactatgcaattcatttggaaaatgtaatttccatccctgcgtactaatcgatttcttcacaaacacctgctatcagttatgataataaaaatgccactctgaattgaaaaagggccaaatagagcttcctaaggaaatgacttaagtgtctttgaatgctactaaatgtagtaatgtgcctatgcagtgccaacactttcttcatcatttgcattttctgtgattttgccctattacaacatccctctcacaaatgaatcctcataaccatttccttatggcttggtaaacggagctgtcaggaggtggtatctcagggtgtggacaagatctgaagctgggctgcacaatgttaaaaagcactggctcatgctgcgggttatgtgctggataatttctgattttatgagtaggtctctgaaaactgtaaaagtggctgctccttggttttgcacacacatacaccaaatgaaatctcctttattcattctcttcagcctccagttcattccatgcaccattgccaaactaatgttcctaaatcccaatttcatcatgtccttccactactccaagcgctgtcagtggttctcaattggccactccattgaacctaaccttccccatcttctcccatcacctgacgtggattccctttctctcactgcttccaggcaaacacttggcttttggtcgagtttctctccttcttgccccaagtgttctacctttgattttcatatc

SEQ ID NO: 73076 - DNA, 1104 bp, Homo sapiens
ggaggccgaggtaggcggatcatttgaggtcaagagttccagaccagcctggccagcatagtgaaaccctgtctctactaaaaatacaaaaattagccaggtgtggtggcacacacctgtaatcccagctagatgggaggctgaggcaggagaatcgtgtaagcccgggaggcagaggttgcagcgagccaaggtcacaccactgcactccagcctgggtgacagcgagactctggaaaaaaaaaaaaaaaaaaagtaactttgagcagatgaggtcagagggcccttgaagtaccttggttttatttctggcatggcttggcaaataatatcccttcaccaagcctcagctttctcagcaatgacatgaggctcatcctgagagttcctcaataagactgtgagaaataaacaattaagggattctgtggcattttgcaaataccaggcactgtggcaatgtggagagttgatgctggtgtagagcagaaggtgtgaatgtgtggttcacagccccgtctgcacatgagaatcacctgggaaactttatacacataccaatggccgcaggttaatgcccaggcatcggtgttattaaaacagtccccaggtgattcgctgcacaaaggattgaaaaccactggcctgtaatgtgaggatgatggctgtcatatagtgcttaactggcacctcagcacttgcaaaggctttttaaggaggcactggtaagaataaaatattgctacctgaaaaattatactcaccagaaatgcaaaacaaatcattttaatgaacaaagcagaaactttttttgtgaggatgtgagaaaggttacctcttttcccacctattaggtgggaaagaaggacaaaacgggttgaggtgaggtaaagtaatgtgggaatgagaagaaaacaaaaatggagtaaagtataaaaatctgtagtggacaggaagtgactgacataggcaatgataaaggagcaaagaaaggagaagtgagagggaggtagtttaagtggagcgtgtgagacccaggtggagaagtcccctcacaggtctgtgtcgggcacatttggagtatcctctggttcactggaaaaa

SEQ ID NO: 73077 - DNA, 1043 bp, Homo sapiens
tccttcctaatgtcacaccgtgtgggtcagtggtagaacagtccattttaaaattccactgttcatgttcttaaccataatttctaagtccttactgtacatgtgccagccatgtaacaggtatttctatgtaatctttgcagccctattaggtggatgttattatccgctttgtacaaatgaggaaattgagactcaagagagattaaattatttgctaaagagccctagtcatgggtgagcagggattaatctaagcctgacctcagtctcccctgtaccccacacccctcagaacctcctttaggttaggtgaggctatatttgggagataaaagctttggattctgaatgttaatatgccagtcatatatacccaaagaccattggggaaagccatatgtgtctgtgactctgacatttgtgtatcctctacttgcaggagctccggaatgctcaaagtgagcagctcatgggcatccgccgcgaagaagaaatggaaatgtctgatgatgagaactgtgacagccctacaaagaaaatgagagtcgatgaatcaggtaatgccgataactgccacagacccatgaggtatcataatgatcttccaaatctcagatggggaataagtaaatggccctataactcacttttatttgaattatactaaactttcatctttgagtgactctgctttttattaatagaactttaaactccttcttgggaacagagtgatttaaattgctccagttgtttctccgtacgtagatctggggccattaagcttttttcagggatatttgcctgtttccatgaaaatccttttccagagtacggcagccacagctgatgctaaaaatatggataaaatttggttttagtcagtgtacttcttacatgggaattgtttaatccctgaagaagctttctagcttctgagccaagatgctggagaattagacttcttttcccataaatgttctttcacctaatctgtaattaaaaggctggccccatttggtaccaagctaggggtgtca

SEQ ID NO: 73078 - DNA, 1160 bp, Homo sapiens
ggagtctgagtgtttgcctttctagtgagttctcaagtgatgttgatgatgctggtccaggggccacactttgataactactgttttaaatcatcaagcatagtgcctagcccagtaagggctaagtaattagaaattgcctatcacagggctgggcacggtggctcatgcctgtaatcccagcactttgcgaggccgaggcgggtgaatcacttgaggtcaggagttcgagaccagcctggccaacggggtgaaaccccgtctctactaaaaatacaaaaattagccgggtgtggtggtgcgcacctgtaataccagctactcggaaggctgaggctgaagaatcacttgaacccgagaggctgaggttgcagtgagccgagatcatgccgctgcacttcaggctgggtgacagtgagactccgtctcaaaaagaaagaaatctcctattaccattatatgattttcataaccactaagggagttagtagagactcagaggagatcagggttgccgtttcgagggtcacaaagaagaaaagatccccagaaaccaggtctctcctcctgctgctatgtgatgacttagcatcgagccaacaactgaatacagggcaggctcaatgagtctggacttgtttctgttatttgtaatggaaactgcaaacatacatatcactggtgcagacaattggttaccatgtaattcatgccttctgtcatctatcaggaatggcaaaagctaaatttgattatgcactgttggcaaagggtaagagaaacaaactgaaaaacacttcagggacatagagtgcaacttgccagtacctttcaaaattaaaaattcaggtgctcttttatctagcctttctactgctaagaattttttataaagatatttatgtaaggatttcagaagatatgttggaagatgtttatagcagccttattgataacatacatatgaatagatttccaagatatattaagtgaaaaaaccaaggtacagaatagcgtatataatattagcacctttgtgtaagtaaaaaaggtttctcatagaaaaatacacactgtttgtactatatgcataaccttattttctggatggatgtgctaggatctgttaatagtggttactggttacctttaaaaagaga

SEQ ID NO: 73079 - DNA, 1030 bp, Homo sapiens
cctccaagtgccaaaattgaagtccacttctatcacatttcctccatgaaaccttgtttatccattataacccataatcatctccctttcacctaccttctgcagcgcttgttaatactatctacttgaggacttacttattttctaattattttatgtgcatcaagtttattggtttgtttgcttgattttccctctagcaagattttaggctaaatagagacatgagccacttactgttctcttttctacctcactgtgccacttctggacctggcataattcttgtaagcacatagaagacctaagaaaaaaaatattggttgttgaccaatcacaggtggaaaggaacgtggtgctgaaaattgggctagaacctaatattgcagaacacagcctaagtgttttttagtaaaccgtgatctcaatgatcttagctctaatatgccattctctttaaagtggagcatacggcatatactttagttgagaattttacagtaggagtattagagtaccgttatcaatatcatttcaacctggagattggaaaggttagaactgtcatgcaactttatacatttgtgataggtaatggcatcagcctcatcttaggtcttaaaagctgcaaatggtggaaagacttttgacaaggcagagagatctggttctaatccaagtttgaccactaattagccttgtgactttgggaaagtcttttaagcaacttcagtctcctttttctcatctctgtaataaaagggtttaaccagtaatcccttaaagttcctttccacccttaagattccacagttcttatgtcaaccatgtggatcctttatcgtctctggatatctaaatacaggtatcttccaggacccaaccatgaggttcaaagctcctaaagtgatcatagaacaggcaatcagatattactctgtgcaaatgttctgcctataccttgctgtgaaggttactcctcctgggctacactgtgaattttaagccacatttcaaccctgaggttatg

SEQ ID NO: 73080 - DNA, 1049 bp, Homo sapiens
caagtagaagatgtttctctctggacacagtaaaatccagatgtggggtttgttggtactggtccagtggttcaaggctgccaggtctgaggtctctctggtgctattcgctttacctggatagttgtctacgatggttgctgctgcttcgcctgccatcacatcttctttttccagctgaaatcacataagaaaagagaaggaaagacacaggaaggagttgcgtcattatagcaagaaagcaaacttgcccaaaaatccatccccagccaacttccatgtaggtttcattaggcagaattattatacctggccatgcctaactacaaagaatgcgagaaatataatttttgactgggcctgctgctctccagagtaaaattggagttctcataataaggcaggagtggagaatggctactaggaagaattttgcagtttttgccatacagagtgcttccctttctacttctactctagtttgatttattttcacattccatctgatacaaatcaggtcatgtcttccccagtaaaccgtttgagtatctccccattgcatttagagaatattcactgtccctagctgacagagctctctgtgctcacttctttagcttcagttatcctcagactcaccatgcatcatttccactggcccctttccccctgagcccatcaaaaccaccttccaccactcggctttatacgttctgttccttctgcctggggtgccctttcccatactctgtgtgcttgacttcttcttatcctataggtcttggatcaagagccacctcttcagagaggtttttctggtccaccctcttctagtagatttgccatcactgcatctctctcttttttttttttgagatggagtctcactctgtcacccaggctggagtacagtggtgcaatctcggctcactgcaacctctgcctccgggttcaaatgattctcctgcctcagcctcccgagtagctgggactacaggcgcccgccaccacgcccatctgattttttgtatttttagtagagacagggt

SEQ ID NO: 73081 - DNA, 1347 bp, Homo sapiens
gacaataccatacattacaaacacttttaaaaaaatccaatctttcttccacattttaatactaactcagctgattctataaatgagaaaactggtaacactgtataatatttttgataaaggaacaaagaaatgaagtggaggccaagtaggttagtaacagtttttcaagtccatcttaagaaagagaaatcaaggtttggtggaagaatgaggctgtaccttattcctaagaatgcccagaacaaatctcctacagctgagctcatggagttggtagatgagagtgtgaacctcctgagtggttctgtggtgccctgaagttagatgggaaaagagaagttaagtgatgatatggcagtcagtctcaggaaagctaacttgctgagttctgaaaatatatccactaggttggactatgctctgtcttttgagaggaacaagaataaagtgtattttctcatcttggcatgatttgtacttggtggttttccatttccagatgatagcaagttttcagaggctatcacagtgctgctttcctggattgaacgaggggaagtgaatcggcgctctgcaaaccagttctattccatggtgcagtcggccaacagccacgtccgccggctaatgaatgaaaaagccacccatgagcaagagatggaggaagccaaggagaattttaaaaatgccttaactgggattctcactcaatgtaagtaaaattttgggggccatctcttttgttgtgattttgccttttcttttttattaattttactttttcatttgggggtaagtagttcaataatttcccatttttactccatattgaatggcaaacttcataacctatttcatgttctgtggcaacttggaggaacacggaccctgccctgagagtttacttctcaaggtgagcaacgtttctgtagcttttcctcagaacagcaagcctggccaccagggcagggcagctagatgcatctgtgcctgctggacccaccatggttcatatcatagctgcagggccgccaccgttcacctgcaggctgtccgcacagacccctatgtcctcctagtgctgacagtagaaagcaaacttgaacacattttccttgggctctgtgtaggaaaagggtactatcagaaaaactcctcaggatcttttatctgggggagctgtggctgtcaaaatgggcaactcaagagtagagatttttttgtcctttcttcatttggaaagcaaattgccttaactactcaatgccagtgattttttttttatgtccagagtctaaatgatgaaggggtgtaagtggggctttctcttagaacaatagtcag

SEQ ID NO: 73082 - DNA, 1067 bp, Homo sapiens
gaaaaaaaaaaagatttcttctaagcattaggtttatttctgctgtctgttctgaggtccattctcctaacatatattggtgggaagagaggtagagagtgtggagggaggcacaatttattctgccagtaacggttgcagtgggcctctcacaaacatcatgctaaattatgggcctctccatgggctgaacgtaatgttaagttgtgtgatagattttatcttacacaagctgcttcggtccatgaaatgagataagaaaccattgcagctggagttcactgagggttgaacttagactgaaattccagagttaacaaaatggtataagtggctacgatactcagtaagtgtgttctgtgcctatgggttgagattttcaaggaaacttgagtctgtcattcacagggtgttttgtgggcattcccaggccagttatctcctctggttaaagtgtgagggcaggggggcaggtttgctcagaaaaaaaacctttgatccccaaatctagaaggctgctgtgcagcaggagaggacttagaatggtgcctgagcatgggtacatccctaaaagctgctttctttcctggggaaggcagaggtttccagagttcagccgtaggaccttgaattaggttcagccccaccttcattcaggacacacacctcctgggcaagcagcagccatgctaaggaagctgtactcctggtctgggaggaggtctttgggagaaaagatactaaagatgtttgtaaagcaccctataaatttacaaagcactcaacggtgggaaggtttcgtatgatgtgtaaaatactaataagaactcaatgattgattttaaaatctggtgagtgaaacgaaatctttttctcaagcatgcatctccccctgtctattcatgtggagtgtatgtatgtttatatgcaaacaacataaggatgtctccgatgcccctccagtggaggggacagtacctggcacacagtaggcactcagtattttttaaatgaatgggtgagaatctgaatctttcaatctaattttgctcctgatttttagaatt

SEQ ID NO: 73083 - DNA, 1315 bp, Homo sapiens
tgtttctgagcttcctagaagccagggagaagaaggaatgatcatgataagaccctagttcctgagatcatcttctcttggggatactggtttggaagatgggtaagcagccctctgagacagctctccaaggtgtgtttatccccaaacctgtaataggcctaactttacagagcttcaagattgctggggaaaaggataattgtttcccgcttcctatgggaaatgtatccgtagtgacagccaagaaataagtgagcatttgcctaagcgtgccttgaaggtctggaccaaaactgtggccattgttacattatggtgtgaccagagtttccattggtttcaggttataggatgcgattagggtctagcaccgacaaaaaggattcaggccgccttcatgtggactttgcccaggccagggatgacttctatgagtgggaatgcaagcagaggatgcgtgcccgggaggagcggcaccggcgcaagctggaggaggaccggctcaggcccccatccccgcctgccataatgcactactcggagcacgaagccgctctgctggctgaaaagctgaaaggtatgggccacccacgctggcttttcttcctccacagggatccccagacacggaaccctgtgcgtttctcctgcgtccaccattgtcccttcagcacaatgtctgctatgccttaagaaggctgtaagagtctggtgtaagcacagactctttacagagctggggtggggttagctggggggtctcctggaagctgcagacacctgggcttcatcttctgcctgggacagacccctgcccctttccagaatgctcacccatgttctccataaaagtgtatgtacagtcactcaacaaaactcactgaatgaggggacagaaaggtccccaaagcaggctattatcttctgacccagtgtttaatgagccagcaactatttgtgccattggtggggcgttcttagtgttcctccagctctatagagtgtgcatgtttaccagactcctaaagccttcttcaggcaaaacagcagacatggtactagggtccatcgaggatagaaaagaaacatagaatgggatccctgtcttcagagatgcagttgaagggacacatgcaacatttacaggatgactagcaagagaagagagtatgttttatttcttctaatgttttctgaggccctccctggtgttttatgctgtgggaaataaagacataggaaggctctggtacctgcccccgtgaactacagtgatgccagattttgaagttaggatgacatgtgaattcag

SEQ ID NO: 73084 - DNA, 1068 bp, Homo sapiens
ccgatgtacggaatgagattaaataaaagcacaagcatgccaatattcccattgccaatatttctttttctaatatattcaccttggaggccaatatgttattttaatgatgatgatgttgaaaaccattctgttctggaacttctttagaattgatcggcaggacccatcttgatttttttaagggtaaagtacattttaagaagtagtggcatgtattagatgagtaatcatgttgggtcattctagatggaaactttgaaatagtcacatttaatacatgtttaaatactgaggcaaagacctgggccctcattctgactctgccatctgtttgatttggaatgttagaagttttacttaagtactttaagccttactttcttttctgtaaaatggaaatcatacttgtgaaactttctgatgattgacagaataaacagagtcatctctgtcacttataaaactttaagtcttttgtgtgtcagtttgtactgagcaacatcagcatggaatcctggagtcttggaattctagcactccaagagataatccagtcaaacagtaccatattacagatgaagaaactgagagccataattgtagaggaagtacctagaatgtcagggtgactactttgaaagaaaatgcttatttgtcatttatatttagggttcttttcttttaaaaaaaaatcctccttttactgaagtcacactgatacactatgaaattaaatggagtttttaataaatgggacagcagtcctcttggggttatagatcagaatcacattgtttattctgttcagcccagaggaggagtggaaatgtccaaagtagctggcggaatctgtaaaccttttcccagaaaggaaacgcttttgctagaccttctgtattctctggagcttcttagtaaacaaagcgtgtggttattcttacatctgcttctgggctcctccagcctttcagcacaggtaagcgaagagtgaggccatgcggaggcctaaggcacaggctgtacaggagaactgtacaaaggggttgtcgggggcaggggtggcgg

SEQ ID NO: 73085 - DNA, 1103 bp, Homo sapiens
acttctctctgtccctcctccctgcccacacctaacctagttagtatgcccagccttgcctggcaagaggcctcaactgcctttctttcaaatgaaatctagttctcatctcaaatatgagactcttaactgaggcattgactagaaagggcagaaaaggagcaaggcatggctagcgggcagcagacaaagagagaagaagtgaggaagggcggcccaggcaccggagccctggcctggcagggtgcatctctgactctgagttccagggagagcaaagttgaaattcactagcttgaacagcagggtctctctgatctgatctaattcctgcagtctctccagacattgtggccacactgccagatgcacaccatgaaagagccatgaaaaattgtttggaattccccaggcctaccaggctctctcccagcaattcccttcctggactctctctgtgtcctctgagcctcagctcatgtgtcccgactcttttgctgagtttggttcccatcctttatcctctcctcaaactcaagtggggaacttactactgttacctctgtaactccagatcctggcagtcatacgtgcccaggaaatgctgaatggatctttaattcaaatgaatgagtgctttaattaattcaactgccatgcctctaaaatcctgaacacaaagccccaacctgccttctgaaaaatgctcatccaattgataaaacactggcctgtgaatcagtaaacaggatttttttttgtttgttttcatctcgtccaactgggaacagacaaccaaaaagaaacctttgccgagccttggctgtggccagtctctgcttggagccggcaacacagagaggagccagacagggccacggtctgtgatgaataacccttccttcctgtcatttcagtacagttgtgataaagttctactgtatacgtaattggattctttcttgctgtgatttaagcagtcctcctctttgcgctgagtagaattacaactcattatctctgaagctcacaggggcagcttttcctaacagggcatggaactgattcttcgggttgcgctgccttctcccctttgtcttcct

SEQ ID NO: 73086 - DNA, 1001 bp, Homo sapiens
gagaacaccaagagccaattcagtccttttctccctccctatcattatataacagtcctgctgtacaaagtcacataacatcgtacagaaagaaaattaatcatcggctaatgagatagggatgtgaaaagaagtctgaaagaagtaatttagaggccccaattagggcctgttctcatggttcccccgtgtgcatcgctggctgatcccagttccaggggtgtgagaagggcatgcagggaggaggcggagggaggaagggcaggagggggtggggacaggggggatatagaagctacagtttgtggggacaaaaagagtcctttgcagtactccagatgagagcgaatgaggacctaaattagcaatgggaacaaaaaagacaatgatatagaaatcctttctaaagtggctccatctgaaagggtttggcaggtcactagatgtggttacctatagaggttttaaaccaggactgagaggagtggtgccattaaaagaaacaaccaagccctaaagttacttaacccaaaagtgtctaacaggagtagagtaggccagatgcccagaatcctgtaagcagtttgctgtggagtacattcagacaagatggagaaatgagtgagagggagcagggaaaataacttagtacacatgagcttccagcctaaggaattgacggtaaccctgtgtacatccctgagacctggcaatggcccgtaaaactggaaatttacaacagaggattcagaagaaatcagtgttggggagggagtctaagaagatttgcttaagaagattttttttttttcttgagatggagtctcgctgtgttgcccaggctggactgcagtggcgcgatctcggctcactacaagctccgcctcccaggttcatgccattctcctgcctcagcctcccgagtagctgggactacaggtgcccgccaccactcccagctaattttttgtacttttagcagagatggggtttcaccgtgt

SEQ ID NO: 73087 - DNA, 1036 bp, Homo sapiens
accataattttccaactataataaaggaataactaacaagaaccctcatggctcttactattcacttaataagacaaatagaaagaataccacatgtcatttgcttagaatcatatatgaatttatgttgtgacattgtggactcaacaaccaaatactactttgtcttgtctctttaggatgaactctgtaaattctgtaaattttataatttctttctttcatttaactgatacttgttgaagaggatactatatgccaagagccatgttggaccctgagataagtgatagttatgttacccgttctccttgcccacacagtctagtagaaaaattaaattaatattagatcagtctatgatttacagaccacacacaatttgcagttctctttaggaatattcatgatgtgtttacctttaaaacaggctctatttttgtctctcccagtctacagctatatactgatattatttaaacagaccagttctgtgttgtttcagtcccttcaagcagtaagtttaaattgaaacctacataaattgtttaatatgatgtgaatgttttctttgaaactaaatattgaatgtttttctttgttctttttaaaatttatgagacgttacctatctctcacatgcctttgtaaacagaaatgaaggttgataaataaaatcaaaaggttaacacttgcatattgcctcagaaagatgcaggtttcaaagggaagtttcctataaagacatttacatgctgtgaattaccatctctgctgttataaatactgactatagtgggctttatatctatatggtgtcaccaggctattacctgacttcaaataaagaggaagttctatagagcaaggaggcattgaatgccagaaagaaattataatttatttagtctttcaacatatatttggagtgtccccactcctcagaaagatagaagtagatgtataaaaattagcgacttcttaggggcttgactgaatgttcaaaaatatttctcaatatttaataattttttgc

SEQ ID NO: 73088 - DNA, 1080 bp, Homo sapiens
taaaacacagtaatacactgaatatattgaattctctttctggacaaggtgggcacttagcaccattgtagagtctcagaagccaccaaaataggaaaaaatgctgactataatttacatttgtgtattgattgcttgtttgtaaattgctggcacataaacgtccatcatacagtttggcactcataataacaacgtgaagtaaataggcaggttgcagcctcacatctgagatgaggaagctgaacttgacattcagctaaaccctgaatactgtgcatcctgcttttccccctctgctctttaccaccctggagactacaaacaagtagattttcatccccagcaggatagtgtaaaccacagcctatttccctgtgattccagtgacactgtgggcagatgtcttcagtctgccaaacctcaacttcctttttcatctgtggaggaggaagaatctggtggagatataatgaggaccagctttttaaatgactaaaaaaggattttgaaaacatagcactgcataaaagcatagtaacaattcaaaactagatgcttctgtgaataagaatgaaatatagacccctgaatgaagtacctaacgttctttgaagttataactgggcagaaaatacttaattgaaaatgaaaaatcctttctgggcacagtggctcatgcctgtaatcccaacatttgggaggctgaggcgggaggatcacttgagcccaggagtttgagaccaacctgggcaacatggtgaaaccccatctctacaaaaaatatacagattagccaggtgtggtggcacacacctgtagtcccagctatttgggaggctgaggcaggaaaatcactccagcccaggaggttgaggctgcaatgagctgtgatggagctgctgcactccagcctgggtgacagaatgagaccctgtttccaaaaaaaaaaaaagaaaagaaaagataaaagaaagattaagaaggaaggaaggaaggaaagaaagggagggagggaggaaggaaggaaagaaaatgaaaaatctgggggatagtctctgcgaaagaaaggaaaggaaa

SEQ ID NO: 73089 - DNA, 1033 bp, Homo sapiens
cccagtatctgaaaaccatgtttcatatactttatctggctttttagttgtttcaggtgggagaccatatccagtcactgttactctctccttgccagagtaaaagtcaaacatttggtatttggcaaacatttcattttgagatgggcaacaatgatgcctaaatatttaacaaatgataggtcttgggcactgaccaagcagaacagatgctggcctaaaacagtgatatggccatactggtgtttaccagctaaagatccatcttgtcctgtgttctggccagaccctataatccatccaatttagggttttatcattgacagctctggtgagacaaaaaaagctttgcaatagaactgacctgagtgtgagttcctactcttctgcttctagctgacacttgactttctccatatcttaacttcccttgctttgttgtactgaagataaaattaaataaggtatgcaaaaatgcctagcaccttgcctggcgcctataatacttggttaaaataattactctaccttttcccataccttcttccacaattcatctggagtcccaaaggctagatttttactcagagggtaattcactcaagaaaaaaaaggatcatatctaggagttttgttcgtgggaaaacgatccaaaacaatcacaaatgtgaggtggggagtatcttagttcatttatgctgctataacagagtaccacagactgggtaatttataaagaaaagagatttatttggctcatggttctagagattgggaagtccaagggcatggtgccagcatctgctcagccatctggtgagggccttcttgttgcatcattccatggtagaaagcagaaaagcaagtaagcatgtgagacagagagagagtggggactgaccttatctttttatcaggagcccgctctcacaataactaacccaatcctacaataactaatccactcccatggtaaaagcattaatcccttcatgagggcataacctccctcatagcctagtcacctttgaaa

SEQ ID NO: 73090 - DNA, 1030 bp, Homo sapiens
cacagttatgaatatttaatatttttgtctacgaattctgtcatctatgtgttatttatttttttgttctactgttttatttttctcattattattggtcacattttcctgcttctttgtatgcctggtatgtaatttctctttttattcattttttactattgctataacaggtagccacaaacttagtggcttaaaaacaacacaaatttattatcttgtagtactgtggttggaaatctcatgcaaatctcactgggctaaaatcaatatgtcatcggggctgcatttctttctggaggctccagaggagaatctgtttttttgccttttccatcctctagatgttgcctatgttttttggctcattgctgtcttccatcttcaaaactggtaatggagggttgaattcttcatacatcaaattactccaaccttctcttctgcctccctcttcccctttttaggactcttgtgattatattgtgcccccatcaataatccagaataatctgtcataaagttagctgattagcaatcttaatgtcatctgtatccttaattcctttgacatgtaaaataatatattcagaggttttggaattatcctgtcatacctggtaatttttaattggttaccagacattgtgaattttaccttgctaggtgctgggtatttttgtattctcatatccgtgaagtttattttaggacccatttaagttactgggaagcagttgaaccttttgaggcttgcttttaagttttgttatgagagatcacagcagctttttgtctagggctagttttgtcctactacaaaggtgataccattctgagtattctacccaataacatcatgaattatgaggcttttctactctaactgatgagaatagtcttttgtaatctttatggattattccttctaaaccttttgggtgtttctttctttagcttagtgtagttttatcacacacatacactgattagttctcaactcaagacttgctttatatctccagggaga

SEQ ID NO: 73091 - DNA, 1093 bp, Homo sapiens
tgaaatttctgactgttaattgtggattcatctacttcagctttccattttattagtttttatttcatatatgttgaagttctgttattcagtgaataaatatttgggattgttatattttcttgttaaattgacctctttatcattatgaaatgactcatttatccataattatattttttatctgaaattcacttttcctaatattagcatgccccctttccagctttcttttcattaatgttagcatggtgtatttttttcagtccttttatttttaacttatttatgacttcgtattaaaagtgagtttcttataagtagcatatagtttttatatccaatctgatatattggattgatctctgcctttggatatttatttagactgtttatatttaatatgattatcagtgtgattgggttaaaatcaatcttaataattgattttatttattctgttttttattccaattttctatttgtctgccaccttttggacttagtatctttatgatttcaattttatctcctttgttggcttatctcttcatatatattgtaagaactatatacttttgtattatgtttgctgtcttatattttacttctatatatatcataaacccagaatacattgtgagtatttttgctcttttcaggcaattattttttaaagagttcaaaaataagtaaaaattttttttttctattcaaccatatatttgccatttccgatattctttattccattgtgtagatcaagatttacagctcatcatttttctctgcctagaggaattcctttttaatatttcttatagtatagatctgctggtgatggattgtttcagcttattatgtcagaaaaagtttttctgtcactttcattttgaaaggtatttttactgggtaaagaaaaagttaaagaaaagatttttttttaatttcagttctttaaaggtgctattctagtgtcttctggcttacattgtttccaacaagaaatatactcttatttttatcttagttcctctgtatgtaatatgtctttttttcctggatgctcttaagagtttgtctttatcattga

SEQ ID NO: 73092 - DNA, 2783 bp, Homo sapiens
ctgagggaaattatttaatttctctgagtcccagttttgttatctggaaaatggaagttatatcatctaattcatggggttatgggaatgaataagataatatatagatgcattttacacactgcagtgtgtagaaggtactcagtaatgggtggtattaatataattattgttatttaataggctggtcttgtatggttctctctcccagaagattttgctgcattgttagaggaagtatttctatttcttgttcctactgtgcttgccataaggaggcagcttagagtagctgctgtcattcattctctacaaatgttattgtgtcaacaaagctgtgttaataataataattgcttgcatttattgtgtatgtgccaggcatttttctaagcatctcagtccttatctaatcctcacccagtgaaatcagtgctgttattacttcatttttaggaataagcacaccagggcacagagaagctaagtaatctgtttgaagtcacactgttagtgagtggtgcagccgggatgtgaacacaggcagtccggcttcactgccgatcagtctcatgcattgtgtcctgctgcctccctgtagtggcagcctttacattctgggacacttaacttagaaaggtgtgaaaacacctgctggaaggagagaagaaggatgctcagaattgagagtcattaacctgcagggtggtgtccagaaggagaaagccattgcccaacaaattcatgcattctactagcaacatactggctttgtatttctttcaataaagaatctccacagtgccaggagaattcctgttgatggtaatggtgtcattgctcgttctgctgagaatcctttctgtaattgcagccctataaacaacagcagcaggaggccatgagggaagtctttgtggagagtaccatggggtctgtcgcctttgagtaaatagaccctatttattgagcatgcagaatttatttaaaataccagttgtaagggaagcaaacagaagcatacatggatttcctatggattgcaaacccaaaataataatagtgcaatattaataatacttacactagctttatcttaatattcattttagcacccagaatgatgtttctctcctcaattctattttaatctgaaatataaacagctgaaggtttgcttgccttgaatcattattaccgtgaagttgagccatctgtgtttttcttattctgctcatggctccaaggagaagtcttgaaatttaacaagttgggagaagaatttctgtggagtaaattcagatatacaatgacacctaaaaccctgcaagtttttatcttattttggagaaatttcctcgcttggattgtgttgagagtgagaattagcatcactctaccaaatcatcgacagtcttcaaaaccctttgaggtctggtaccatgttttatgctagattttgttcagttcatccataatccccaatatgctgcttgctgacttctaaaactatagaattggcatataactggctgtgtttgtttaatttgagatctattaagtatctcttgttaggaaactaaaaagctttatatatgcatatctgatgcttttaagttgctgccagggaggacaaccatgccctcctatcatgcattccctagttgaaaccaagaccttggctggatatagcttggttcactgtggcagtgttttcgtttttacctatgacctaaagtatctgttatattttatagctttaatgaattgacatacaataaattgtacatatttaaattctacaatttcataagttttgacatatgtatatacttgtgaaatcatcacaatcaaaataatggacatatcagccacaccaaaacatttcctgttccctttgttatctcttcctcctacctactcagaccccctttcttactcatccccatcctgagacaaccactgatcttctgtctctacaaattattttgcattttccagaattttatgtaaatgaaacctatagaatgtactcagtttctggtttctttcactcaatatagttattctgaaagtcacgcatgttgtcatatatcctgatggctgaatagaaatagagtggatatccttgccttgtttctgaccttatgaagaaataccattttaagtatgatcatatgtgtagttttaaagtacataacctttactgaggaaatttcctttgatttttagtttactgagagaatggatgtcagattttcatcagacgctttttctgcatctattgagatgatcgtgtgtgtgtgtttctcttttttagtctactactttggtaaattacgtgaattactttttaatgttaaaccaaccttgtatctctgggataaactactcagtcatgatgtattattcattatactatattcaatttgctaaaattttgtttagaatttgcatcaaagttcatgctgaatattgtctatagtttttctttcttctaatgtttttatctgatttaagtaacaaaagtaatgctggaatcataaagcaaattggaaggtataccctttaattttctggaagagtttgtgtagaattagtattattttttccttaagatttaacctctactagagtaggattctctagcaaagtcatctaggcatgaagtttccttgtgggaataattgtaactacaaagtctacttctttaatagatacagagctatatagattatttgtttttctttcaatgagctttggtaatttgtgtttttcaagaa

SEQ ID NO: 73093 - DNA, 1249 bp, Homo sapiens
ccacccacctatggttaacttttcctgagcagtctgaagtacttccaaacattaatatccaattttacctcctatactgcaatttctatgccactgattctctagtatgaatccttgtcaaatgttcgaaaacaccagttatgtatatgtctgtctatgtttttgcatatgtatctataaatgtttatatatgtatatatatgtatttacatatgtatatatgtgtgcatttacatatttatatgtttatgcatatatgtgtatatatgtttatatatgtgtgtgtgtgcatgtgtatgtttatatatctcctctagcaatcagaataaaattaaaactacagagatttttaaacctttctttttcacctttcaacacttttaaatgactgttcaagcagaaagtcaataggcataaaagacagtagttatccagttgagtagtggggatgaggaggcccttgggaatcccctgttgaatctcatatctgtcactgtaccccttacccaccaggctctgtccacactggcctccttttacttctgaaacatgctaggtttgctcttgccttcaggcctttgctccctctcttccctctgcctataatctcgtcctccatatcttcccaccacaggccagctccttgtttttaggaactgaactcaaaagttcttttccagacagaccatcttaaccaatcaaacggcttcctccctcctctctcaccccaggtaactctcctacatccctgtaaatggcacttagcacaatctgaaagtaacttctttctttaccttttgattatgtctatcaatcctcactgggaggtaagcttccagaaagtaagaagcaagtctgtcctgttcaaagttgcgtctccagttcctaaaacaatgcctggcatatggaaggtacttattaatacttgctgggggaaaaaatatttcaataaatcatttgctttagaggactctaaatcttctcatataattttcctctgccatttctaaattcattggagttgtttttcaacattccatttttttaaaggtgttccactagcttttttctataatgttaccacgtcaagttttgatatttaaactccagaatttgaaagcttgttgtcaaaagttggctgcaatgaataaactaaagtgtgttagcatcaattctaaacatgttaagaaaacaaccaaggagaaatttctatttataaagtgagtgaagtgtcaaaattaatttctca

SEQ ID NO: 73094 - DNA, 1051 bp, Homo sapiens
aggcattctccttgataaataattaaacaagtatcatatgtgtccattgaagttattattagacacagccatctggtgcaataccacttctccctcttgagtaatttctcctcctaaagagtcagtttacatgtctaaagctcatttatatgccatgatttcatatctttgtgccgtaactcattctaaatatttactttagctaattaattgattattgtgaaactgactgaaggctgcttggcttttagaaatgatgagaatgattatttctcctgctgtgaaataatgccgcacctcccccattcaaacgtgttctccaagtatatacaacacatgtagataatagacctctcataatccttacctcgttttcagcactcacactgtatcttatatttgcacataagttatttgttctttcatacaggctaggtcagaagaccaaaaaattttttttgttctccccttctccccctctgtcaagtgtagtagaagcagtgttatcatctccagggaagaataggacagccattgtttccgtagaccctactgtcttggctccatgaaatggggttctatatctaaatcaagagatattttcacttaaacaagatgactgtatttagccttgtgaaattccaaccagttgcatcatgatttttcaggcatatgaacttagggctagagaaagttaaattcctttacctctttgaccttcagtttcctcattagaaaatgggactatcaataatatctatctttctttcttccttttctttcaaagatcatatgtattgtggataatgtcatttttaaaaaaggaaataaggagatgttttggagtcagtaaagccctctacgtggattaagtattttaactgttgatcccttctcagcgtttctggagctgattcagaggaatgcatattttaaattttgatatttccaaaattgccctgtataaaatttaaacccattttacactcacaccaacaggggctatttaaaataattttaacttttactaactccatgggtgaatgatatc

SEQ ID NO: 73095 - DNA, 1081 bp, Homo sapiens
ggctggtcttgaactcctgacctcaggggatccacccgcctcgccctcccaaagtgctgggattacaggcgtgagccagtgcacccggcctcatactagttttaatgtcatagtttagtagtatccctccttcactcccatatttattaaccatgttttattgtgaatacctaaagttattcctgctgtcatggagctcatattctgattgtggagacaggtagtaaacaagtaaactgattgatgaacgtatcattagaaatggtaatgattactataaaggaaataatacaatgctgcaataatagaccataagggggaacttaccatgaatcttcaggtaaccacgaacagtgtctttgtggagactaaatttaaactgagattctgaggtatgagaaggagccagctctggaaagtggagaaggaagagcatagaagaggaccccagaggcagaaggagcttgactcgcttggagaagtcctggacaaccagcttggtggttgaggtggaactggttatgtgaagagctcaaagtggttgttagaggccctgcaggtcctgggaaagggtttgatcttaattctaaaattaattgattgaaggtgatttatttattcattccctgaaacagagggattctatgattgaatttaatgttaaaagagaatggatttgggaagtggggtaggaatagaagcaagagaatcagttaagaggccacacatgtccaggtcccaggtgagtagggctttgacttggggcatgatagtgaagttggagagataaggacaaattggaataagcttttgtggtagaagccttaggattttgtgatggattagatgacaggggagtgagagagagagaatcaagatgaatgccaagtttctagcttaagcaactgggtaaatgggtttatgaagtgagaaacacaggaggaacaaatagagggagaaatcatgcactcagattggtacttcccgggttggagctcctgtgggatatcttaagtggtgatattgagtagacacagggatatatgggtctggagtaagagatgggtgggccagtgataat

SEQ ID NO: 73096 - DNA, 1140 bp, Homo sapiens
taaaacctacctctgaaaaaaaaaattagtgggggcatggtggcatgcacctgtagtcccagctactcaggaggctgaggcaggtgaatcacttgagcctgggagattgaggctacagtgaaccatgatcgtgctagtgtactccagcctgggtgacagagaccctgtctcaaaaaaaaaaaaaagaagaagaaatgataagggaaaatacatttactattcatcaagcagaagtggatcatcataaaggtctccatgctcctcgtcttcacgttgggtaggctgggaggaggaggaaaaggcaaagttgatcttgctgtctcaggggtgtcagaggtggaagaaatgaaggagatggaaggggaggcaggagaggcaggcatacttagtataacttttattgaagaaaattggtgataagtggaccttcaaaattcaaacacatgttcttcaagagtcaattacattagagtatttgctgcaggtcatctgtttcagcatcctctggaaagtagatttctgggcctattttagaccttctaaaccatgaggcctggaaactgcaactaaagtttgagtccctgaagcaccccaggttcttggctggtggagaaacaaacaaaaaaatcctcatttggccttggaatgggtagggaagcttgtctgatgctacatttctgtggtcttacttacgatgcagttttaaaactgaaaaatttttaaataaaagtagctgagctgtaaagtacctaaaacatagttgcatatacaaattaaaactcgtgtattgagtatctgctatgctccagcactgtgctgtggtctgaatgtttgcatacccccaaattcatatgttgaaatcctaacccccaaggtgatgatattaggacatggggactttgggtggtaattaagtcataaaggcagagccttcatgagtgagatcagtgcccttttaaatgagacccaagagagccccctcactgcttccaccatgtaaagacgaaatgagaagaggctgtctttgaaccagaaagtgggtcctcaccagatggcacatcttccaagtgccttggtcttggacttcttagcctccaaaacataagcttctgttgtttataagctacctagtctgtagta

SEQ ID NO: 73097 - DNA, 1050 bp, Homo sapiens
tcagcacgatttcttttttataaataataaaacctaaatacatacgatgactctaagctaacatgaaattgcattcggtaccatgagccagatatttttctctctcatctgtattctttaaggtcaatttttgctcatgcctccttcttcttttccacaattatttatgtaatccatgaataaataacggaatggcattcgatcctgaactgagtttggcaaatttgagaggaagtatagctttatcttacacacagtaggcaggaaggagacagtgcctcagaacacaaccatttaaaacctttctaggcagcagcagatttacttactccatatcagatcaaacataacaagtgtgttcacatctgatgtttagtataagtttgtttataggaactttggagatgattttttaaatcattttgcttttgaaattatttgcctgcaagttatttctttcatttaaaaccagctctaatttctccataatggtgcacactcagtaatttctgcaaagtgagatagcccagttacaaatggttttcaactataatgactttcatgtgaatactaaatttgataattagaattgtcataatatggaatttataaacatttagttaaatatttgttttagatagtgtgcttttcattgcatgttgacacaaaatattttcaggtcttcatcattattgtagaccttatgcctctagtgcctagttgagaacacagccctagttaaaaaaatagactagttgctcagaggcagatgggtcctttggtctgtaagactgtagtagaaaaagagactatttgaggaacatagtcctccaaatgccatctccttgtaaggaaggatttttatgtggcattcttaagaggcaaatatctcctcctattgaaaaggagaatgtgttaatgggggacggtaggggtggaggacattttaatgcaaatctgtgaccaagacagacagagggtaaaggccttgggtctgtagcaacagtgttttgtagtgcccttcaactttgccttcagagctggagcctt

SEQ ID NO: 73098 - DNA, 1042 bp, Homo sapiens
tcctttgaggtggaaacctgggattcatttttgaatgttaccttcttgggccctcacacatgtcactcactccctctcacttccacattccaattgctatctcttctgtctccagaagtacctcttaaatctgttccctctcttcatctccgctgccactgcctcatcttgtctggtctcccataattacctccaaatagatttaccctcctcaggcttgtcttcctgtagagcttactctgtacttctctaagaattattgctctaaattacaaatttgaccctgtcactccccatttaaaatattccatttggtctccattgcctgtaggaattaaactccttagcatgacccctgcctacattgttagcatcgttctccactttttcaccatgttccctttaaactacagccaaacaaaaatactcattttctgtatcatgccacatacttttcacacagaagtatttttgatcatagtgttgtcatgcctgaaacacattttaaggtgttttattatccctccccaccaattttttcctctatttaaccttggagaaaatctaaaattaccttcaaagttaattgttttttcttctgtgttgtttctgttaacctgcgttttaatgcatttacccatttatctgctttatactgacctatttttccaggtctcccttctttggagtgagtttcttgttcacctagaatttaaaatggtgctgcacacagtggaagttactaaatattcactgaatgaatgggaaaaagaatggatgaccctgaaatcggtccgccataaaccctaaccattggcactaagtccattctttggcgtattgcttaactaatctagttcaccttctatatccgctttacttctaatatgtgaaaatcagtctcatcctgtatcttttgccccaggtcacaaacctagtaagttgtcattctaaaactggcaccaactctttggaattccggtagtcattatgggtcatttccatagttgcactaagttctcaaggtcaaatgattgaatcc

SEQ ID NO: 73099 - DNA, 1028 bp, Homo sapiens
tggacatgtggaatcagcagggaaatgcttttcacttttagctcacatatgtttttaagtagaatttttctgtagtggtactgatatccccagtatgagattagtagtactattttcttaatggtcaaattttgatatttatcaatagccatcataatgatagatctgctgatggcatctggcacattaatttgtaaatgtggtagaattccaacaccgtgtaaactctttctggtggattttactttagaaaatcaactcactgctcttccaatctgtctgccttcaagttgttgcatgaggattcatctcaaatcaccagcaaacctgcaacttctttacctccttctccctttctctgtgggtaggcccattctctcaggaataccagacaagagggtcaagctaccgagaaacatgagaaaacatgtctagtaatagacctgctgaaatcactctatatttgtttttcttttctttttacatcagggtccatattaatttttcttaaaaagtaatagttagaccaccaatggcttagcaggaggaagattggtcatggtattggattctaaatttttcaaatacagtttgagaaaatattcatcaaactttgaaatagaataaagaagagtgagaaaagtaagtgtaggtcttaattccagtgagaggaatcagcaacttcgtttcaaatacattgaaacctgaatttggaatctttcatacagaaactgcaaagcaaaatttaaggataagcaatgcattattcccaaaagtgttgagaagacaaaattagattaacaggtctaagcaaaaaacaaagctagtaagtgttagaaacttagaaaaatcttaaatttcaagtgtgctcttaatacttgagacatagacataaataattaagcacaaagagtctcaaggatgcttgtataagagacaaaattaatatagggaagcctccttaattagggtgaactagggagagagcacacttgttggaagtaggtgatgtttcatttcaagggcag

SEQ ID NO: 73100 - DNA, 1096 bp, Homo sapiens
cccacctctggcaagtgcatatggttaagagacaccaagacttgataattgaaaacaatcatatctaaatcgcttccattggttttaaaattttgttccatgcaacttttgctggggccatagaatgaagggttaggatgcgaagtgccccacatctgccacattggcatcaccagagcagccctgttttcatcatttgtttattgaggatctgagcagaatttcacctccaagaacaaaaacttgaaactagtgtagtctatctgacacagtaatgaggaaaccacggctcagaggccatatgtctaggaggtatgggaatgaggctccagtaggactttcaacttcaaattccaacctcaacttccctatattgaagtgtcagattgtattttagagatcatactggtccacattacagggttgtattttaatcttattcattatttttttaagggttatatggatttctcagccacactcacatcagagggaaaaagtagattgttgtaagcgttatgacgattactgattgtcattatcatgtaaaagaaatggagatcttaaagagtaatgtgacttttttgatcttatagtgattgaatgcactaagactatgatccagatgttttcactccaaagcacttatctatacattttgctttaataagataatgttcaatctgtcatgaaagtatgtcaaaaaattttagatgtatttgtatgctttaattttactaggtcaatatgagaaaatgaaattaactatatatgttaattaacagaaatatacttaatctggactgaaattttttaaggagttaattagagatgaaattttttgctaagcttatcccgtttcacttcagaagcataatttgggtctccctttccattgctttgttagaaaggcagataacttaaaatgcagtctctgccttcaactgtctttcctgttatagatttttttttttggaaaatgcaaagagaattccataaatggaattggaggatacctcctaaaactatttccacatggtttatctaaatcattgtttctgatatttatggcttctaaagtgaagttgtatcaact

SEQ ID NO: 73101 - DNA, 1041 bp, Homo sapiens
atacttggagacttggaaggtatctcagtgtagttgagccatggtacaagcactaaagaccaggcctatctaccctagggtgttttgaaaagccccctgctgtgttgaaagcctgctgtgtgctctgttgttagggcagctattaatccctcagctggaatgttatgcttttgacactattaagggatgctggaaataataatactggcacaaagcatggagccttctaatgatcacatctgcactgattctactgtagatgtttccacttcctgataatctttggtcactaaaacccagagtatgccaaattttattttcctactctggggagaagcttcctgttttttcttcctcctgggagtggaccttcagccttatgagttggaaaactaaatctccaagggagacctctgtgtgcatcttgtgaaaacctaaaggtttattgctgctgactttttaacactggtgatttaataaccttttaattgttataatttaaaaaaatgagatccagccagcatttgcatttttggtagtcctggagatggtgatgtgtattaattttagagtatagtcgaattattggggtatgtatcataatttgactctaatattcattgtcttatatgttgggaggactaataaattcaacaaaggatcctgaattcttaaagctcataagtaaaaaactgaaataagatgatggtgagaatacttttacatgcttcatagttttgctgtgatgactaattgttgagttactaattactcaactaccttaaaagatggagaggagtgaagtgcttgttattgtcattattgttgttttactgttactctcagtacagaaaataacatcagtcatattctcagagatcagtggttgtgtaggctttaaattaagtcaaaccttgctaattgcccgtgaggagcaaagctggttccctgctgggaaacaggtgcatctttgctacttgatgctgatgttgtccttgctgttgtcaccaagcccagcatttccatggctctcttctccaa

SEQ ID NO: 73102 - DNA, 1027 bp, Homo sapiens
tcccaaagtgctgggattacaggcgtgacccaccgcacccggccaatctgttgagagacttctgtgttgtttccagtttccagtttttgactactgtgaataaagttgtgatggacattcctgtacaggtttttgtttgaacataggtttttatttggctggatgaaaaaaaaagtcatacatttttgggataaatgaccaagagtgtactagtaggtaattgcgtgtttagtgttataagaaacttttaaaatgctttccgcagttgtaccattttacattctcacttgtagtgtaaaatggctttgtttctctgcatcctgaccaacatttggtgttgtcattttttattttagccactctgataggtgtgtattgatacctctctatggctttaatttgcatttccctaattctttgctgaaatgccatgcatctgtgctaacatgacagagtggctcagagccggctggttgagggtgtcctcactcacatgtctggtggttggctgactgaaagctggagtgatgagatggccaagccacacaaccacatgtgtctcatcatccagctggccagcttggtggtaggcagaattctgagagaggagaagctcacaagacctttggagacctagtctcagaactggcacactttcactccccctgtatcctgttttcaaagcaagtcacaaagccaatccaggttcaagggatggggaaattgaccctacctcttgatgggaggagttgcaaagtcagatatcagagggaatggatacaaagaggagcagagaattgagggccattttgcaattaatccaccatatcaggtctctcgtataattatctcccatacatttttatctttcataacacacattaaccttggaaacagtatgttttaggggaaaaatattcagctgggagtttgaaaatcaatattatatgtctatgttaagaaattggattaacgatgcttacaaccctaaaattatccagcttttttttttttttttttttttgtt

SEQ ID NO: 73103 - DNA, 1034 bp, Homo sapiens
gttggccaggatggtctcgatctcctgacttcgtgatctgcccgccttggcctcccaaaatgctgggattacaggtgtgagccaccacgcccggcctcatgcagattcctaaggcacagttgctgctcatggaagagaacatgctgcttgcagggaagtgcacagattcaatgtgttctggcaagtggactgtgcatggaggttggtatggagagcagggcagaagacacagaccatggaggacctggtagagtccaccaaagattttggacttaataatgttgtcagtgtttttcaaatctgtctgttcataggaatcccatgatgtgtttgtcacaatactgatttccagatcccacccaagacccactgaatggacatcttcagggatgtggcctggtgcagcagacatagtcagtttgctactcatgccctgacactccctgcttcaggatgcaattctgcaagtacctcctattccccacctggggtttctctcccgtgtgtggggaagcttagtagtgcagcacagttaatggcctcaggaatagacctcagccagtgacatgagagagttgggtaacatgctagcatcctcagttacccacagtcatagccagctagacaacctgtgctttaaaagtggctgtctcccttctccattcctctaccagtacttcctaggatcccctccccaaataaataacttgtacttaaattctgtcacaaggttggcttcttcaacgtaagatatggaagaatctgctttttttttttttttttttttaaataacgaggcaagtttgggagacctggcctcaggtgatagagacctactgatgagggcattgctccttagatttgcagcttagaaagatgattctggcagatgtgtgggaaatggattgatggaggaggagttggggacatggagaccagctaggaagtggcactgctcagacaatcatgagtacctaagctaaggtataactgtggggatggaggtacggaaaggatttgagatggattctcta

SEQ ID NO: 73104 - DNA, 1089 bp, Homo sapiens
attgccttccagtgtatcctcgtctggctcagcataaatgatggtttatttaatagcggggaaatggactacatgatctcctggatcttttagaccaaatgatctgtgtttcagtgaatcactgtatacaggaaatgggaaatggaaccatttttcttaactgatgttaaaagaaaaactttagacaaattaaatttgataaatataaaactttagacaaatttaaatttaataaaattaaatttaacagagcttaatagaagaatgattagagaagcagcagccctcagaaccagcagaggttcagagagctccacttcacaaagtgggcaggcaacatttatggacagaaaatggaaatgaggagcagaaagggcttgattgctctcaatggctcaatgtctgttttatttgaatatggtatagtcagcggaccacctgtgattgaccaaagctggctgctgtggtcgactgagtctcagctattgttacaaaaatatactcctagttaggcttttagttagtttaaatactgttagattgtagttccttacatagggactcaaagtagagtcccccagggcaaatttagtttaacaccggtaactctcttaacaagaaggtattccattatggatatttcacttctgctaacctcccaaactccatcacttgctagctatgaaactttggtcaaattacttgaactcttttatctttggtttcttcacacaaaaatgaggataataatacccatatcataaggtgttataagaatttaattatatgcagaaagctctcagcacagtatctaacatgtaataagtgttgaataaacagttttacaattactgtttatttttatcataattatttatagtggatagtttctaattaagtgcttccctctttagagtagtcaaaatattatttatggctgtttactatttatacttcacaagccctgttgatgtgtgctcttcttttgataggtacaacataagaggtatgatgcaattcttaagcgtttgcattgtcaggtgaacaagcttcagtcaaatagacgacagtggcaatggaacattcaac

SEQ ID NO: 73105 - DNA, 1073 bp, Homo sapiens
tagtttgaatggggtaattaagtttgttatgcatgatcatacgaagtagtaaatagcaataagtgtgctggacctagatcttttgattcttaactcagggctttatcattttttatcatattgtcttccctgagtgtatacttctgatgcctataaataaattagtaaaattattataaagtatcttacatatataaaatgtcaagataaaacaatgagattttaatatttagaattagatgaacattaaaaaatatataactgaggtccttctgaaattataaaataattgtgtttattgcatgtttccttgtattcattaatttttaaatatctgataaatatattcttataagtgatttttcctatattcattatggattaaaacattgattttcctctcatgtttaatattttgaattaataatgataatgttaaaatgtattacagaatgaacttcatgagcttgaaaaagaaatagcagctatctctgcagaaactaaagaaacagaaagacaaatttatcaacaagattctgccatagagaataccaaacttcattgtgatagcctggaaactcaaatcaaatccttacattcagaaaatgtaaagcttaaatttgacatagaaacagcccaagaagattttgaggaacacatgataaaatataatgcatattatgcaaaaataaaagcacataaaaatagtttgggggaagtagagagcaaatggtcatttatgactgaactccatgaaaagcgagattttgttaaaaaattaaagacaatgaaagaagaacttatgcaagatcttcaaaatccaggagggaaccgaataacacaagtacaggtgtgcaaaattacttagtaaaactattttttctattactccttttttgcaagtacatacattaaatgataaatttattgtgaagttaataaaatgcccatagctgtcctattaccttcagaaactattttcataattgaaaaaaacttggaataagtacatgtgttatataacaacgaccctagatgctcaaatgcataaaggaaacatccacaaatcccct

SEQ ID NO: 73106 - DNA, 1043 bp, Homo sapiens
gagattattaaaaatacttattattgggagtcacttttaaagttattctctgtcaattattctgttctccctaagtaaggtttacatggctattccagttttatggaaaattttacactcccaacatataaagattcaacaatgtcattgcaactgtaggataagcatataaaacctaacatgttagatagaattattttacattcccttatttgatagtgtttcctaaaatgctgaattgaaggaaggttaagttttaagccagtgtttgtaaagctatggattgtgagttacttgctgtcagtgaacatttcaagtagcctccctctatgttcctttcctttttaaatatattgataatcctactgcagggaatttgggagccatacttggtcttcgcatgcaacgtaattagatataactatactatgtgaatatgactaaagaaatgaaaatgaaaacagtatcttgtgctctgtaacgattgttattaaatatatcatagaaatgagaagagtaggctcaggagctgaactgcctagttcaaaaggccaaatttactactttttgttccgtgaatttgttgtgctcctgtttccttagttgtaaaacagagataacaataggacgtgcccataagcttttcatgaggattaaatgagttaatgtgtttggtggggaccaggtggacatggtactggtagggccctatttgacattggctttaagtatcactggttttaagtgcatcagtagatatatgatgacaataattgtattatcatggtgatatggatttcttataaatacttgtattatgttagtcacttctagaaaagaatacatctatacagtagaatataattcaaaaaataatgtcatatttttgtaaagaaattttttgtaaaacttttcagtcttcaaagagtttcatagactttattccatttatattgagagcctactttgtgttaagcattttgctgaacattgtcctcactcttatgttacttaccatctattgggaagagaaagaagtaaac

SEQ ID NO: 73107 - DNA, 1039 bp, Homo sapiens
tggtgttcacatctaaatttctgaaaaggtgatctggttactaaaatcatcccaaatacattcataaaccagatccacgtgtgaccagccctttacaaaaattaattacagttgccacagcctttacattcattcttatcacacgttacaacatgcagataacacaaagaaaggtcaacaagctgaagtaaacattacagcatcaggaaaatgaaaacccatctgtataaaataaatacaattttgtaataactgtaaagaaaatgaaagcacttaataaaaataatggcagttgaatgtataactgtctcatctcccaatcataaaataagttactgtaaaatgcatagactccttacacttaaagaatttgtgcatcacagtcatgtgaagttgaactaatcttaaactctgtattttcttgtggaataaaaagggaggggaggacgcatttaaagttagtgaatgtattgctcttactttaggtataacgtggtagttcaagtagataaaagcatttaggaaccctcacccacttctatctcactcctacagaatctctagtaattgcttttctgtaagtagatttttgggagaaactcagagaagcttattctatgtaacatgacaaaacagaaataatatctatatattcagcagctggaaggaaagataacagtgacatacgagttatatgcttttatatctcaaagtgggatttgatatttatttttacttgattgtcctagagttatacttccaatgtatccatcttactttttgtgtgaactcttagagaatgctaccaatctatgaaagttcagcactttaaagaaagcattactcagttattgtgtgttatcgtgtttgtatgcatgagtctttgtgtatgtgctaaatggcaaataagaaatatgtgtgttaaatatgacacatagcctttttgccctagctaatataaattaacacacacataacacattggatgcagtagaataatagatttctctctatagattttttaataaattatgcagta

SEQ ID NO: 73108 - DNA, 1053 bp, Homo sapiens
gacacaggaaagtcacctctcaccaaaggagatactgtgttctccaggacaaacagtaggcgggtctagctcatcaatgaagcctcgcatcccacataagaaaagtgttgtaaatttttcctaagaggttccacatttcaccagttaatgggctcctagtgagcccattccaggttctctagagttaaacactaccaaagccttagacgaacgcgtgtaggtctgaattaaacatccctttcccctcctgggccccagctctctgcatctcaccctcaccaggtgtttatgttatgtgtgcaagtgcatgctacaacagaatgaactaatgacccatcatcaaacaaattccacactcgaacacttcccagtgtctcatacaaaaggtgcattcagattttcatttccctcttcttagtttttgtttctcaagtttctcctttagctctctgtgtgcccttgcatgttctctcctattcttggagcatgttcttgaagtgggtttattcctcctttgactgccctcaaggttttctctttctctctcctccttgagcctttgatttctggcttattcactgtctcaagttccaatttctccctcctccagcagatcccctttctgcagatctttctataattgtgcttgttgttttcctctggccgtcttaacttccaagaatggcctcctccttggcttgccctttcctcccttgtggccctgggatggggctgttttctccggggcaggcccagattgtcgcctttcctcagcagggaggtgtcttctccctgctgttttcttcctgtgctttttgtttagccctagctgttctctcagtttcccacttccccttcctctcttatcttcatctaaatccatcacccttgactcatgtgatttgtagctttcaattttgcaaaaattgcctgtcttaaaataggttgtacttgaacacgctgtgtacctcccttacagaacagcgcattattacatgaatctggatacactgcaagtcacatcctgacctctaaattgcaactcctcacagg

SEQ ID NO: 73109 - DNA, 1034 bp, Homo sapiens
tgagccccggagttcaagttcagcctgggcaacataacaagacctcatctcttaaagacaaacaaaaaaagtgaacatttacttagaatgagaagtgaaagcataacaaatcacttgttcaatgatttgaaaggcaaaaggtcatgaaaggcaaatgaaatggagattccaggggctggcctgtgcatacgtccatggtgtaggtggttaagagcagcagcttcagagtggtcttgatgaggtggaggacctgattcacacgtctctcccagaccaaagtcaataaagttaaatccattcatcaataaaggagatttgttacatgtaaactgcagcaatttcgtttgttttcctttttttaagacttcatagatataaatatttacagatatgtctgatcctacattctaatttgggatcaggaaaatacagttgtgtgtttcctgttaatcataaccttcatctagaaaaggattcttcttcagatcctgggtcttacctggttggggaagggagcctggaaatgtgggcctgggatatcaggtcaagattacagtgcctttactgtacagcacactttgttttgatcttcttctccttctctcccatctctctcatgtgtgtgagttttcagatgttgtatggctgacagagaaagtatgtgtgtaagaagacatgtggagagtcctgaccctgtgggcttctcatggtcttctgggcagtttggaagagctaaagctattcttttgagaaagcattgtcctgctcaaggacagggaagggtgcaaagcctatctgtatcttcctcccatttctttttctcactgtcttcctcacttgtccttctctccctatactggaagcctacacaaatactcactaattgagatctctgaaagatccaaaagcatgaatagctaagggtggtagagttttggctactgtaacaggaaatgggaagttcaatgtcgggggccgtgggatggtcagcttccgggcacttatcaaatgactcaggctatgcctgcccactc

SEQ ID NO: 73110 - DNA, 1055 bp, Homo sapiens
ggattctatttagctgtaattgtggaaaaggcatcatcaaggttgctaagcagcagaaattggtttattggaaacaactttctgtgaggaaagcaccccttgttccccaaggatgtgtgtcttcttgttgattgacttgctgagtgaattctgcaaaagattttccccttatacctatgggagtactgggaaggcaaagcggtagagaaagaatcaatgttagaaagtggatgaggcactcttaagcaattaagggaccatgtttcttctgtccagaaacctctaattaggaaatctgaggccctgtttggctgtgtgtcctttgccctgctgtcaggcctcattatgggctccaccaagatgaggaaggaactcagagacagagaagggacatgtgtcatgctgggatggcgatcagtcaacccaggaaaggatgtggacttaagctattcctagtgacttgaagtatcacagttgccacactcatttagtttaattatctagactagcagttatgctcatgggaccatgaaggtaagaaaaacagtaaagctacctgtgtaagtgtatgtgttgggggaaaaccattggcatttattgaatgattaatatgtgatagttttaagcattttttgtgtacaaaaattaatactattagtttaacattctttgaagagagtgtggagaatgtgggtcaagatttcagatttgtgatggagtagagtctagacctgcctgtttaggccacagtgctataatcctatagttcaaagattcccaaccagccacatagtggtatgtagtcagtgggtcacatgtgagctgaaatactgaccctctcagtcctcaggagtctaggtagtttcagtggtcatgaggccactcaggtggtcacgtgtggccataagaagattctcctttcaacttaacctatgtagcagatgttataatttttaacaaatgtatgacaggaagttagaaagttgtgaagcaatactatggtctgtttcctatgtaatatggattgccctgacttaaccatcaagtgaatggga

SEQ ID NO: 73111 - DNA, 1050 bp, Homo sapiens
ttcagaaacccagcctgttctatctcccgttagacaaccacctcacctgtggagagaccatgccttcccaactgctgcaaaatagaacctctcccacccctttcaataaagggcctacactccttaataaggttagcccactctggacattagaaccctgaatgaaaaaatcaactgcatttctctgcttgaagcatcttcttcttagcagaatgtgcatgatagggtttctttgaactttatataggcaattaaaaacaaacaaacttgagatgaattgaaaccacacttagagacaaactctgcccagtttgctaaaagtccatcctgtttactcaatatgatgaactatgaataacacataaacaacataatgctatagccacagtgtgggaccattataacggatatcaaaagagaatgggcttgggcatcatggaaaacttggtggttgggttctaactccaccacgtagtgcatcttatagagcgtcactatccttatctgcaaacgagggatcctacaagtcaaatggcagtgctgtgctcagcttaagcccatgatatgtagagcacctagtgcaggccttacagagtaagaaacactcaacagaaagtagccagtgctgcaattattcgtccagtcccttcttgatgatgttatggtgtaacctgaaatgtttctgccttccttcttgtctagctcccgtttgcttgttatcatcctgactttgtgtccttcactgatcctcatccatgcctcacacccaaccttgatgggctcatcacttcctagtcttagtattaattgcaaagggttttctgtatactgtttgctcaaaacttgaacctaaaagtagtctacatcaactgcttttgtgcatacagattgagctctttatattactatttgctgctctatgagaccaggcaaatactggaagaaaaacatgcttccaattctcccagagctgcctggaagtatcttgtggtggatgaagcagagccagagaaatgtgttcagcttgaaataaatgattatactactcat

SEQ ID NO: 73112 - DNA, 1015 bp, Homo sapiens
acaaaaaggaaagaaaacaaatcctgcaagacaggcaactgcctttgatttagaaatgcatgacctagagttagagaaaagcttgaggacagtttgtacattctggtcctggctttatacaactgaaactgaggatggcaaataatttcattacatctaacagctccagttgattgtgaaggctctctggaccatgaggaattatgaggtgagctccaaggcttgggttgggaccctgtggttattgatggttgtctgccatactgcagaagaggagagtggtggaacatgggtccttgttgaacaaccgtacatccttaaacaattaggaaatctcctaatttgtttaatcgtgagtgtttagagaaacagttctccatattcctgagagtctgagggcagaagctgaaatgggcaaagaacatatagaaaaggtgacacttttccatctaaaggagagacgaagaaataatgagcaattttgttatgatctaccaaactaaggtttcattatgtttgcccctcattgtggaaggcactgtttgattggcaatttgcaccactaccatatataatttagtcctggagtatgtgccaagaactttgtaatgaaaccctggttattcctaactataggatttatttttcaagtgaaggtctagacaatttcagtaactggcccagagtgtgaggttgagaacggaaggagctttagttctcaggctcctcaaccactacctaccatggtgggctgacgctgcatttcttgcttttccctagcagtcacctagtcagtgctcctggctaaaagagagatccttttctcttttgacccttaacatccactggtgaccaggaaacagtgccagctatgtctacagatctcggggacatgcagtgtggagggtcaggtagttgtgtggttaactggtctaggtctgcccaacggagtccatgtgtcagggtaagaacctggatccccatctgctatacttttgttttctcaagtaactcc

SEQ ID NO: 73113 - DNA, 1051 bp, Homo sapiens
tcttaatcccttaacatgctgagttcattctaatctcaaaattttactcattccagtttcccctcttggaatgcttccctccattccactgtctaacttctattcctccctcaagctcatctcaaatcttcaagatcctctgtgaggcatccctgtcaacaatttcagctcatttcaattgcttgcttctttcttttctcattgcctactatcacacaatgatggcttcattaatattcaggcttctatttttctgcaactgagttctactattggaccaaagcatcttgaagtcagggcacgtatttcaaaatttctttttatatctcttgcaattttgaaagataggtatttgctcgaagtttcatgtacatccaacaaaagatgtgcaaaatctttatactaaaatctagagaacgttactgagataaattgaagaaggcctgagcagatcttaagcattttcatcacacccacaaaaaaggtaactgtgtgaggcagtggatatgttaattagcttgattgtggcaattattttacaatgtatacacatgtcaaaacatcacattgtacaccttgaatatgtacaacttttatttgtcaattatacctcctaaagaaaaaaaaaagcttaagttaataaaagtataaattgggctcttggatgggactcagtgttacgatgcagaagaacatcttcgcaatagtgggaaagacaaagctttcgtaagtagcacataaaatgtactaaacataaagttgattagacataaaataaattagactgcattaaaaataagaatctttgtttatcagaagacaccattaagagagtgaaaacaaggccatggattgggagaagatatttgtgaatcacatatctgaaaaaaaacaaaaccttgtatccaaatatataaagctctcctacaaattaataagaaaaagaaagatatcccaacagaaaaaatgtacaaaagacttgtagagtttacaaaagatgaactctaaatggtcaataaatgcataaaaagctgcctctgacttcattact

SEQ ID NO: 73114 - DNA, 1034 bp, Homo sapiens
attactcaggaaggctgttatggaaggaatgagaatgaatgggcccacgctgacttagaaattaagttaaaacatatggcaaatgtttttctgatatgcacttaaagcctggaacagtccaagaggccctgggtttccctgagagggaggcttttaggaagagtgtaggctgcctgtggctgctgcacctaactggattacaggcctctgtgacgctgcccatcacatctgcttttcagtaatgccgtaggggaggcaagctgtccccttagacccttagcatgatctgtctatgggtttcacattttttcctggcagagttagtttttcgtgtttgttttgtgaagaaaaactttgtatacttctttccttttttttcctttgcaataaagtgttgaacaaaatgtatactattttgtccaaactttttaagcttccagatttggatatggtgtttatgtctgtggcttttagaaagtctgaatggatctgaaaggtcagaaaatacctaaacatttgactctacccttcagctcacacgtgattggctgtgcattgttttatttttaaaaatggtaaatgagaaactattctttagtcatatcttgttctcagagcctttccccctcttgcagactgtgccgccacccaaaagcttgaaaacaccccaggaagccatcccctcattgtgaaatgactaatcaccacacaccacttggttttccttcctggacgtcataggccatagccctgtagttcccacattgtctctgtcatcatcccaaggagtgtgactcttgattctgagcctgggcaggacagcctgtctcagcacaggctgttatataagcggctgtggggagagctggcaataaacaaacatttttccagcccttgttttctctgcagccttgaaaaatatttttctggggctgctgctgtgctcctgcaacaggatggcaaattcccagcttagaaatgtcttgctctgcatttccagattctaaaatcagaacaaagtgaaccagcatgtt

SEQ ID NO: 73115 - DNA, 1161 bp, Homo sapiens
agtttcaagaaggccgaagaagagacctagagccagcagacgagacatagggtttgattaagggctcacatacaggggagggaatccagtggcagcaggctggaggggagaaccaccttccgtattggaagagtccagtggcagtggactggacagcataactgcacagcccagtggtggcagtctgggcaggaaaactgcaaccacttgcaaacagcatatggttcacatggcattttcagttaacaccctcccaccaatgacctccacctggtaaccttcacttagcccaaaatgcaggacctcaatcacctgcatggcccatgttccacgggacaggccgagggctcagaagtttatcatagacaaggaatgaatctctgggttggccactcccagattccctagcacaaaacacacattcagatgcatctgccaaatggggtcattccaagaatgtgcttaaattattgctgttaggtgactacaccttgcttagctgcaagggaaaatgcaccattaaactcaggcctctgtagtaggcagcaatggagtagaaggagttggaacccatcgtataggggtcagccaagtgtctgcctcagatcacgctctgaacttcaggaagtaggaggatgggctgtagtccatagcttagccctatatgttggaaaaggtaatccagagaggcgggatggtagtgagaggcgcaggattgagttcctaaaagcctgacgggattcttccttccacctgaccattctgtcttcatttcccaggaccacctgtggaataacagtaatagtctttctctgggagcaagttaaggctttggggaagagaaaatgaggtcatggttattgaaatataaaaactttcctgaaatacaaaattttctactaccacccaaatatcaccccgggggtttcctactccttaagaaccagataaaatgagctcaagtctttatttcttggtgctcttaaagctgtctccagaatgtcttcatagaagaaggaggtttgtgttctcatagccactccagcatgcagttccatttgggctgcctgtgagttcagtccctgttttcccccagttggcccagacatggatctcagggttgttttttttaaatttccaccaacctctctccaagttctg

SEQ ID NO: 73116 - DNA, 1042 bp, Homo sapiens
ttccctgtatcaggtcgataaacatatatggttctgtgtgtgtaaaagtgtgtgcatgtggttgtgttttgtcctctctgcctgtaatgggaatgacaattcaagatagaaatggtataatgagtcatctatagcaggcaggggtgggggaaagtggtgggtacaaaaatgattcagacaaactctctgccttcttatcattggtgacatgggggcgggggcagtggttatgaaaaggggaagaagaaagttatgtaaacagctgtcttggaaacatcaggcagaatgaggtacagtcgccatgagactgcagagagaggggttttaatgttgactacaagatctggatctagcgtcattaagctcctttccttcaaggccgctttctgtttcacttaggaacagaacacttgactaaggactataagtaaataaactcgtaaatgcactttttatttccttaaaaagtctggatgtaagtggccccggagtttgttggctgacttggttatctttccaggctttcccagcctctccattgccatgctccatgctgctggcttttgtcctcatgcttcttggttttagggtgcttattggtggtttccgtccttgcatgagcatcataagggcaaatcttctctttattaggctctagatttttattttttaagaaacaaaagtcttttctaaagccctcaatactttttttttatatttccttctcagtccatttggtctactataacaaaatactgtagagtgggtaatttataaacaacagaaatgtattggtaagaagggaggctgggaaatctaagatcaaggaaccagcagatttggtgtgtggtgagggtgcgtttccaggttcatagatggcgccatcttgctgtgccgttacatggtggaaggggcaaggtggctctctggggcctcttttgtaaggacactaatctcattcatgagggttccacgcttatgacctaatcacctcccaaaggcctcaccttctaataccaccaccttggtgataagatttcaa

SEQ ID NO: 73117 - DNA, 1038 bp, Homo sapiens
catttaacacacttgtcccaggggacagagctggttaacaggaaatgtgcccttgaagagttaaaaaattatcttactcttcttccctgcagattttagttttcccaccaactgtttagtagcaaggagcaactgatgcgttatgctgtgtctttcctatgggaacacgcagtttggtggcaaagaaacagagtaaaaaaaaaaaaaaagttacccaagtggaattgacaagggtgaagggattctgattggccaatgtagaatgttagaaagttattcatggagacaaagcacacagatttaatttaatattgatttcagcttcaggaggaaaaaactgctcttgcagctgagcgtggtgtcatgcagaaatctgttttttcattaggagcaggactctcttctcctccccatagcctccccacatgcatatctcttacactggtggcattttgaggggctgttttttcaccccaagggcaatggagggcagcacatatagtgcattccgtccaagtcacccctggagagtgaccaggaaatcccacacagagcaattccctgaatcagatgttttgctatcttatagcctaggtttgttaggattttctctaacaagcctagagcctgttcttaaaatgacttttaataaccatcactctggttttgcctccttgacacaagggggtttaaaaataaccagtgttaggatcagacaccaggttcactatcactctggtacccatttctggtgcatgttttccttttaagccatgaagaaaatgacatcattcagggccctggctgctgtgtgtggtgtcttcctgtatctccgagcacaaacactcacccattcatcccctggctgcctgaccacctgaaaacgtgactgatacagaaatagtgccaggcaaggaacaggtgggtgagctgagcttggggtcctgccagccctcccatcgtggaataagaaatcttgcgaataaacaccgtatgatttaattgaatctgagcgagaagatagggtttttacagaaa

SEQ ID NO: 73118 - DNA, 1400 bp, Homo sapiens
gtcagtgccgttctaagttcacatataatatttcatttgcccctcacaatgattctagggaaacgtattctctcttttctactttacagagcgagtacagaggcatcatgcaaggtcacacagctataagtggcacagctggggactcacccgggctgtctggctcccgagtttatgctcttaatcagtaccaccttagggatgggatggtcaacaacacaatcaggaggtgggtgagggtcagccctcccctgagctgggtgcactggaatacacctaccatcccctggtcagggctcaggccagcacatggggctgattttgtgaaaagttgtaagcataagcaaataatgggtgtttgccaagttgaagacaggcatagaattgaatcttctgtctctcctaatgtcaaataatgaagtagacagtcgtattcttggcatattatgaatttcttgttttctagttggacagagatcaagggtctcttggtttagaatcacaggaccaagggataatgcaaggcctgttaagaccttttggtgccattggccaggaccacatggagcagggggtcattttggtattaaacagtgactgctggtctatcctctagggggtgataatctccccttcctcttcttgatggacatttattcaatagtcaccaaggagattcagcaatctgggtgtcctacagcctagatatgctgtcctgtgttgttgaggtttatgcctggactttgattgatgccagcccctccaaaggctctttccacagctgttgcttctggttggatggtgcactcactgtgctcagcacctcaggaagggattgagggttgtgaatagtggagatgtgtagggagagtagggaatatgtttcactgccaatatacaagcagtatatcagatttgggaattctactggcaagggttgagtctttgcttgtcaccgggctaaaagttgcttcacctttccaaacatcagcttcctcacttaccaagtataaccactgcattgcaagttgttgtctcgattaattgaagatgcttgccatacagtagggactcaaccatgttagcttctccccccagatgctaggggctgtgtgctttcatggaaagaaatgcttctgctagacttaattgacatcatctttggtgggtcttttctttgcttctgaccacacgtcttttaaacttgagatgcttttatgcttccgggtaacaagcaaaagtcaggccaaggaggaagcaaaactaggatttattggtggggggtcatggaatagggatgttagagattagcagaaaagaactgcaatgatttaaaaaggcaaaaaaaaaaaaaaaaaaagaatatcctggaaagaaataattacatttaagttgatttc

SEQ ID NO: 73119 - DNA, 1790 bp, Homo sapiens
tgaatggaagttcttgatctgggaatccctgcccacagccctagacctgagtgcatgggaagctctgtgctgggcttggccatcacactgcatcatctctctcccactgcccctaggaaatttggcctcaggtctgtcctgaagcagcagccctggggtatgaccatctgtgaggctggcagactagggaatcctctgggagggggaccctccctaaatttagactcttttgtcaagtgcaggcactctcttaaacttagacagcttgatgcttgtttcctaagggtgtagacaacaaggctacctgaagagcttcaacatttggccctggattgtggctacaaccatctgtctgacatagtggcactcctcccagccatactgagggagcacttcctaagtttctcatctttatggcctcagaattcagccattccgtactgtcttgcctctgtctttgtatatatttattccctcttagaacactttctacttgtagtctttgattcaacacacattcacccaactagcttggcacttctctgggcaccaaacctggtttaggtcccatttgtcctttgggccttgcccatcatttaattccatctactttgattacttttctctcccttttccatccttttcctttttctcccaaccctgaattagaggctcctcctctgatggcttagaacctgttgcaaattcttctcacagcagttaccccaggtattgcagttgcttcctggaccagtttcctttccgaccttatgatttattattatttatttatttatttatttatttatctatttattttttgagacagagtctcgctgtactgcccaggctggagtgcagtggtgtgatctcggctcactgcaacctccgcctcctgagttcaagcaattctcctgcctcagcctcctgagtagctgagattataggcacgtgccaccatgcctggctaatttttgtatttttagtagaggtgaggttttgccacgttggccaggctggtctcgaattcctgacctcaagtgatccactcgcatcggcctcccaaagtgtgaccttacaattcttgagagggcaaagatagcctctggttcatctttgcattcagcacctacaatactatccacacatactaactgttcaataaaatgcactaaatgaatgaataaatgcatgatcatttttatgtattttacaaatacaaaatacaaaatcctggtgaagaattggctaagaagatatttttgggactgggaaaacaagcaagagctggtttagtatgattttcattgtaacctgaccttgaggctctaggctgagtaaacaaaagatgagagacaaaatattggatttaagaaatgtaattgtctccatgtttaaaattttaaaaatctgatgctatttgactcacagagggaaaacaaaagtgttgctatgagagagctgtgaattttatctcatctccggggcaacagagtgaataattttatggagagaaggggagaaattaagacaagagtctcacaacgcaaattcagtgttccaaccaaaagtcatttaaagaacaaaacagaacaaaacaaatgttccaaaaccacaagggtaggtatcaaaacccaaataaaaggaaatgaggcagattcccgatacaaaatcttctgtggtggaggctaagatggcgaaacaatggaaattttatgagcatcagctttgtcgaggcacagcaatgcagatcttgtgatgctgacagcaaggaagaaattgcaagtcag

SEQ ID NO: 73120 - DNA, 1070 bp, Homo sapiens
atcttcagagttcatgcccttagaaactgcattcttctgcccgtccatcttgactcatctaagctgggttgttaggtgtcatttgcatattcttttgtggtaattaagaggtagagtacttattttttttaggacaaatctgtagaagtcctaaaacaaaaggggatctctggataactcttggttgtttcatgtcagcagtacaaagcaattctcctcctagcacattttgcttaatctagattttgcgtcaacaaataactttcagtaactgaggcaatcttgaagcggattagagcaaattcctcctgtgctactccataactaaaccaaatctggtctggtctgtggggcttgtctttggaaatgctgagatatagggagtggcagggtgaaatcacaacattctctttgctttctggcaagaatgttgaattcttactgagcggatgtggcaaacacagagtggttggttttatctgaaccgttccattaaaatgaaatttgactagggatttgaagagtattatgactaccttggggaattcctgtgtggatgtaaatagagcttagtatttgtttataggtaaatacccaaaagatcatcacaggtgagggtttaaaagatacagcaagagtagcttttaaatcagggctttattttatatgtgggtacttcgcacatagcactaatttctggatatgaagatgacatttcttatggtactttcaactcatagttatatagcagaggattcatataaagacaggtatatttgtgctctatgtaggttttaattttatccttaatactaagagagagtaacatccaagtgactagaagcttcccttgttagaagccttgaaactgctccattcctcccctctttctccctgcccagggaatctaccacagggctttttgctgcaatcaaaataaggctcagcaaagagcaaatcattgaatgcaagtcatctgggaggcccctcccagccattttgtccttagtgcccttatactacttttcatttctgatccagctttccccttggactgagatttctgactc

SEQ ID NO: 73121 - DNA, 1038 bp, Homo sapiens
atatctggacaagttagggatgtaacaaactgcagccagctttttaatgtttcttcctgagctcagaacaattcagtcattctccttaggttgctgtaaccaggcatgtggtatcccattaggaaaatgcacccaaccttagacaagggctagtctgtaactctcttgtgtctgtctgtcccctggatttacgtggaagaccacctgcttaagataacccagggccaggtgctatgtatacctgtaccatctatgccactttggttttcttctgtcattactgtgttgttttgggaacttggttcagggaaatgatgatgccagcagggcagattccctgagctgcccagaatcccagagggtacccctggggcaggcgggtatggtttactcatcttcaagctgcaggaagtagtggctccaggataagcacctcagccttcggagaaggacgggcttggggaagggagattttaatgtagtgtaaacaagacagaggatttcataagcttctcggaaactcctggacctgacactcatcatctgctactaaatttggccctttcatgttccttgcacaggatataatggcaaccatgacacagactctgggctgaatttagataaacaacatggctgctgaggatttgtacctgttaaaagtctaagaaatgtcaaaggttgtagtaagtatgactcaggacaatttcatttaagttgtcaaaagtaggaaaaagtcagcagtatagctgatcactctcttttgtgcttttttgcacttgtaatttccatgactctcactaaactgcgggaggtaaaactatttttgttctctgggcttttgcgtcgtgtgtaagctgattcccaagtttgggtaatattgtggaaagcgtcagtaccaccactgaagcctcctggagccccatcacctccaccctcttcccgggcaggtggagtgaatctccctgactttgaatttccagagtactcgtgcatgcctcgattacagcactagttgcttacagcaaattatctgtt

SEQ ID NO: 73122 - DNA, 2329 bp, Homo sapiens
catcttaggcttcaatgttaaaatagagtggaatatgcagtagttgactcatactattgtagctagacaacttgtcacttaatacttcatgactttagggattggttaaattaataattttataaggcacatagacgccagagagcttcctccattttgttcttttctctagcaatgtgcgtcatcattacacccctaccaaatagtgtattttagaacctgttatgcataactctgcctctgctttcactttctgtttccctctctctctgcctctccctcggcctctatgtctctttcattcactcttacttatatatactaaaatattgcaaattcgctccctaataattaggaagttttttgcatgtggcttgaggttgtccttcaaaggttttaaatatgtgttgatgagaataggcatagggaggcaggtgtgggacagcagatggaagggatgctctgtgttcaaagatcccaccctagtgaagtgaagcttctacctggggttaaagaccaacttcctgattgtaacagctgtgacccagaatctactctggggttgacttcttctgagagctgatttggctgtgtgagcctggaatactgaagtcaggagtgggagcagcagcagcgacagcaggagtatgtttgccatcaggcatcagtgagctcctaacccctggccagcccggtgtggtgggaaagcacaggttttgcagtcaggggagctgggttggagttcagggttcagccatttactagctttatggtgctgggcaatttattcaatatctctagtcatcaatttacttttttattgttgtaaaagaaatacctcatgttggttattgtgaaggttaactgagcaatgaatgtgcaggtatggggagtttcagatgcaagctttgtctctgtcccttgagaggacagtgtgtcatgtgacccatttgagaataccagtgatttagcgcaaaaagttgctttatctcttcattccttcaattttttgttaatacatttgctcattcattcaatgctggccacgaagcatgtgacaccagtcaggtgttggggatactgctgtgaagagtccgaccctctcctcctcctaccagtctgggggagatgctgaccacaaatgacagtcacaatccagtgtggagaagcaccacactggggaaagtacaacatgctctggtggctttggagtgtcagacaacagagcggggaagaggttaggaaaagaagtggcccacaggataaaaacaagcagctgggtgaaggtgaggcagaggatgtagcatggcacacagcagtggtgaagaaatgaggatggcgggccctctgtagataggtggacatgcctggagtatcgagtgtgagggtcgtgttgagatatatacagagatatggagccatcacaagctatctgcacccaggagctttctcctggcctccccagtgacgttctgtacctcagatgttgattccatggatgctgtcatcaccaaagatgggatggatgctgggacactcctagcacttagagttagaacttgcaatacatgtttcccgtagaaacagcatgttaaatggtagttcaatgtagttaggatattgctacaaataacacctttgagtgtacttaatttaaacctgtgaaatgtagaaaaatcaaagaggacaggtcctgttccaggctagaggtactttttgcaatgcagagcactatccttctagatctggccagcagagcatgaatcgggacctcaggctggctttgcctgcatttggatttgaatttgaatgttttggtctaggaggctctctgcacagggtttccatgattccatcactccctgctgtttcatatctggctgacttcctcacagtgaggttgcctacttgcccctggaggtactggacttggaaaccctttctctaggcagtaggggttggagatagcatcatcgtttccgactgattcatcatcagcttggtgttagtccacttacaaagtcaagcatgacagttgaggcagtgtttggaggtgccctctgactttccaccaaatgcttttttttttcttttcacttcttccaatcctcctttttttttttttttttttttaatcatttcctctaggcacttttcttttctagggcaattgaattcaattcagcaaaagtatatgggacgtcttctatgtgtctggtacttaggatgcgagggataacagagcacagtgtcactttcagggagatcacagtctagcatgaaggggtgggagacagacaagtaaaagggctggttctagatggtgagg

SEQ ID NO: 73123 - DNA, 1081 bp, Homo sapiens
cagagaaggaaaccagagcttttcagaactcagctcctctgcacagcgacacagtgagatggacaagggctgctctactgaatttgcaaatgtgaatttaacccacttatgaaaacagtaccgggcatggctatatcacttatcagctcatcaagtttgttctggaggggaagcagttttgtgtggccccactatcaggcaccagcctcataaagaagcaagcagcacaaatcctaaattctgtggtgtttaatggaggccatgtcaacacaacagcgggaaagagagggactctctaccaaccggtatactaagacataatctagaggccaaaggactccagataaattacccattgcccaaaacaaaaggaagtcttttgataagagaaatatttacacctggggagtaagccatggtcccaggaagaaaatgtcttaaaatgaactttgcatctatttagttttgcattttcagtccccaaataccccatcactgttttcctgttttctttttctctcccatgagctcactatccctttgcaaatttaggggaaataggactgctgttgactctgcagctgcaaaaaaaaaaaaaaaaaaacttgctaagtggaagaaaccatttaaaaagggccacatactgtatgattccatctacatgttacatatttatagctgtccctcagttcttggattttctggtctaattttttccatctttttctttccagtttggaagtttctgttgagatatcctcaagcaattctttcctcagccttatctagtctaccaatgagcccatcaaagacatttgttatttctgttgaagtgtttttgaagcattttctcttgtttcttggaattcccatctcctgggttacattgccttatctgttcttgctctctgtctacttatccagtagagtcaaatattaatcatatttgttttaaattcctgatctaataattccaacatctctgccacatgtgagtctggttctgaggcttgctctggctcttcaaactgtgtttttttcagttttagtatgcctggtaatattttttttttaacttaat

SEQ ID NO: 73124 - DNA, 1031 bp, Homo sapiens
tgtagccatcttgtcccgcctaaagggggctgggctgagaacacctgtgaagttcacagttcgcaggcagaggctcactaaattaagacctaattataggactacagattacttcccctccccacacctcgccaccacattattaaaggcctgtttacagcagttccttttacccagtatatcatacccagctatcaagaaaattaagttaaaaaaaaaatattaccaggcatactaaaactgaaaaaaacacagtttgaagagccagagcaagcctcagaaccagactcacatgtggcagagatgttggaattattagatcaggaatttaaaacaaatatgattaatatttgactctactggataagtagacagagagcaagaacagataaggcaatgtaacccaggagatgggaattccaagaaacaagagaaaatgcttcaaaaacacttcaacagaaataacaaatgtctttgatgggctcattggtagactagataaggctgaggaaagaattgcttgaggatatctcaacagaaacttccaaactggaaagaaaaagatggaaaaaattagaccagaaaatccaagaactgagggacagctataaatatgtaacatgtagatggaatcatacagtatgtggccctttttaaatggtttcttccacttagcaagtttttttttttttttttttgcagctgcagagtcaacagcagtcctatttcccctaaatttgcaaagggatagtgagctcatgggagagaaaaagaaaacaggaaaacagtgatggggtatttggggactgaaaatgcaaaactaaatagatgcaaagttcattttaagacattttcttcctgggaccatggcttactccccaggtgtaaatatttctcttatcaaaagacttccttttgttttgggcaatgggtaatttatctggagtcctttggcctctagattatgtcttagtataccggttggtagagagtccctctctttcccgctgttgtgttgacatggcctccat

SEQ ID NO: 73125 - DNA, 1447 bp, Homo sapiens
ctcaggggtgatggctggtctaacagcatgtttctcaaactgggatccacagaatctcgatgcaaattttataatcttattttagcttaaccttataaatatgacttaaaattatatatttaatgcaataattgaagcaacggggtgaccaagttatcgctagtatgcaggtacaatttcagtgctcacatgtatggttgtattccctccaatgaagggcaagtgacatcttgaagcttggcatgaatggagggaggtgtagcaccaaattaaactgaggaaagtggtgggagaattgagtcatcccacagcacggggtagcataggcatgccacactcaaaaatgccaacatcttaacaatgtcagcatggtatgtgtgttgcaaattagtttcaacaaaataacattactggtgttattagcttaatgtggttgatttgaattttattgacctttgaaggtttgtttttcatttaatttgtgagtttgtgttacttttcaagttatatcagagctgtcagcatgaagagtttatacccagatttatgttggtatatttttaagtagcagtatagtaaggttaattcacattaacactgaaggtcagggatgccttttttctctttatagctcccacagctttcagtgtgagaagccctaaccatcacaggggggtcaacaggctctatctatatttgatctgacctggaggagatctttacttttggactttacaaggcccaaaaaaatgacttattgcaaatgacaggaactacattcaggaattctacccattgtcttcaacataaattcataaaaatatgcaaaaataaataatagctcctgttcctgttcatggagaaactggcactcctcaacttcttagcctcttctcccaggcttggtggatcatcttctgtgcttcatactctccttgtcccttctggtcagagctagggttgacagactctttcatgcaggatgcttgttttgtgtacagaaacttctagacttgacatcaggaaatgctcatatttaacttcaaacacaattctgatcagtagtttctacggagtttggcatccctagaaaacatgctgcaaactgctgtcttcctattttgctcatgaccccaaggcttgctctgcacatctgctgtttgtctctctgtaacatatatactctgcctttcgtgttgcattctctgttgagatttggatcctgcccaagcagcacgaggggcctttggagctctctgggcaggaagtcacatcctgtgcaggagccaagttgaaatggcttccgatttggggcagaaacttgggtacacagacattttgtgaaaccattgatgtttctacttgcaaatatttctgcaaacaggaacaatttctgttaactttccatgacctgtgtcacagaggcatgatgcctgtctgctatttg

SEQ ID NO: 73126 - DNA, 1054 bp, Homo sapiens
ctgggatccaggatccccatcagggctctcagtccagtgtcccttcctctgctccccggcttctccttgcagcacatgggcactccctaagatgcttgctatgagagctgactttcgcccgtctgcctcctttgagttcttcatctgcccaggaccagctctgcatgcagggaagagctgttggctcttgggaaaacctgggtctcccggggccgctagggacccagagagaagacccccctgcggtttccccttcttgtgaaaacacaagttcttgtgtggtttgggagagattcaccctctcttttcatgaaaccacctgggaggaagaaatatgccccaggagagtttattttctttgactgatagaaaatagagtcgtgttaagggagcttttgcatggccctgagtctcggaggatgggtttcaggtcagcaggctgctagatttctgtggggcatgtgtgtgtgtgtgtgtgcatgttggggtgtgtgtgtgtgcatgttggtgtgtgtgcacctgctattaggtggcagtactctgcatgagcctccataaaaggtatagcacacgtcagtgcgtcactcacagtaaaggtaccacaagggaatgacagctaattttggggtgccttcctcacttgtaagagaggcagcttccacggcagcatttttgagatccctggaaggggagctggtaagggaaggtgcttccagtagcttcatggcagtctcctcctgagagcacaacaggatggttcacactgaggtgaaaccctgacttggtggctaagaatgatcctatagaacccgccccacttagttttcctctgctgggaagtagaatcaaacattgttgtctaagtcatgttacacattcctgcgggatgtgctggagtccagcccgttacagttcatcacccatgcagctttgcgcccatgtctgtagtcagagggcatataaagttatacactggagaaaaaagcaccagatcctaaaggcacatctttccaggcttaaatggagatgggaaatctggaaaatgcaggtgtta

SEQ ID NO: 73127 - DNA, 1074 bp, Homo sapiens
gaacagaaaaccaaacaccgcatgttctcactcataagtgggagatgaacaatgagaacacatggacgcagggaggggaacattacacactggggcctgttggggagtggggagttttggggagtcccctttagtctagagaacaatcctcagatttgttgtggtctttctataacattaagatttttgaagagtctgggacagttatttcacaaatcctcagtttggatttttctggttgtttccttggggttagattcagattagacattgggtgagactagattttgagccttcagagtgagggttcaaggcagaactggaagagctgcggaatggggaccctgccctggacaggggagcctctgtggacagcacatctcagcctggctccggcatgtgaaggactatgtggggtcagtgtgctgtgccaattccagggcattgcagtggagagatgatcaggtcagcggcacagagaagacttggagacagaggcctggagcagctgtcagggactcataggaacccggcaagaggcacagaagagtggtgggggcttggccagagcagcaatatcctcaaaggggatgtgcctgtggatgtgtagggctcgtctatgggttccagaaatacttgggagggacttgctgggtaggaatggaaaggttccttcagttatccctgtaggtgccacagagccaaggaaatctcacctgtcaccacccatgtgtatgtgtgtgttttggggcagacatgagggtgctggtattctctaagatgaaggttcctgtattgttgataatctttgcctgattaaaccctgacagtggggtagaattccaatagttagatgaatatcagggcttacgatctggagaggaggagaaggtactgcttagcaggtgggaaatgaatgaataattgaaagaaaatactgatttttctttccttgattgaagtagaagccattggggtggaaggaggggaagatgaaaatgggcagtttggaattctctcaaactggaagagaggaattgaaaagctactatagtcagggatcttatgtaaact

SEQ ID NO: 73128 - DNA, 1056 bp, Homo sapiens
aggtgtgaggagcaaaggagtcagcatgtggaaagaatggaacacagtgaataggtgcacagtaacggtggctgatgtcattatacagacaattgtctcccctactttaatccatgtgccctggtgggcacacatcacccccgtgtgctgtctgggaaggggttctgtctcagttccagatccacctttctatattctgctctgctgggctgggactctgctgactacacatctcctttgccaatcagggaccctagggggaagccggttggcacaggatgggaggagagacttggcccttctgtttgcctgcctgtgctgtcagcagcatcccagcattgacctttcaccctggaagcagcattggttccagtgcgttgtggtttccagtttcttgcagtactcctggaaccagccccatcacagctgctttgaggtaccagcacgaaccaggcagtgccccctccacaggagtctgagttccagcttctgaggggctcctccttcaagctgctaggagctgacgaccccaggctgcttcctaagtttccctgccccttagagagggtagctacttcttatatccagcactagaggtgtttgctacttcctaataagctttttttactcagggttccccatttgcctctcatatacccctacccccgtttaaccaatttcctataataaatcatctttgttaaaatcgctagtgacgttttgctttctgactgtaccttggcagatactacactctatgtaggttgcttgctttcctgtgtgtacgagaaatggttggtacagccgaataagcgctgaattaaaaccagaaagatgtaagtttgttccttggctcccactttctagctgagaaatcttggccaaaatacttggcttgtttgagagtccaattttcttatttgtgaagtgggattaatcatgtttatcttgtaggaatacatatagttggatgagataatgtctaaaaagcatctggcacctaacaaatatttgaaagatgttggctgtcattatgtatcagaaacaaatctttgc

SEQ ID NO: 73129 - DNA, 1032 bp, Homo sapiens
acccacttccattgcctgttactcagattagtaaatcccagactctgtttagtaaatcaccatggtagcaggaagctgacataataatattcaaagcacataaaagtgcattcactttgaccagaaaagctcccctgtcacatgcaatgcttagcaaaaagaaaaggactacaggctggccctcccagaagcctgatcattctcagtgacttcctcagagaactcctgctgactcctcactcagcgttggccttcttcactgtatactctctgagaacctgttcctttccttcagagcactcatctccattggaattagtgatccactatcatggttattggtttatggctttcatttgactaaaagcagcaagagaatacagactaatccttaataggtcttcagtaaatatgtgtcaaaattttttattaaatccattaggggtcataaaaaatccacatcccttgggactcattaaaccagacacttcttcaccctctaggcaaaaatctgtatgagtttgctagggctactgtaacagatttctacaaacttagtggcttaaaacaacagaaactgactctgtcatagtttcagaagccagaagcctgaaattggggtgtggaggttgattgcttccgaaggctctgagggacgctctgttccaggcctccctcggcttctggaggctcctgggaatccttggtgttccttggcatgtagacatatcacttcagtctctgccttggtcttcttctcctctctgtgtgtctcctcagagatgcccatagaaaaactccgaatctctcacgtgtaacaaatgtttacatgaaaccttctgccgcaacaccatgtcctttcccaccagcaattatccacccacatccttctatctttttttgtggacatccaaggttctctaaaaactggaggcttactcctctcactctcattaagtctctcaacagacatttgttggtcttccctgaagggtaataagatttccccagatggagaagacaaaggcattt

SEQ ID NO: 73130 - DNA, 2026 bp, Homo sapiens
ggcatgtggtagaagctgaagaaatacttgttaaatgaatgaatgaaccatgcagagggtaaagactaatgggcaatgggcaacttctgatgaccttggctgctctgctgacttctccatcaatataaagtcttgagttaatggggcaagggagtggagcaggattaacctgcaaataggatgcagaaaatacaaaggatgtatttcttgggcatctgctatgttctaagtattctgcatgtttctgtgtatttcttacaaatatcctgcaaggtaactgtctttatctccattacgtaagtgtgaattgcccaaagtcacatattcttgtgcaaccatcagttgcagatccaatatttaaaccttaaatccataccttcctgcctatgccaaatgacccctaaacaggtagcatgttctctctgaggacatgttgcccaagctttaatgcaataagttgcagtaatctctgaattttagggggactcttgacttgactaatgcttcttttggtttagtttttgttttaaactggcttgtttctgcacagcaccatttatacaaggaattcacagcactttgtgattaggttccttgaacatgcaacagcattaaagttgttttttatcccatctgtaaatgcagaaaatacagtgcaaggaagtcatgtgacttgtcagagtgtaaaagtgagtcattggtgaagtgtgtacagaaatgaggactgttaagactattttgagaactgacatgaatctaggatgtataatattatgtatctattgttgtagttatggaattgtttaatattttttgcttctttaacttcagtgcttgcaattgtatattccagaatgcaacaaagcaatgccaagaggctttcaatgacagaacacaggcatcagttacaggccgttctgcctggagattagtttctcttatgcgaacagcatgttgagtcacatcagatcttacttactacttttgtttctattaatggctttgcaaactctcaacttgcaagtgtgtctgcatggctaaggatgtttgaaggaatgaacatcagagaattgtaggggagccctctgccctggtccttcctggacctttcctttcacatttaccccctagatgaggtctttcaattgcagatgtaaccacgtcccctcatgttccaatgaggaccaacctgggagcctagatgttctgagacagggtctcccaggcttggaatgcccaactctgttctcgaagttgctggaaggcagcctggacgtaagagaagaaaaaaaaattaagtcaatcatgtgtacaactccacagtggctctgataccgagttcctcaaaatgtgtttcacaagatgtcagttccatgaaccgctctgtgataaacagattccaggtccaaagatctggggaaagttgtgggtgatgtcacccatgcagagacccacagtgtaaatcagcatattggaaatgacaggaggccctgtagaaaagaaacccatctcttttcgtttaagatactgatatcttttggatgtttgtctcctcctaatctcatgctgaaatttggtctgcggcgttggaggtggggccttttgggtcatggggatggatccttcatgaacggcttggtacccatcttgtgggactgagtatgtccttgctcttagttctcatgagctttatttgttaaacagtctggcacctccttcctctgcctctctttccactatgtgatctctgcatggcagctccgcttgccttctgtcacgagtggaaacttcctgcagccctcaccaaaagcagatgctgacactatgcttcttgtacagcctgaagcactgtgagccaaatacacctcttttctctataaatcacccaggctgagatattcctttagagcaatgcaaaaggactaagatagatagtttttctaaaattttcttgaatgtggaactctactccccctcccccatcacatctctgaatatcccaggaaaatactgaccactgagggaa

SEQ ID NO: 73131 - DNA, 1014 bp, Homo sapiens
ggctggtcttgaagttttgtcctcaaacaaagctcccaccttaacctcctaaaatgctaggattacaggcatgagccaccatgctctgcctactaaatttttaaccatagaataactttgataagggtagcaacaggaacagatttggttcttaaaggaacactctggcagcactgaagatgatagattctgtgtttagtcttcagaagcattcattttgattgttgaaacatagcccatcgtgtttaaatattatttgtgactaattatttccttattgtggatagttaggtaatgttaggtattttgctattgaatagtattctgaataaacgtcttcatgcacagaatgggtttgtttctgctgaattgcttccttaaaatgagtttctaggattgagatcactgagtcattgttcttaaaatttttatgcttttttggagccaagtgttgtctgactgcctaaagattgtaccaatcaataacagcatttatattattaattatttttcatagatcagaaaagagaagctcagattagtgaattagctaacacaggtaggaaaatacacagctgtgctttggaactgtgtcctggacccatccttagtctagtggtcctttctctcctgcttgcctctgttaatcaaattgtttcttctagtcacacttggatctacatgagaacccgtcctctgtgccacggaccctgctagatccgaggactacaaaagaagaaaatgcagttctttttttcgaggaccttatggtctagggaccttccccatttccctcctctctgcctcactggcatggagaaaatctcaagtgaacagactgaatgacaaaaggaaggaaagaaaaagtgttaaagccatatgccaggctatggcttggataataattttgactcagcttccaggaccatgctgagaatagcgagcaaattgcatcccatgttgtgccagcatttggctgggtcagccagccacttgggtgaaggcctggaatta

SEQ ID NO: 73132 - DNA, 1144 bp, Homo sapiens
aaataagtcacttaccacaggcaaccagggtgcccatttgggactgggtgatgttcgtcgtgatgggactaattaactctggaaatgctgaacaggtcatggttaagacccttttgaaatgattggtgccaggcttttcctgggcattagtccctgtcctccccagatccctcactccagctactgcaggatgcaattgaccaatggccagagagacacagctgacgccacgctgaagtgctgaaagcagacagcgctgtcattcatctctcttctgctcccggggcaaggggtggtgacagcttcttgttcttctcaggtgccaccaacccccttttgatcttcagtctggttaaactaaaaaaatgttttaaatgactccatctactgagaatttcaatgttggctctattacattccttaatttacgcttgttaattttgtctgacttggcttgcttagattcctttggacatatgatccttatgaataaaacattcaagggccaaatgtttgagtgggacatcttgacgtgaatattcctggagagtggcagaaagcgtggatcagggcaggtgcctctgtcccagagtgagacctagaaacagctgtggtgtgctggaaggaatcctcaaacctggagtctgacgatgtttaaaggctgattctgccactaatgagctacttgatcaggcggattgcttcccctcagtttctttaggagacggtgtgctgtgtagtactagcactctcattttgctgtctctgggggaagattatgcatccttgtcgcattgtactaggtgtggccatgtgatttctggcacccctccctcctgctggcgaaggactatatatccctgccctattgacgtcaggcttggctgtgagatttactttggctggcaaaagtgagtatgaggaattgtgccactattgtatagatgctttaagagacattgtggttctgctatctccatttctctctgttactgagtcctggagcaaagaaggcatggacaagggctgtagctgacccatcatacatgtgtgacatgagtgagaaacaaacctttgttgaggcaaatgcttagatttttggggttgtacattgttgtagcatcgcttagtttaaacacattaa

SEQ ID NO: 73133 - DNA, 1050 bp, Homo sapiens
caaggtaaataatgaatccagcctgcccaggatatatcaggttgcatagtgtgatgaaacacataccatcctgaatgttcttccaaaagaacatgtacagaaaatgctgtccttctgccagaatacaggctccttgccaacccccaccactctccaccttgagaccaaacactcagcaagctgaagcttgcaggccacggtgactggctccatgctgccttgggaagccctacatgacctctacatggtccttcttcagtatgtgaagtacagaggcaacaccaggacattttgaagggcaaaagaaggttcaatggggcaatttccaaggcatcttgctccactgctggtaagcaattagcaggctttctacagggacttctcaaaagaggatccagaaggcaggctcagcattgcagcctggctgcaggccacagtgtggcagacgcatgtattcatgggcatgtcaaatacatcacttcaatacgaaattcataggcccaacattcatctgcgagattgaacactgggtagctcaaaagctagtcttctgaaagcatcctacaaaacacccgaagttgccgttccagaattgctataatttcacgactgtgcaagctgtactagtagtacacaggcaaagggatagaaaaaagattatattaatgctcaagggggaaaagcaagattataaaggacttagcagagctatgttctgataataaaccaagagcatttaggacccaacctagaaaaaaatggatttacagccgaagtctttcctgtttggggctacagcatcattctgtcattctaaccacatttatcctgaacctccccccaccacccgctgcccatgtgctggccaccgtgctgggatcaacaaaactgaatgagacacaggacctgatactggggagctgaccatctagcaggtgacgtatggatggatgaagcatcttaggacatctaaagaaagagatcactcctccatactggtaagtccacagacagctttacggagacatttgagtaaagtcctaaaaaggg

SEQ ID NO: 73134 - DNA, 1066 bp, Homo sapiens
ggatctgttaccccgtacagttaagtggaaatccagctgaagcctggagtttggctgggaaagcttgcagatttgatgaatcaattccttttagccaaagaaactatattggtttgattaactaagcaaaaagctagatctgtaatcatcacaccagaattcttgcaaaaccaagcagtattacggcagagaaactctaggaccaaactcaactctactcagagctttatacacaagtctaagcataactcaactctactcagagctttatacacaagacctaagtaatccttaaaattctctcatttaggaattatatcactcagttgtgattaggcagcaaaatgccaagatgccatcaaattggaaccattttgtcacattgatttatgttttccctatttttactgaggaaaaaaaaatggctgcccgggttgacattgagaagcaacttataattgatgttaaggcatgcagggttttatatccctaagagatcaattcttccttctcaagggatcagacctgctaactgacacagtgaaaaataactagtcatgtggctctttttcatgaactaaaaaaccggagttcagttgtcagatctcagttgacagcttatctgattacaaaagtaagaagaaaacaagaactaatttctaaggctgttgtatctattaggttctgtagactcagtgtctgccacctcaagttcttcaagaaaactagaaaatgtttgggacccaaaacaaaaattattagctccaaaataaaagaagaaaatggaaaaattgggaaaacattgtttaaatacctagaaaaggtaccagtcacctgccattcaactcaatgttcagagctacatttaaattatatttaatgtacagtatgagttcattttaatatgctctgatatgtcatggggtggcccccaagaaactctcatagtgccttgcacctataagagtttttaaatggcccagctaaatttgtaatgaaaggtttccagaccaagccacaatcaatgtttgctttgcattggttggggggattttggttaatgtta

SEQ ID NO: 73135 - DNA, 1052 bp, Homo sapiens
ctcaggaggctgaggcaggagaatcgcttgaacctgggaggtggaggttgccgtgggccgagattgcgccactgcactccagcctgtcaatagaacgagactctgtctcaaaaaaaaaaaaacaaaaaaaacgcaaacctccagagaggtggagctaacatactcaatccctaggaaactgctggagaccaggagagttctaaaagatgcttgttagcaaatgtcccaatttacccaagagggaaagatacaggtcctgctgcatgggctggtaagccaggcaaaagtttaggccatataatagttttttaaaccctccaaaaaggaagagatgggttttgagagttggcatgggtttgagaaaaataagccacgccaaatgactctactggctttttcccttataggctgcctaagggggcagactggagaaggccacagttactgtgtatcttgaagcctatatatatctttatctacttagacccttgacaatacaggtggcatggtcacggggctcagggatgcctgagagtaggctttggccattctgagcaccttatattcttgagcccagcacattctctgaagccaccatgccaccgccacatagtgttcccatgcagaatcaccttcctcacaccctttgtctggctgtttgttcttcaagactccgctcaaacagcacctccccttggaaactttctcttctgctgagtatgatttagaagttccttatccatgccagccaagcaccctgtaaactctgctgtcactatcgcagtgcgctttccctgggctgcaactgacagcttccttatctgcctctcccaatgcctgcaagtacccaaacaggattgtatttccaaagcccggcacagtgccaggcacagaggggaccctcaagacatgatgattgcttgaatgagttttgcttagaggctcaaagtcaacctgaaagaggttgtctctgattgtgttctgtgggtttctccaagtctagacttttatcagtgacttggaagaataatatattttcagggaccataaca

SEQ ID NO: 73136 - DNA, 1033 bp, Homo sapiens
aaaagtctacaggacccctttcttatagacagttgtgggtcactgccatcacttgcctcctgcttctcagcttctctcctgtggcttcctcctcctctgcatgtgcctttcatgcctgccatcctagtaagagcaagataatgaaaaggaaggaatgaggactgggagagtagtgaggggacacagtccaggcacccagagacccctggcataaacacgcactcagggaatgccacccctcactgcaaagccagatgggagcaacagacctcccggggctgccccacgccccccagatctgagcgcacccaagccctgttctgtcttaggcacttggtggaaacctctaatacattgtcctggtgagagggagtttggggaggttatctaaatacatccttttcagaataagcaaatttctactttccatgattgcaaaagttgtcttaggcaagggactgctttgaaaactgaccaactggcactcagaataggaggcctctgaagggaggatagtttcaggatctgccagatgtcagttttgagcctagattcacttttgtcagctgaatgaccttggacaaggtatttactcttggtattgattcccttatcaagaaaatggggataatgagcagccctcccaaggtgtcctggcattgagcagctctggggatctaagtacaggcccatagcaagcccaaagcctgcagctacagtcaccaccacctctgtccttgtagccctcatgggaaacaggggcaccacgggaccatcggttgtgctgtggggtgcttcaactcccacatgcctttcatccttcccggctgcatgttcagttgcagactcgacctctcacactggtctcaatctatcagcaagccatgagccctgcctcttcactccacggatgagtgggagcagtgtaagtgataacactttggatgcatgaggctgttttcccatgtgataaagcgtcaagtcttccccacagagggagaaggaacaccaatatgcagaccacaatcaatga

SEQ ID NO: 73137 - DNA, 1017 bp, Homo sapiens
gaggccgaggcgggtggatcgtgagatcaagagattgacaccatcctggccaacatagtgaaaccccgtctctattaaaaatacaaaaaaaattagctgggcatggtggtgcgctcctgtagtcccagctactcaggaggctaaggctggagaatcgcttgaacccggaagacagaggttgcagtaagccgagatcgtgccactgctctctaggctggtgacagagtgagactctgtctcaaaaaaaaaaaaaaaaagccctgtggtgagagcaggagagcagggagcttttgaaaacatgagggagtaccccaagcaaggagaagagtgatacaaggtgagtctgacaggtctggacagggaccatgatgtgcaggtcatgaaggcctcatcagggattgggcaacgggaagcttttgatgtgcagtaaacacgggagtgacaatatattatttgcttttattgaaaggataattctagctacagtatggagaaaggatggaagaagagcaagagtcgagcactgggagggcctcactggggtcttggggaggatgatggtaacttggactagggtggcttctgaggaatggaaagaagggtgcataatcacaagattcccaggtaaaatccacaggtcttggttatcaattggaggtgtcaggaaggactgtggtgttttgagtctacatccaagatggaagataatgatgccagttttagcagtgggacgagatcatgagaaggtcctgttgagtccgaggtacctctgagccacccagctgtagatatcaactagatagtggaaggtgtgctggagctcagagaagtcagggctggagatacacatttgtgcatcatcaacagctaggtggcaattcaaactgtgggctgggaggcattgcctaagaagaaagaacgtaaggagaagaaagccagtgacgttcattgcagaatgtcagcgcttatgtttaatggtcaagtggattgtttcctctaaaacaagtttagaggaaa

SEQ ID NO: 73138 - DNA, 1841 bp, Homo sapiens
ccctaggaaaccagccattcaagtttcatcatctggcatcaatgagcacatcctatgtgtcagacactgcgcttcaaggatagaaagagaaatgatggacagggccttggggaatcgttcttggacagctgggttttaagagtagacaaacatgaatgcattttttggctttttttccccgtaaaaacactgtacccatcatcactacctttctaaattggagataccaacatatttcaatgctaacttttcatgagtgttcagtgtcaccataatgaaaaccagtaactgatgagacgtgctgtgatctcattacagaggaggctgcgtgtgatctgacactgaaatgcttctggtcagctgcacttctgggctcccatttctgcttctgatcattttttgggtctctttcttctcatctctggtcacatctcttgtattactacaccaatctgcagtgggtcctgtactattattttgttgccgtagactaagctgaaaacagaaactgttagaattacgagtcaaatcagagtcaatcagctccatgtgagtgtcagggactcatctgtagatatggtgaaggtgttggtccaacaacttgtgatatttaattctggatgtgctcagatattttcttagctaagtttgggttcttgggtgggtctttttttttttttttttttttgagacggagtcttcctctgtcgcccaggttggagtgcagtggtgcgatctcggctcactgcaagctccgcctccccggttcacgccattctcctgcctcaggctcccgagtagctgggactacaggtgcccgctaccatgcccggctaattttttgtatttttagtagagacgggatttcaccgtgttagccagaatggtctcgatctcctgacctcgtgatccacccacctcagcctcccaaagtcctgggattataggcgtgagccaccgtgcccggccttgggtgggtcttaacaggagcagttggaagagaaagtaccctacaacaatttataagcttgcagaaatatctgatgtttctttcctccccaccaaggctcacaaggagtaaaaattaaataaacattctgtattctggctcaataggaatgtcaggaggcagctgtatattcaacattaggaaaaaaaagattacttctaccatgcctcagactttgttcttgtgatcagggaactatcgctaatcctgacgaacaagttgactttagagcagaaagttaggatcagatggaattgggttgaatatcagctctttgctgaaaagctgtgtgactggacaaataattaatctcttagaggctgcttcctgttctgtaaaatgaggatcatggcctttgcagggctgtcacagggattaaaccatatgacatataggaagggtcctcacacatggaggactcactgcctggtagctactgctatcatcactgttactatgactacaacaactgctgcttctccctgtcccagcatgcagaccagtgcttagcactatctgccagcctacaaagctgtgaactttgggaaattactacacagttctgagccctgctttctctacctataaaactgtggataataggtacctcaaaggatggcaaggaataaatacgatgacataagtagatgctcaaaaatattacttctcgcttactcttgcccttagacaaaaacttatcagcaggatgtaagtcaacaaataggaaaccatctgtgtcttagtccatgtagcccccatattaagttaattcataacttcaaaagttcgaggtaataataagaaaccatgcaattctttttgaaggaactgt

SEQ ID NO: 73139 - DNA, 1024 bp, Homo sapiens
cttcctcccccatggtattttaaacttaaataacacagtctccattgtgtaaagcaaaataattttccagattccctgtgtacctcagtgcaccatgcttagggaatctgcccggcaacacagacagactgtgggagtatgccgcggaggctgcgtcccccgcttgctggttagggtgctcctgtgtgcccagccttccaggtctggcctccccccagccccccagccagcccccaacacaaatcatttgggctttatcttatctttagcaggagaatgcttcccagatgtgtaggattaatggtgaatattacacagcaccccctggacagagatgggtcctgggtgactccaggccctaaaaacctttctccagcgtggactagcggggagctccagtccccacctgagagttgaaggagcatcccctccctgctttgcgatggctccagagacaagacgtgtgccctgcccccaccccacattgtctactttgatttacagcacagccatcacagggggacctttttggttaacatttacaaaagtgctttctgtctggtttctagatggagactgacaggatcctggcttgggggccttccggcagggctggctgctgggctggcaggctctggcgctccccttccccagaactgactttgttcctggcagccatggtggctgcactaaccacattctgcctccacctttgcactaagaaaagcaaataagcagaccacagaactgtttgcatttgccccagatgctccctggctgcgggaagaggtcagtagggagcatgcagggagaggggaagggagaccagcttctgcagggagggcacgctggaatctaggcttggggagggacgaagggaaggcttgtccagcccagcacaagcctgcggaggggcactgtgggcacagtgcatgaagtctgaagaggtgatgtgctagataccccaatccctggcatattctgcatttcaaaacagagaataagtagtcttgccactataaag

SEQ ID NO: 73140 - DNA, 1053 bp, Homo sapiens
tagtgtctaggaaccacagaccctgagagccagccgcgcccataagggttcaggatgagcctgaagtggaggctaatcaggtgagcttgcctcaggcctcctggagcacttccctgtgtccttgctggcaccagcagcttctctttagcaaacacatttcttagtgccctggttatgtgcagggttagactgaatgcacaacacaggcccatccgcatcgccaggtctctgtgacccacttgcggttggatattctctcaatgcttcaaactcagccgaagtctgtgatcttgtccacctcaaaaatcgtatgattctattttaaaaactgagttacgtatgttcgctaaaatggaatctcccctcttaattcattccctgtcattcttctgatatctaaaccgtaaggtcaagttaaaagggtagaagatgatcatagatatatagctgtgattctgagtcaaattcccaaaccctgtcatcacctccctgcaaggttcttgagagagaaaaatgcaaaaaaggtaaggctcagtaggtgggcttgtggccaggtgggggcactgggctcaaatttccaaggggagccctggcaagctgggcagacactcccatttccttgtttcctcatcatccttcaaattcatatgagcacctacaatctttcaagcataggggagagaacagtgaacaaaacagagcccctgtgctcctgaagcttatattctagttggggaaacagaaaataaataaataaagatatatataccagcataggagatggtggttagtgctgtgcagaaatctgctacggcacgtggtgggcagaatgtgtgtgtgtgtgagcgtgcgcacgtgcatgtacatgctttactatagttagtggtgtcagtgagggctttttgaggagtgacatttgaagaaagagctgagtgaatttgagtcatggaaatattgaggggaaaagcatcgggtgaaaggaagagcatgtgcaaaggccctttggtctcacgccggggggtggaggcaggcttcgggccttatcatagaggt
